United States Patent Application Publication US 2022/0290142 A1 - sequence listing, part 25

SEQ ID NO: 15826 - DNA, 38208 bp, Homo sapiens
gtttccggaacctccgggtgtcatccgcggggaaaggtggggaagggtcccgggaacgtggtggggcagggcctccgagcgtggttggactttgaaggggatcggccgccgtgagtgtggggcctgcagcctactctccccgagtcccctgcccggcctgcctcgctcgaggcacccgacggcttctgtctccgcgggctggcgcctgaccagccaggcccagcggttccccgcctactgcatttgaaagatcccgaaaaccctggatgattgtgcctggggttggcaagttcgtcttgagtgccttcaagaagggttcctcaagcagttgtcgatagagccctccctactgtatacgccccctccgctcattcctgctacttcctttctcctcctcgtatttccccctcggtcctttacgccgcctttccccctcatttgcagatgctgcatcccctttttggaattgctcaaccaggtggtaaccggcgccgcttcctggccttgggaggtggttcctttcttaacccacaagaacctctcccaagaggtactgagatgcaacaagcatcctctgtttcagttaactttcatgggccgtggactaggtttactaattacttggggaggttttagatatgcttgcggctttctgagtccctaaggaggcctcgtgagagatggactatctctgcatccctagtagtcctcacggcttttgtgctattagtgagggtgttttagaggggaaggtttgtggaggaattgtgacccgaatattgaagagacctaaagatggaattggctgagagaagactacccctgagggaagagttgtagtagaaaagaaaaactggatagataaatgaaactgaaatgtgaggatgcctgggcggattggaatcctgactgaagcaaaagatctctgttggggagggccagttgccacagggccttgaattccaagatttattctactgtagtttgtgtattctagagcatactgattagggtttgctgtaatgcaatgtgtgtcaaatgcccagttttattttggagatgatagtggtgatatctggttggaatttggaatctgattctaacagcaactatatctagaaagactagaattactggagttttgggacaccaggggtttttgcaatgcaagttaccatcgtgcctttttgttattcagtgtttagtctatgaagatgagtaaatggttgttttcaagatttaagtctcttgccatgataatgatgaatgaatgattttatagattgactatagtggtttagtgagcagagttacaattatgagcattaattcccagaccagttcccctaactcaccttgtgctcaaatatgaaaaaggataccacagaaaatgtcagttactctcagattaagtaaaaatggtcaaccttgaagttagttaacaatcctcaagaaagttcactgagtgcactctgccaggtactggggtggaggtatgtgggtatctggaaggagaaataatagaaaataaaagatgctgttcccacttttacagtgctgtgggcggagccccctaatggcaaaggatttgattaacttgaactgaacctttggttggtccactgtggttctactccttataccacctaattatggtacaggggttgtatgttttctagtctgccagtactctcatcgttgtgatttgggcttccttgagggtctcagccttcttgtaggaaagtccttatttaataggagccacagcatttggtatgtttctcttatattttcttcttaaggtagaggtctgtgagataaactgtaaaactgctgggatgatgagggcaacggtattgatgccatctgttttttctgtctcagaacttggtcctgatgtctgaccatggagatgtgagcctcccgcccgaagaccgggtgagggctctctcccagctgggtagtgcggtagaggtgaatgaagacattccaccccgtcggtacttccgctctggagttgagattatccgaatggcatccatttactctgaggaaggcaacattgaacatgccttcatcctctataacaagtatatcacgtaagacacctacagtttcctttttcctttctggtgactggtgcctcgcctatttggctcagaattgctaaaaccacagaacttcacaatatcatcaacattaatcatttttgctggcaactcctacatattggctgtccttgccgttcaaagacatgagtgctgaaggtgttattttcatgactcagtaatttatgagtaagagatttagttctttggcctatgcccacatagcccagctgttagacaaaagagttggtggttaaactagacatattatgttctgatgaatgcttttactgttctctttctactaaagcagccaatcataggattattgttggggtctagcagagccaaaattcctcacttgtacttattttgtagcaaatttagtgatacaggaaaaaattttttcctcttaacctttatcataatcatgcaaatcatcaaataattagtaactgcctacagtttgtgtggctcatcataataagacctttcccttaagttatttatcatcttagggtaggcagcataagtagaagatttcagtactattaacagcaaacaacttctaaaactccattgacaatgatacataatttagaaaggaaataatgttaaaggtcttatttatcatttctaatcttgttctttcacaatatcaggactttttaaaaaataattataatgtatttggttctgagtagctcatagtgtgtttcacctgcataatttcatttgatcttcacagttctgtgtgcatggaatagggtacactaccctacattctacatatgaggaaacaaactcagtgtttggtggatgctcatgtttgaagtgacaaaaccttggttttctgactcctaattcaggatttgttctacaacataggtcctgttcttcttgttttccatttagtaatgttctagagtcagaggtagtcttttgagatcatagtcatgagccacactggctatttttttgttatttattttactactgatttttgagtaggtaacatatatatatatatatatatatatacacatatatatggtgcacaattcagaggcacaaaagaataactatagttaaaaagtaagtcttggccaggcgcagtggctctcgcctgtaatcccagcactttgggaggccagggcaggcggatcacctgaggtcaagagttcaagaccagcttggccaacatggcaaaaccccatctctactaaaaatacaaaaattagtcgggcatggtggcgtgtgcctgtaatcccagctacttgggaggctaaggcaggagaatcgcttgaaaccaggaggcagaggttgtagtgagccgagatcgtgccactgcactccaggactccagactaggtggcaaagcgagactgtttcaaaaaaaaaaaaaaaagtctccccacccactcctcttttccccccaaaccctcagtgcttctccccagagacaaccactcttagtagtttcttagatatcttccaagagatgatatacacataccagttttatcacattaagtttttgatcacatactcctctaaagcagggcttttcaactttggccctattgaccttttggactgaatcattatttgtggtgggagctgtcctgtgtgtcacagaatgtttagcagcatccctggtttctgctcaccagatgccagtatcccccctccccgcagtgtgacaaccaaaaatgtcaccagacattatctgatgttctcccaggggcagaatcacctctgagaaccagtgctccaaaggaaagtatgcggaagaatggactgtctaggattcatattgtaattgtagagtggagaaatgggactgctattgtcttttttatttagaagtgttgcctgtgttaagaggagaaaaccttagacaagttaaatttaacagagtttaatccagtagaaaaaggttcagggaacactcaggaccaaaagtggtgcagaatgttccaccccatagtggaggttgtgcaggctatatttatagtcagagaaaaggaaatgagatacagaaatagcctgattggctacagttatgtgtttgccttatttggtcatgttttggcaggctttagcctccaattggctggaggtttcagctgctatgattggctgagactcagctatttgttacacttgtaacctaactcttatgttaagttacagtttgtttatacattaaattaggttacagttcactatctttggaggcagctttaacttaacacctgtttccttaaagatctgtagttctttaatgccattatgtcatgtcatgtggcctcaatgttgttaaggtttcataaaattataattatatttctgcttctgtttgctgttatgagtttttcattcctaggcacactatttattttcctgcacagtttttttgaccctgtcttctttatatattcttggtagaaagaatattcttatgtatttcctataagcttgtagattgttctctcagaatgaaacccaggggcacaattcctttggagaaacactaattcagaaagttcagtagaatcatggaatcactgcaccaggtatttcctgaagggccttcagaatcctattgccccacaatagaaagggctttcagggcaaagaccatattcattcaacacatgtatattgagtatacctgctgtctacatggcactgcactaggtcctgaacagcagtgagtaaaatggcccctgtccttattggtgttcctttataggtatgggagaagacaataaacagataagcaaataaatacagctgacccctgaacaacacagaggttagcaccaatcccccatgcaatcaaaaatatacatatggtcaggcacagtggctcacacctgtaatcccagcactttgggaggccgaagtggatggatcacttgaggtcaggagttcaagacaagcctcgtcaacatggtgaaaccccgtctctactaaaaatacaaaaattagcctggtgtggtggcgggtgcctgtaaccccagccacttgggagactgaggcaggagaattgcttgaactcaggaagtggaggttgcagtgagccgagatcacgccactgcactccagcctggggacagagcaagatcatgtcttaaaaaaaaaaaaaaaaaaaaaaaaaaaatatatatatatatatatatatatatatatatatatatatatatatatataaagtttttgactccccagaaacttaactactaatagcttactcttgactggaagccttattgataacatggtcagttatcacatactttatatattgtatgtattatgtactatattcttacagaaaagtaagcttgagaatagagaatgttattaagaaaatcataaagaatagaaaatatagatactatttgttaagtggaagtggatcattatgaaggtcttcatcctcgtcatcttcatgttgagtaggctgaggaagaggaggggttggtcttgctgtctcaggggcggcagtggcagaagtaaatccgtgtataaatggacccacaccattgaaacccatgttgtccaaaagtcagctgtagtcgaaataaggaaaatacttaagagtactgtgatagagaataagcaggggtttatgactagagtagtcagggtaaggtctgtctgagaagacaagatttgagctgagacttgagggatgcaatacagttggtcattccaagagcatagggcagagcattaaaacacaggtaactatgtgtttagaagtgcttagatgggaaagaccttagcatgttctggggattgaaagatcattgtgtttggagtatagccagagaaaagcaagatgactccaggtaaggctggagaggcaagtggggctggatcatgcaggactttatgggccatggtaaggagtctgttttttatcttgagggtaacagcaagccattgaaaagttttaagtgggattcagacctaaatttacttactgttttttaaaagagatgaggtctcggccgggcacagtggctcacgcctgtgatctcagcactttgggaggccaccctggagttcaaggccagcctggccaacatggtgataccccatctctactaaaaatacaaaacttagccgggcgtggtggcccacgtctacaatcccagctacccgagaggctgaggcaggagacttgcatgaacccgggaggcagaggtttcagtgagccaagatcgcggcactgcactccagcctgggtgatagagcgagactcggtctcaaaaaaaaaaaaaaaaaagagatgtcactaatgttgcccaggctggtctcgaactcctggatgcaagcgatcctcccatctcagcctcccaaagtgctaggattacaggtgtgagcctccatgcccaatcaatatttaaagtataaattttggcagttgtgtggtaaatggtggagcaagcgttaagagaaggcagggagagtagttaggaaattcttgcaggctggtggcttgaagtagtgtggcaacatggaaagagacagatggatttggtattttggaggtcaggtccataggacttactaatcacttaggaaaaaagatactgcggaggttgatgtcgtgtttctgccttgaacaacttaaacgatagggtagtccatgtattgagatgggaaaagccctctaaagagggctgggtagcgggggaatttaaccgttcacgtttggggtttttttgacatgttaaaatttgagatgcctgtgagatatccaagtagagatgtcaagtgggaggttgaatgtaccagtctgaactcagaagactgaggtctgggctggaaatacagacaagggagtcctcagcatacagatggttctgaagtcatgagaatggctgagattttctttttctttttttttttctgctgtagaaattaattttattcttattcagactattttcaaaagaagcagtggtgcgctgtttttctaaaaatacgcctttagagatttttatatatgtatataataaaatccatacatgtatttacatgattgctacatacaaaattacagcactgtggtatgtacacatctacaggtacattctttccacacatccctgctgtgctttccccgtgtgaaggagggagactgaatcagttgtgagcagccaagggctggcccgtcgtcggaacctccgaatgggggctggggtggaggaggtgaggcgattgccgaggcaggagcagcagctgttgcagggctctcctgcaggccagcaggcagcatctggaggctcccggcagcctccccctcccctccaccccgtggtgcccgcgctgccctcaaggtggggtggctgaccacagacccctctggtgccattctgtggcctagacttgcttggctgggccaagaagttgtgtatgtgaggggtggaggagggagctgtgggaggaatagaccctgtccagccccagccctgagcaggggaaagggctggatggctaaagcctgcagatgactggtgagaacactccgcttggcccggcactgctaagggtcagagactagaggctgggagggagagcagtggccgccggctggggaacagggccttcttcctccctggggctcagagggtggcctcagctgagcttgagtaagcccagctcttaggccctgcggccagaggcttggcctcctgccagcagaggtgcatgcacactggggaggggctgccatctccacttcaacccctgggccaggggctggggaagaaatggaggcttaggcctggcctgctgccctgtaggactaggtccccggggctcaggattcctgaggcatgcagagaagggcctgagaatgcctgagattttctagtgaaggggctcttaatctggggtccaggaacctcacagagattcattgatagaattcaggggatctgtgaaccggaataggaaaaacttttcttgttttttctaaccagtgactgaaatttagcatttccttccattttgaatgtaggcctcaaagtacagtagtagtaatatttgtaattttgtcaccagtagaaatcaagatattttcatattgcattacagttgttgctgacatctcaaaatagcatctaaacatcactacttcagaattacagtacagaattattagacctacagctagatcccattatcaaatgcattgataaagaacacattaggccgggcacagtggctcacgcctgtaatcccagcactttgggaggccaaggctggcggatcacgaggtcaggagatcgagaccatcctggctaacatggtgaaaccccatctctactaaaaatacaaaaaataagcctggcatggtggcaggtgcctgtagtcccagctactcagaaggctgaggcaggagaatggcgtgaacccgggaggcggagcttgcagtgagccgagatcgcgccactgcactccagcctgggcaacagagcgagactccatctcaaaaaaaaaaaaaaaaaaaaaaaaaaaagaacacattaatacagaagaatatatcacaatttttaaaatttttgaaaactgtttttccataaaattggggtattcttggtaatcctttgtactttaagttataccttaaaaaaattgttctgaaaagggtccataggcttcaccagatgccagaaggatccatggaacataaaagatcaagtatctttgttaataaggctagggaatgagaagagaaggagcctaggactgagccctgaggttagttaatggagggagagtcaataggggagactttctttgaagggaggttcaagaggcaggaggaaatccaagagagaatggtgttgtgtcatgggagccaaaataaattagtgtttgaaaaaggagagtagccacctatgtcagatgggtgaagacagaagattggcctttgggtttggtaagatgatgtcatgggtgatcttcataagcaatttcgctagaaggattacagagaccctaattagaacgggtagaaaggtgaatggacagtaagaaagtggaggcaaagggtatagacctgaaagtggcaaatttttttctataggggaccagagagtaaaaatttttggttttgtaggctacttgctgtgtctgtgactacctctgctttatagtgtgaaagtagccatagacaacacataaatgaatggatgtgactggttccaatgacactttatttacaagaacagatggctagctggatttggcacaccagctgtagtttgccaaccccggtatagacaactctttggagaagtttagatgggaagggaagtagaaaaatggggaagtagttgatgggggacaaggagcgtgtgaacatgtgtatgtattttaagttaggagattttagagcatgtttttgctgatggaaaaggatcttatggaggaggagaggctaacagtccagaagagagcttagctgtactaataaactcctcagaagtcaagaggggataggattaagagtacatggatgcctaaggaattgttttttatgacacttagtgttattttgagtgacatattagtgttaacagcaagactgatatggggagtttgtccctgtcacttataggaccacttaaaatgatgaactactaggagagttggtgcggatgagatttagcagctcatttacttgatttgtgggatttagagtttaatttggaattttgttgtattggccttacctgaagtaattaatgtagctaccttcacttttcttggagatacctttaaaatcttgattctgattctgattctgtgaacagaaaatcacagcaattgcaaacaaattctagctcactgattctcagtctgttttctgttgtattttacttagtacattcctatcaataacagtggctcagctttggcagttactacaaccgaggagaaaagagaggggagtatacatctgcctcaccactcctctgcctcccctactactgagaatcattgttctagaccttttgtggatactttctttacttcagggttttaaaaggcatgtttgttccttttcctggagcagttcaggcatcttaatgatctcaggcatatttcccccctcagtagcttccctaatgtaggaatgctttgccttttgcagaccccagtatagaagaaagagttcagcatattaaatcagtacatattttcatgatgagcgcagacaataaaccaggcagtggattctttcacagctttttatggtcatcaactaggctgcccagaagggagtgagagtattcaggcaattcctgtgtgctatgtgagcctcctggaacaccaaccctttttctgaaaatgaactgtcacctgtgttgaaaatgtttgctgggattggggtttatagactgaagaaggttccatctgtgatcatgcttaccatgctgagtaacttttaagactggaagaatcgagatgaggatccttaatgcatccatgttaaagaacctttgcttgactttttgaattagttgttttcatacaaaattaacacttattcacgatttaaaaaatttttcaaacactacaagggagatattaaagtgaaaagagaagtctcatctatcagaggtggccactattgtatttctggcatggatgaggtgtgattaagctcataggtgcccccatgtgtccttttccttaaagcatcaatgggatcttaccacgtattctgttctgcgacttgctttcttcacagtagtgtctttccatatcaggacatactgagccatctcattctgcctcagagctattccatctgcctggaacatgaatctggaacagtcccagattcatggctcactcttgtctagtccttactcaaatgcctccttcttaatgatgacttccttagctgctgtatctaaaatttcaaccattcccctatccctttctatcccccttccctattaatgactttcctagcatacttctgtttattgtctgttcccccattgtaatgtatactctatggtggggaggaatatttgactgtgttgttcactgccatatccccaacctttagaataattctggaccctgtagtagatgctcagtaaatattcactgaatgaatgggtgaatgattacattgtcttcacatttgaatgcacattattttttaaacaatcccctattgatggacatttaggggtttgttttttttttttttttcagttttttctactttttaaaacaatgctgtattgaatatttttatacatatatctttgtactgttttataatgatctctaggataaattcctagagatagaattgtgagtttaaaggatatacacattttaagttggatgcggtggctcacgcctgtaatcccagcatttcgggaggctgacgcgggcagatcacctgaggtcaggagttggagaccagcctggtcaacatggcgaaaccccatctctactaaaaatacgcaaattagctgggcgtggtagcaggtgcctctaatcgcagctactcgggaggctgaggcaggagaatcacttgaacctgggaggtagaggttgcagtgagccgagactgccccactgcactccaaccagggcggcagagcaagactctgtctcaaaaaaaaaaaaataaataaatcaaaaaaaaaataaatagtacaaattaaaaataaaggatatacacgttttaaattttgaataattagcttccattttccctcccttaagatgaaaggttatattaatttacaatcttgctaacactgtatgggtatcccatttctctataccaggtatgatcaacctttaagtcccatttctctaccaggtataattaacctttacgcctttgccaatccgatggatgaaaatggtatctcatcctaatttgaatttctttaattatgagtggattcagcattattgcatatattcatcttttgtatttacttttctgcttatgtcttcttttttcattgtttattgggtcattttgcttgtgtttttgcaatcatatctttgtttgctttggtacctttcctctctccaggcttcaaccagatataaccccagagaacagtatacatctgggccaccgctttctatccttagaaagtttctagggatagaactttgaaccatgtaatggagtctagtttataagtaaagaaaaaactcccaaacctgtatatgatgctggtgttagcatcttcatctcttattcttgctcacattttttgtttattagttaaaaaaaatcatagaaacccatagcaaatattgactatgttctagataccgtgtttagcattttattatctctttaagtgtcacagcaagcctgtcagggagtactagtttgtctccatctctacaattttatggacaggatatcagccatgtccaaccctttgaatgcaaggacttttttgcttatctatggtagcagatatcacctttttaaaagttcattagctagttagtgttagtgtattttatgtatggcccaagacagttcttcttccagtgtggcccagggaagctaaaaggttggacacccctgcaaaaaactgagggatggtgagattaagtgacttgcccaaggtcacatagctagtaaatggcaaaaccaggatttgagcccaggcacagtggctccagagccagccctactaaccactaagttcttttacctccagtatgagtaatggggtatgttgcccattgtctgtttcaggagacctttttgcccatctatccccattcagaaaactggctacagttgttgaagcaagggaaagctattcatgtacaggtctgggaggttttttttgtttgttttttgtttttgtttttttacttataaactagatttccattacatggctcaaagtcaaagtaatataaagaggtacttggtgaaaagtttcacacctactcttatctgttctattacccctgccctcatttctgtgtatacttcctgtttctttgtatacttacaaagcaaagtaaataaatacggcaggctaaatacggcaggttgtcaaataatgtcgttttgtccaatgtcgttttgttttaatgttgatgagaaaagaaaaatccattcctgcctggggccactgtctgtgtggagtctgcacattctccccatgtctgtgtgggttttctccgggtattcaagtttcttcccacaccccaaaggtctgcacattaggtgaactggcatgtctgaattgtccccagtctgagtgagtgcaagtgtatgtgtgatgccaatgggatggcatcctctccagggctggttcccaccttggccttgagctgctgggatggactctggccacctgggactgaataggcaggtaaatcatttacttacttgtttttataagtctttcttaaatgtatgtatagctcatatttatttcagtgtttaatattagaagtgttttggtctgtatttagaagtctggtgtttttgtgaccaggatagatcaaaggaacttaactcttgtttatgtcaattagtgcatggtaaagttggttttgttatatgtcattgtgcttaaagtcacaatttccaagaacctatcaacattaaggacttactgtgtatatgtacatacttgtacatatatgtaatgtttactcatcaaatatttattgagtgcctctttatacaaggcactgtgctggcttccaaggagtatacaaagaagcatgaaacacagaaatctctggcctcaggaagctcgcagtgtagttctataataagagcataagtaaaaataaaacatagtgtttatatgacatagtactttcttagctgattcaggcctcaatacaaagcacattcagcctgctaaaggtagtaaatattaatatgtatcttggcttttggggctaagatgagagttctactgaatcatctatcagtctctaaaatataagaaatatgtcttatttatcttaatagattcttcaggactttatggtttgaacaaatgaatctgtatttcttttaaatatagacttcaaggaaactgttttatatctttctttttttttttttttttccaaatagagataggatctccctctgtcacccaggctggagtgcagtggtgtgatcaaagctcactgtaacctcagacttctgggatcgagagatcctcctgcctcagcctcccaagcagctgggactacagatgcataccaccacacccagctaatttttgtgtttttttatgttttgttatatatgtttgtgtatgtatatatatatatgtatatatatatataaattaaaaaatataaatagagacaaggtctcaccctgttacccaggctggtcttgaactcctgggctcaagcagtcttcctgcctcggtctcccaaagtgctgggattacaggcatgagccaccgcacccagcctcttttatatcttcttcatgaacccaaaaggaagctttttaaagaaccatttttattttagagtccatccctgccttgaggagccttatcaagttggatcaaaatgaaacttgtgtgcctaatatagaactgaaggatgaggacttatctttagaaagtttgttttggtggggatcatcttttttctttattgaggattcttcttccaattacttctgccccatgggcagtaagtagaaaagagtttatcccaattacaatataatattttagagctatcagcaagctaccttcaatttatttttttatctcagtttctgtgtattacaacttaattctgttaaaagacatctttgttcagaatccctccagtagttctagacattccagaatccgtatggaagaagtatggtgtagtggttaaaagaataggctctggagccagcctgctcatactgaaattctgaatctgccactttctttctgtgacaggttactggacttttatttattttcactgcccctaagtagatgtcttaaatgttagagatttgtgaattaattaagtttattctccccactgagctttagagccatggacaagaaccaaaagatgaaatctagcatcttatatttacctaagcacttttcatcaaagacagtgcatgctaacatgtaatatgcacatactacatgcatagaacacatgcactaagtatttccatgcatttttgtatgatgcaaagtagtattcttctttgaaggaacacgaatcccaaaggaaaaaagccaaagttaaaggttacataagagctagaaggagtaaggaaacatggttttctcttgcttcctgcccatggctgccaaacggttctctgaagactgctatgtgacagaagccctttcctttgaaaacctgtcacgtcacaacaagaaaaagatctctttctttggaggtacatttttgggcacaagaaaggctttttaaaatttttttggccatctttttcattgtaggagtctggtgcttgctgcctagtttgggagtagaggaaaagactctggctctttagggggatagagatgggaaaggagcatggcccagctgggtgtattagctctccctccgctgcacttctggaacctttcatataagggcttcaggataagggggttgcatagctttagggtcttatggacatttggaccatttgcttcataatcattttgaactgtttccttaggctctttattgagaaactaccaaaacatcgagattacaaatctgctgtcattcctgaaaagaaagacacagtaaaggtgggtcttcactttcattgttgcccatctaaaagcttcagagcagcacagactgacttcaagataaaagtagtagtctctgcatctgagtaccagatcctgcaataggagataaggccatttcaccacaacagttctgaagtagcaggtatggtacagtagggggtattttaaatcattttgggaaatgttgcagtcaccaacttgacttaagtcttcttttggattctgtaattttctggcattgttctaattctattttctgttttgtgtctcagaaattaaaggagattgcatttcccaaagcagaagagctgaaggcagagctgttaaaacgatataccaaagaatatacagaatataatgaagaaaaggtcagtatataacagctaagaagaaaattattttgcttttttaggctgtgccctgggattgtaatatgacatttcaatatatcctgtgcttttaatgtgctgtttcaccttttttgggcaaagaccagaaactcaaaaaagtagaacaccagtggttaggctcagggttgtaacacagatatagcctatttgtcgaagagagtgacttgagggacagaaaatctgtcgcctacctgctatgtctagagtgagaatcataagaacaatgaacattctctccaaaacataggtttttagatcagagaatttgagggttggattcacatttggttatacctgaagctatttataagaattgacttttcaagctattttttttttttttttttgagacagtctcactctgtcgcctaggctggagtgcagtggcacgatctcagctcactgcaacctctgcctccccgactcaagtgattctcctacctcagcctcccgagtgactgggactacaggcatccgccaccatacccggctaatttttgtatttttagtagagatggggtttcaccatgttggccaagatggtctcaaactcctgacctcaagtgatccgcctgcctcggccttccaaagtgctgggattacaggcgtgagccgctgcacccagccatttcaagctattttcaaatgattctttttaggaagtcagttaaaacatgtggagaaactgccagggcgctgtcagtggccagctgtgaatacatactgcagccactcacaggctgttgtgtagctgtctgctggtctctattctggactctgatgttgaaaatcagcagagggatgaacagctatgaggtatatacttctaaagcaccaagtgagtgtaagctttaaggaggaggttattacttagcatttctttctttctttttttttttaatccaaatgcctctcaagtatttcttattagcttaaaatgtcactctgtgttgaacaaatgcacaaaaaccataaaaatttcagaggcctcattttgggttaaaattcagtagaaggcaagacgtggtggctcatgcctgtaatcctagcactttgggagcctgaagtgggtgatcgcttgagcccaggagttcgagaccagcctgggcaacatggtgaaaccccatctctacaaaaaatacaaaaattagctgggtctctacaaaaaatacaaaaattagtgtggtggcacgcacctctggtttcagctactcgggaggctgagatgggaggatcacctgcgcccagggagattgaggctgcagtgagccatgattgaccactacagtccagcctaggtgacagagtgagactctctaagaaaaaaaaaaaaaattcagtagagacccccaagatagcaggtataagtttggatctggttctattttatagccttacttgaaatatagaatatgtacatgacacagagagaagaataaaactgtctgtgatacaggttaggagaacacagatagtaagttgcatcaagatttcaggccagacattgtggctcacacctggaatcccagcgcttcgggaggccgaggtgggcagattgtttgagcccaggagttcaagactagcctgggcaacatggcgaaaccctgtctctacaaaaaatacaaaaattagccaggtgtggtggtgcacacctgtggtcccacctactcaggaggctaaggtgggaggattgcttgagcctgggaggtcaaggctgcagtgagctgtgatcatgccattgcacttcagcctgggaaacagaatgagaccctgtctcaaaaaaaaaaaaaaaaagatttcagtgaagaggaaagtgcattaggtagagtcattgtcgggagggtattgagaggattgggattttaattgtccttggagataggtatactgtggccagatagaaaggggtggtgactacactccgtgggtataaagatactgaggaaagcatgaattctgtgttaggtaatcaggccacagcagaagtacattttggaaatctccatgctaaaaagccttgttctcctgaagtgtgaagtcactgaggtgtgaagtgttagcctaaattttctctctttgtagaagaaggaagcagaggaattggcccggaacatggccatccagcaagagctggaaaaggaaaaacagagggtagcacaacagaagcagcagcaattggaacaggaacagttccatgccttcgaggagatgatccggaaccaggagctagaaaaagagcgactgaaaattgtacaggagtttgggaaggtagaccctggcctaggtggcccgctagtgcctgacttggagaagccctccttagatgtgttccccaccttaacagtctcatccatacagccttcagactgtcacacaactgtaaggccagctaagccacctgtggtggacaggtccttgaaacctggagcactgagcaactcagaaagtagtaagtgcatttgctgatgtcctcttccttctcagttgcagccaaacagtatcattctgacggggtcaacctaagattacctccctgatcccactcattaagctttggtcacagaaacccatctgataagtattgctgtactgtgtcctaatacactggctatgttataaaagtggcctttgctgaaacctagtctggtcgattttctgaagagctaatattattcttgaaagtcagactgtcaactttttagtgaaaggaaaagaatgtgccaaaccgaattcataatcctcagataacatcatcagactgctgtgtgactctgtgtcccctgctctgactttgttacctctctagcaattcagatcttgctgttgaatacgcaaaagcagaacatctttcccctcccactttttttttttaaatatgaaaatatagctgtgagagacacttcctaactttagcttgctggctgtctcacagagtttctccatggtgttcagaaactgggtccattcttggcattttttatgagctgctttgttcatgccttttttgggggactacactgtattttttattttgttgtggtttggcatttaacttcttccagaagagtaagttcagaagtaaataactgcccagattgttttccattctcaagaatatacaccagtgtatttcttttaaagtcatactctgatattcttatctgagataaaagagatttaaaattaaaagttcagatgaatgggcagtgtcttagtccattttgtgctgctataacagaatacctgaggctggataatttataatgaacataaatttatttggttcatagttctggagagtggaaagtccaagacccaggggcctggcaaaggccttcttgctgcgtcatcccacgacagaagggtggaagggcaaacaaagatccctcatagcctcatcacctcttaaagatcctacctctcaataattttgcattaggaattaagtttccaaaacatgaactttgggagacacagtcaaaccacagcagggaggttatttttttaattctttgtattagattctgacagaaaattcccaaatgtttcaagaacttgtgtctttttcccccctaaattttattttttacttttattttttaagtttttgtgggtacatagtaggtgtatgtatttatggggtacatgagatgttttgatacaggcatgcaatatgaaataagcacatcatggagaatagggtatccatcccctcaagtatttatcctttgagttacaaacaatccaattacattcttaaggttatttttaagaaaacttttcttaaggtagtagtttgcccttttcttaacttgaataattaaagcctactattttctcttcttgaagtaatgtgctccttacagctgtggcccaagattggagaagacactttacagccctttttttggtgccattagaatgagatccctactcactgcctgaagttgggggaatcccagtggcttaatgttgctcctccagggctgctggctgtgaggtctgcttgaggaggcagggctcagtggtcgcagactattctcctttctcctttacagttcccacaatcgatggattgcgccatgtggtggtgcctgggcggctgtgcccacagtttctccagttagccagtgccaacactgcccggggagtggagacatgtggaattctctgtggaaaactggtaaaaagaaaaaaaaaaccaaactcttctctgaaccgaaactgtttcttcccctcttggcatcctgtgactctcagagaaaatatccagggtcagttactctttgtaccaaggaaccgtggactgcataatttcatgtcactttgaatttggtgaccctgtattgattgattgaattgaagtggttattttaatgctagtagtaagaaatacctaattttaaacttggtaggaagatccagtcattatctacatatcaatttttttggtacctactttatggtaggacctgggaatataaaatatgtaaagcacatagtatgtgtccacgaaaagtgcccagtcactttggagagaaggcagacatgcactaaagtctaaccagcatgctgaaaaatatgtacagtataagtattgggaattttgaggaaggaaaggtcactgaatggaggcacttaaagaacccattactgctgaatgaataaataaatgaagtagagtaaatgtaagccgaggcttacaggatgagaagggcttaaggaaacagtgacaggacaacaactttagacctgagcaagggaagagaaatggtactctacccagagcttctcagcagagcagtttggcacagcaggaaattccctcagggctgtggtgtttgcccaggctgcagagttctggggttggtctctgcatctgtcgctgtacagagtaccccaggcaatgtgcatcagcagccaaggttgtgaaccactgagtggcaggactcctgctgtgtgggaagggctttcacttgtatagatgcttacctttccactgtcgggatggagtggagcagggttgcatgagcaccagggaattgtgaccagctgttttctcctttggcagatgaggaatgaatttaccattacccatgttctcatccccaagcaaagtgctgggtctgattactgcaacacagagaacgaagaagaacttttcctcatacaggatcagcagggcctcatcacactgggctggattcatgtaagcaattctgagctgtccgagagttagtctctgcctctcccatggtggtataaatacatgagtgtttctttgaacaaagtcaattatatccagattatttattgtttttctctcttttggatgcagtccttagcatacttgactattgcactttggtattgttttctgggaacacttagggcttttaaatttttttaactttttatttattttttagtaaaaataaactgttttccctaaagttccagtttccctctgagtgtaactggtgatgggatgctggcctagaatataagtggacattgaccttagagactatgcctactgtgtacagatgatgttccttaaaggtatataattcaaaatattttaaatgagccaaggaggttaattcagatgcttgcatttggtctttcttaaagcacctttatataaacaagaagggctataaatacacatgattttcaagtgtctgcatatcttgtgcagccttctggtaatgttcaggtaaaatataatgccttccctaaagattatttttaaatttttctttctattccttttcaacccctcactctcatagcccaagctgcattttatgctgtatgacagagttacaaataaattggcttattcttggattacacatacttgtatgccagaatttgggaaagactgacctgtgaggcagtcccatgtgccttctgtcctttcttctattcaattacattcatgttgatgatttgcctattattgtgtatccccatcccacccccattgtagtagatgggggagagaaaacttgttccttatctgccagggcatacaaatttgagtaaggtatgattttagcctcatgaaggagattaaataaatagacaattaataacttcacctggggcagaacgtgctaaaggccacaagaggtgccagcgaggcactgtggaattcagaggaaggagggaccatgcctgatagggtttagtagaatgttggcaagctgggccaagggcaagttccttaaggagcagacaggtggagaagaggcggactctgtccctggagcactggggggaccagttcactgagatttatggttcatatcaggaaacagtggtagatttttttttttttttttttgagacagagtttcactcttttcacccagactggagtgcaatggcaagatcttggctcactgcaacctccacctcccggattcaagcgattctcctacctcagcctcccaagtagctgggactacaagcgcccgccaccatgcccagctaatttttgtatttttggtagagatgggatttcaccatgttggccagactggtctcgaactactgatctcaggtgatccacccgcctcagcctcccaaagtgctgggattacaggcatgagccaccacgcccggctagatatgttttaatgtagtacattggagccgagttctggagggtctggggtggacaggcagaattgttccactttttagtaagtggaaaattcctaaaggtttttgagtagagcaatgatatgattaaagccatactttagaaaatttaacataaatacagttttaaggtaggttgtggcaaggagatgatttaagaggttagtgtgctgataaagcctaataatgataagagctagggtgatgctagtgtgtttgggaaggaggagatgaatgtaggatttcagaggatttgggaaatgagtaatagaggatgatgactcagagtcaatggtgactcagagatttggggccttgcagtgatcatctcataagcaaaagtaggggatccaggagaaggatttggtttgaaagtggggttcagttctgagcatgttaaatttcaggtattgatgagatattaaatcactggaggtagttatcagccagttggcaatgtagggctagaacttgggagcaaagtcaaagcaggagagagggctctgggaatccactatttagtgctgatcttggaagccctggaagtaggagaagagtctagagcaagaaaaggttcactggcaacttgggggacaggctacctaatgtaacatagaatgtagttagcaatggagcaaagagatgtatgaaaaaggtgagggtagtggtaaggcacagaagccataggaggaggaaggctcttttgttttgttttgtttttgagacggagtctcacactgtcgcccaggttggggtgcagtggcgcaatcttggctctgcaacctccgcctcccaggttcaagtgattctcctgcctcagtgtcctgagtagctgtgattacaggtacccgccactatgcctggctaattgtgtgtgtgtgtgtgtgtgtgtgtgtgtgtgtgtgtatttttagtagactgggtttcactatgttggccaggtgtgtgtgtgtgtgtgtgtgtgtgtgtgtgtgtgtgtatttttagtagagactgggtttcactatgttggccaggctggtctcgaaatcctgaccttgtgatcctcgtgattataggcatgagccaccgcacccggccaaggaaggctttaagaaaaaatttccagatgttaaccatgtcacatcctatggagagctccagaatggtgaagactcggatcggcctggatttgatgaaattattgaggatctcgatttagtgtgttttaggcattaatgggagtagactgtaagagtttaagaactcatagggattaagtttgtggagacaatgaagtatacactaccattttgagcaacttagctctagaggaaaggagaaacatggaatggtggtttaaggagaagttgggttgagagaatgtttggttgattgttcaaagtgaaaggcttgaacatgttttgttttgatgaaatataacacatgtaataagaaagcacacagaaactaaatatatactttaggccgggtgcggtggctcaagcctgtaatcccagcagtttgggagaccaaggcgggcagatcacgaggtcaggagtgcgagaccagcctggccaacatagtgaaaccctgtctctactaaaaacacaaaaattagctggacatggtggcgcatgcctgtagtcccagctactcgagaggctgaggcaggagaattgcttgaaccccagaggcggaggttgtggtgagccaagattacgccactgcactccagcctgggcaacagagcgagacttggtcttgggaaaaaaagaaactaaatgtacactttaacaaatcattaagcaaatatctatgtacatacactacctaggtcaggaaacagaacactgtcaggagcatgcatgccctaagggagggaagtcctcccttccttgcttcgtttataatttcaccacttcaatgtgtatctctaaacactatagtttacttttgcctggcttttacctttttgtaaatggagttataccatatgtatatttgtgtcttgcttcttttgctcaacattttgaaggtttatccacattcttgtgtgtagttttctgaacatgttcttatgcccaatgagccaacaatggagatgtaaaagggcaggagagacaaggtaatgtggtgataaggaaggatcgaatgagaagtacatagagggattcatcttcacagggggaaaaacatccattcctccaagacaagattgaatgaacggaaatgaagatccagagagatttttgaaatgatgtctggaggagttgaggaaacacgttttagacaatcttgacctcaataaggttggagtctaggtctgctgttgagcaagagggagaccaaggaggaattagaaactggaggagatgggggaaagtttagaatcattactgtacagacttcaggtagaacttagctacaaatgaataaaagagttttaagtatcagtgagggtccagttgggaacagatttgaagcctaaattgatagtagttcagcttttttatttttattttttgagatgaggtctcactacattgtttatgttggaatacagtggctattcacaggcacaatcatactgcactacagccttgagctcctgggcccaagtgatcctcctgcctcagcctcctgagtagctaagactacaagcacacaccactgtgcccagctagttcagctttttttcctccatatttctgcaccattccttcctaattcgggattaaaaacaaacaggctgagtatggtggctcacacctgtaatcccagaactttgggaggccaaggtgggaggatcacttgaggccaggagttcaagaccagcctgggcaacatagcaagacctcatctctataaattaaaaaaaaaattatgcatttgtggtggcacacgcctgtggtcccagctacttgggaggctgaggcaggaagatcgcttgagactgggaggtcaaagctgcagtgagccgtgatcacaccactgcactccagcctgggcacctgggcaacagagcgaaaaccctatctcaaaaacaaacgaaaagcagaccgaaagatttattcagatcttaaaattggccagaggaaaatgcaaaagatcagttcttccttcttaaccttgtcaactatgaatcagctgcccaggtcaaaagtatggttatggattgatcaccaactgttgtcaaacctccagcccagaactcaaggcactcctcatcatgtttcagcgctatctgagccatttccctttagggaaaatttccctcttaggtacccaggctgccttcagcattcaccctccttgctcatttctgctccttcggtatattgttttctctttgtcaaagtgccttcctctatccccagcagcatgggcacagtgaacataatgaactattcattcaagaaacttgactgtgaaaggaaggagggagagaaggtacagtagttagagaggagcaggggatcatggcaaagttttttgattctgtttaagagttgtttactgagtccctgcttatgtctctttattatctttctggctacccacgtttgctcccagttagaatcctggactctaaccatgggatggaaggtggtgttggcacaggccactgctctttagcagcctaaaggattatattctcatcaggtagaaactttgtggtcactgaagtccttacatgccccatgaagacttgtgtgtggatttgctgcctgcactgagctaacacgttcctgtcctgaaggcttcttccacagtgagctcatcacagcaccctgtggaatggtgcttctcagatgaggctgcacataagaatcacttagtgagctttcaagaaaaatgttccttcatgatggttctttctaggagtggggtgcaggagtctgggcttttgtcaagctcctcaggagatttgtttttttggacagcaggtttgaaaacgctagtcaattgcatgtctttattgtctgtgcttttctgtcagtgaaggttggttgtctttttgaatcatgctagatctttttccatttttgttacctaagatcacacctcctctaagatgaacataagtcattatatagttgtctgttttgtatataaaatatgtgcttaataaaacaaacaatggaaacaaataatcgggatgcacatttaggtgatattttaactgattaacctcaaattttagcatcgtgttctccttccaaacagaatggtctcctttgtatggtttaactatcaactgaaattcaagtattcccctacctcccatatcttccttggatgatgctttagctacaggacagcctttgcctatagaacctgattcatgtttgaccttttaacacctctgtgggagagaagaatcattcatctaattgtggtttactaagtccttgacttccaccatgttgaaatattgggtatgtaccatctgttccagaatgggtgactcagtggtatgaagagaccttgtaaggaaccaaataagtcttgatggtcagttagaaattatgagtctcttgaaaaaccaaagcctgaatcatccagagagaaacacttcttagaggagatagaagaaattccctagcaaaagttccaagggccactgagtgccattcacaattgttgaggacacccacctaccttgtccatggatgcccatcatgacaaccccattaacacctttgattccatggatccctgggtgaatccaacatcatagtccttgagttcttccaatttggttcaagaacaggagagctagagcaggaaatatcaacaaacaaccccctcttctgtctccaaccctgagatgcaaatgtcttttcctgtctccactcctactgtctggtgatctttgtgcagcaggtatgtgcctgaaggaggtctccaagccagtttctgtgtgctgtcatctgagatggggttccccttgccagttctcacaccccacaagacccaccatactgatctcctggctagcacacaccaaccccagggaagccttttcttcacacttggaacctagatcttgatttccttttgtgaggtcagaatttgtttaactggaatgtggcacagcattgaattcttctgccttgtctattccagcctcagaattctgtttttctcccactttgcagtggtctttgagttttaacactgtggaacagtatctttccccgatgatgccccagatggaaggtttgagttctgtccctgggtcctctccataccctacctgtttaatggcccgatgtcttgatgccttctcgcatcaaggctctgcgcctacagtccttcatccaaccaggaattccagaacccatcaggtaccctagatcttctgaaccagtgggatcagagtccccgttttgagtagtacagagaagaaagttccccctttgtgtttacctccctttttgtctgcctactccagttcccccttccccctgagtgctcaagctgcctaacatcttccactgccttcaaacaagggaagccagaaagttccaagcctcttcgtccacagtttacttttgtccagtacagccttggtgacctctgggagctctctccctgagaaggttgtctgagtgaattagatgaaatgtggtgggtgggttatttggtatgtcatctataaccatgagctaggacggcatgcgcttgcctgggcttaatgctgttactttccattagaaaaagatcaccttatcattcatcagacactctacagaatctcagaattatggttctgcacaatgtaagtgagggcatacatccacctacccaggaactgaagtggaatctcccccaccccacttgtggcatctccccacgattgctcttcagacaaatcctcatctgtttagttgtcattctgctggggacaatgcaatctaagttatttcatttagttattttcatccccttcccctctctcattgtatccttcaccacagacagctcttccagtttccaataattgtttatactccttatttctttttctttttttttgagatggagtctcgctctgtcacccaggctggagtgcagtggcgcgatctcggctcactgcaagctccacctcccgggttcatgctcttctcctgcctcaacctcctaagtagctgggactacaggcgcgtgccaccacgcctggctaattgttttgtattttttttttttttttttttttttttagtagagacagggtttcaccatgttagccaggatggtcttgatctcctgacctcatgatctgcctgcctcagcctcccgaatagctgagattacaggtgcccgccaccacgcccagccaacttttgtatttttaagagagatgtggtttcaccatgttggccaggctggtctcaaactcctgacctcaaatgatctgccctcctcagcctcccaaagtgctgggggttacggacataagcctccatgcccagcctgtttttgttttttctttttttaattgacaaataacaatagtctatatgttttgaaatatgtatgcatatattgtggaatgggaaaatcaagctaattagcatatgcattatgtcacatacttttttgtggtgagaacacttgaaatctactctcttaagcagttttcaagtgtataatacattgtgatgaacagtagtcaccatgttgtatagtaagtctcttgaacttaaaaaaggaaagaaattatgagtctcttcacatactggtattaagcaatatttgtttacagtgctggaaaggagcttccttacttattaggaacctcaggtggacctctcatggttgcagatggcttctcacttacaaaggagattgtgaccagctgttgagaactgtttggctttacttccttcagagaccagacttggttgtatgtcagagtagtcccccccttatcctcaggggatatgagcccagaccccccaatggatgcctgaaatcacagatagtaccaaaccctatatatgctatgtttttttcctatacatgcatacttgcgataaagtttaatttataaattaggcacaggaagagattaacaacaactataataaaacagaacagttataaaaatacagtgtaataaaagttatgtgaagatgatctctctttctcaaagtatgttatcgtatgtaatattttcagattgcagttgatatggatagctttaaacctcagaaagggaatcgcaaataaggagggattaccatatatcctcgctaagagtcctctgactctttttctctcctcagactcaccccacacagaccgcgtttctctccagtgtcgacctacacactcactgctcttaccagatgatgttgccagagtcagtagccattgtttgctcccccaagttccaggagtgagtatagagggcatggttctgggtgtttcaagggggtagtagggaagaaagcctcaggggaaaaggtctctattcttgtggacttgtcctttgtaaaatacatagattataatgtaagttggttattctaaagggcttccttttaagccccatatcatgatttatctatcatgcttgttcaaaaagatatccaagtaacaacttagttgcttttctaagaaaagtctacaagaaatttgaagtgtttgacttgaagcgataggaatgtcaagagttttatgttggattagaaagtttcaaaatcataaaatataaaaaaataaaaaataaaaaataaaaaaatataataaaaaaataaaaataaaaaataagaaagtttcaaaatcaaacacattatctcagaatgcacttctttttcataccaaatcctgtctctactcccactttgattatttactatgaattctccagcaaaactagtgtgatggcagtaatgagtcattctctaactgtgattcattcaccagagaagagacctgtgaggcagcatcctacagaagctgtctcacaatgacctctgccctgctgtgtgagtgtgcatgctggtgtgtgtgtgcgtgcatatgtttgggatggagggacacctttgcttgactcttagcctgccttttttaaatttcagaactggattctttaaactaactgaccatggactagaggagatttcttcctgtcgccagaaaggatttcatccacacagcaaggatccacctctgttctgtgtacgtatctatgtaaaagaaaatggggctatgcttcaagcagggaggacagtcagagctgatgaaatgcatcatcctttctgatccacacagaagaccagctttgtcacttaccttgccagatctccataataaggacgtacatgagaagcagtgtgggacaggaatagatttgaatcttagctttgccactgtgtgcctttgattgggctacttaccgttcctgggcctcagttttcccatctataaaataggcataataataacacctactttatagggttcttgagatgattaaatgaagtaatgtgcaggaagtacgtaatgcagttgctggcttattaaatgttactttttcctttcatcaatgtctctttctaagcctgtacttcaataagagatttgaaggcaaaggaaaagagaagccacttcagataggtaaattaagtatatttgtagaattttgcttaaatcataggggctttacgaccttcctacaaagttcttttttccctatgttgtggtctgtgaataaaaagtttagttgatgataagatcagtatgtttccatttgcccctgcaagctgatttgatggtgttgcattactccatgctggccatggagtattatttcttttgggttcagagaaaagtgagcaatatggaaaagggactaagaaccttgacacttaaaaggacctggagatgcttagaagagaaaccccaggaaggatctgagagctgatttcaagtgttagaagagttgaagtataaaaaaagggattgggtatatttcacgtcactcctagcactaaaacaaagacttcatggaatgatggttttctgctgagcgtgaggaagaactttctgacaaatctgttcaaaaatagatcagtctgccttggaatgtctaagtactaggatgttgaaacaaagactacacaatcagaaaaaaaggtctggggcaccagtgcccatgttttcagttataaaggcccctgttgcatgccaaaagggagcattcttctctcaccatgtgacagtaggtatactttattatttgggtgacatcatagctaaaaaaactgtgatgaattcagtaattcttttaaattaatatatattttagggatgacactatttgttcccaagtttaggaatcaaagaatgagtctagaatgtatatacattttaaaaataaacaaaggtaaatgggcaaacactgattccatctacaggtgggactggtggtagtaatgagtcccagactcttaccacaactaccacttaaatagcagtctggcttccagactgagaaccactagcctagaatgaacattttaaataagggtttttttgtttttgtttttgtttttgtttttgtttgaaacagagtctcgctctgttgccgggctggagtgcagtggtatgatctcagctcactgcagcctctgccccccaggttcaaacaattctgctgcctcagcctctcgagtagctgggactacaggtgcgcgccgccacaccgggttaaattttttttttttttttttttttagtagggtcagggtttcaccatgttggccaggatggtcttgatctcctaacctcatgatctgcccaccttggcctcccaaagtgctgggattacaagcgtgagccaccgcacccagccaaaaagtggttttttaaaatgacttttcaggccgggcacggtggctcacgcctataatcccaatactttgggagactgaggcaggcagattacttgaggtcaggagttcaagtccaggctgaccaacatggcgaaaccccacctctactaaaaacacaaaattagccaggcatggtggctcgtgcctgtaatcccagctactgggaaagctaaggcagaagaatcgcttgaacccaggaggcgggggttgcagtgagccgagatcgtgccactgcactccagcctgggcaacagagcaagaccctatatgaagaaaaaaaaaaaaaagacttttcagaattttctaggactccacctttcttttttcctattgcagagctgcagccacgtgactgttgtggacagagcagtgaccatcacagaccttcgatgagcgtttgagtccaacaccttccaagaacaacaaaaccatatcagtgtactgtagccccttaatttaagctttctagaaagctttggaagtttttgtagatagtagaaaggggggcatcacctgagaaagagctgattttgtatttcaggtttgaaaagaaataactgaacatattttttaggcaagtcagaaagagaacatggtcacccaaaagcaactgtaactcagaaattaagttactcagaaattaagtagctcagaaattaagaaagaatggtataatgaacccccatatacccttccttctggattcaccaattgttaacatttttttcctctcagctatccttctaatttctctctaatttcaatttgtttatatttacctctgggctcaataagggcatctgtgcagaaatttggaagccatttagaaaatcttttggattttcctgtggtttatggcaatatgaatggagcttattactggggtgagggacagcttactccatttgaccagattgtttggctaacacatcccgaagaatgattttgtcaggaattattgttatttaataaatatttcaggatatttttcctctacaataaagtaacaattaacttatgtttttgtgcttcagagtgatccatttgatcaagcattgtataaacaggttaaaaaaaaggtatggttgttttggaaaggtgaaggaaaaatggaatttgagatatactgacactgatggtgtgtcccagttcacttttaattactccttgttttttatctgcctgttgccatcttccagaggtgttgtgaagtcatctctgttcttttggtgctgtctcaaatgggtcaaccattcacttcctccttatgccctccatgcttttggctgaggataatgaagcctttgtttggagtaccaggttacactccaataaatgattacatttcccagccaccccaccctaccaatttcattgtgttggctgttcttttctgactaaggcaatacctaggaaaacgcttgaagcagcaattgttactgcaattttctgtgagctgagcctggtgttctaggtggcctagaaataatggtgtcatttgtgacacctcgagtgagggcaggagagtaaatactttggctaggagaagagtgatttattctttatcagaattctaggtgggggagggagaatctgtgaatgcataaagttttcttcatttttaaattttgtctcagtctttattgcttaggttagtggtccttgaacttgtcccctgaaagagcccagttctctatattctttttcttctcttgggttcttaattccccatatagtggaaattccttctttgctgttttggtatgggtgggtctgggggccagctgggcttggacaagccatttcctgctgcagcccagagcagcctggctgttccaccttgctctaaacagtcctgaaattgcccagtcctctgcttttgggaaatccatccccttcttcccattctttgtctaccacttagcttagggctttcttaccttttatttcgactgtagccgttggcttttaccaagtctctttgtttttagcatttcttcattccagtctgttctgcacactttgatcaggagaagcttctcacattccagccatgttcatgttttctctcttgctcaaaaacctgcaatagcttcccattgctgaaaatctaaatttagcttttagtcagaactttccacttaaagttcttacccctggctatatattcaaatatctagggagcaatttaaaaaatactgatgcctgtgttctaccccccaccaattaaagctgaatctctagggtggagcctcagatgttgtttctgcatttgtctttcaagctgctagaattctcaagtacaaccagggttgacaaccactgcattggtctttgatacctaagaattgtgagctctcttatccgtctctgcccaccaaagacattcagccaggtcaacaacatatcatacgttgcaaccacattgatcacagactgatcaccaaactgctatattttcttttctcttcctctaggcacaagatatcttagtggctagatgggtgcaggaaatcagtctgtagatccctcttcatatctgctgcagcctagccactgcagaggcactctgcataggatggtctaagtgtctctgtcttcatcttacctctgtggaggagacgtggaatcaagccagcccacaagccctgagactggataggccggagagaaagaggagtagccagagcggtcgggaaaagaggaaaggaatactgtgggtaaaagggacaaagaccacgcaacctgaggaaagacattgtattgaaagggtaatgactatttggctaaagggactgactcctgggttcccgaggctcaaagaccaggagacttttccactcttgcaagctgcacaagtaccatacttagtgttctgggctgagaggggagacaaaagcatcgtcaggttgccaaacaatgtcccagttgccctgggaggcacaaacctaccaaagtgccataggccaggtgcagagagaatcagaggagctgatttgcttggggtcagagcagagctgggttttttcagatgatcactttcacatactccttgttaaatgggaccaaaggggaagaagaagaaacccttaagcttttgtaatattgtcttgggtaccagataccataaaaggcagcatgagagaaacattcccttgggccagtgtcatggtggattttcttgcttgagaggcaaggatttcagctttcatttggtaccacagaatttaaaattgtaagtgcctatcccttttgactgttgatggcttctttggggttttagttaccccagttgaaagagaaatttttcatattggggttgagaagaatggaggctattaggagcaaagctttaatgagtgaaagtctggtgaatcctgcaattttgatatgtttccagtggattttgagaacacagttttaggaccagagtagatgttgttccctagaaaatagagtcagctattgatattgtgcctcccatccctcatatctcagtgttttaaccccacctgagtttggagaccagtttgtccaaggatctttcaaacatgtgagcccagagtagaacttctgagtcaaggatcatgtctttttctgaggagctttgcttggggcactggaaatcctgtttagatcaggactattggaatattatcctctccaggggaagtgccaggttgaacatttaaggctttgcttctaggcccagctatacattcaccagcaaatcacttaacttcctaaatttctttaaaatctgtaaaatgggatcagtctaatatgcctacctcaaatgatgacagaatgacatctatatgcatatgaggcctacgttagttgaaagatgctataaagatataagggatttgttacttgtctttcttgaaatgttacagttggggtgcggttgcttctatcttctggacctctgcccattcagcatacagctagaggaatctttgggcagatccacattctttagcactagctaggctttgactccaaagctatctggtctaccttgatgttctgagcaggaaaactgaggacctcaagaaccattccaaatttctactcattctccctaagacccagagcagacccaggacctaaagaaattacatcatctctattttcccttggctccagcccactcttgtttgaacctcccacttttgttgttccaactacttcttgagatgaaggaagggcagaacattggccctcttcactgaagtcttcaccccttaatccagggttcaatttttagttcaccttagcctgtttgagattagaagctgggccttaacttacaggtgtgtccggcatcattcaatcagcctgttagatccagaatccagcactgtgacgctacataaccatgggctctgtccttccagttcctttagtgccttccctcactggtaggttcactctgagggcttccttccttgaactccagtggcaactatagtctgtttcccacaatttgttgtgtgtgttttttgttgttttgcagcgttttcatattgtcttttatgtaagtcatgtttctgaactatcgtataaatttcattagggtaagaatcatgtttgctttatgcactgtgtaacatgccttgcagtcagtataggcacttaaccttattgatcagttgttccttggtgttgaataatgtgttaggtagccaggtggacctgtgtcctagcctggagaagctctatgtcaccttgtaggaagccatctgaatttgactcagcatcatatgctgggcctgtgctgcacttgagctttctttccagccgccaggagggatggttgtcctggccaacagcgaatttaatgggtggtcaaaagaagatgtgcctgcatagaaggctgaaagagggagctggaagtaggaggagacaaggagatagtgacaccagtatcttgtcacagaaatcaaggaaggcaacagtttaaaggaggggagggagatcagtggtgccaactggctcagaagaggtttgctgggttaaatctcaagatgagcccatgagatctggtggttagcagaggcctttcctgacaaccccattttaagcacctcttccccatcactctatctcatcactgttactgtctgtgtagccctgtcatgagctaaaatcatcctgtttgtttattgctagcttatgtgtctaaagtatactccttgagaacagcaactttgtctttttcacctttgtactgagtcccctgacatggaataagatatgaataaatgcacagacttgtccaaaatcatccaattaa

SEQ ID NO: 15827 - DNA, 38182 bp, Homo sapiens
gcggggaaaggtggggaagggtcccgggaacgtggtggggcagggcctccgagcgtggttggactttgaaggggatcggccgccgtgagtgtggggcctgcagcctactctccccgagtcccctgcccggcctgcctcgctcgaggcacccgacggcttctgtctccgcgggctggcgcctgaccagccaggcccagcggttccccgcctactgcatttgaaagatcccgaaaaccctggatgattgtgcctggggttggcaagttcgtcttgagtgccttcaagaagggttcctcaagcagttgtcgatagagccctccctactgtatacgccccctccgctcattcctgctacttcctttctcctcctcgtatttccccctcggtcctttacgccgcctttccccctcatttgcagatgctgcatcccctttttggaattgctcaaccaggtggtaaccggcgccgcttcctggccttgggaggtggttcctttcttaacccacaagaacctctcccaagaggtactgagatgcaacaagcatcctctgtttcagttaactttcatgggccgtggactaggtttactaattacttggggaggttttagatatgcttgcggctttctgagtccctaaggaggcctcgtgagagatggactatctctgcatccctagtagtcctcacggcttttgtgctattagtgagggtgttttagaggggaaggtttgtggaggaattgtgacccgaatattgaagagacctaaagatggaattggctgagagaagactacccctgagggaagagttgtagtagaaaagaaaaactggatagataaatgaaactgaaatgtgaggatgcctgggcggattggaatcctgactgaagcaaaagatctctgttggggagggccagttgccacagggccttgaattccaagatttattctactgtagtttgtgtattctagagcatactgattagggtttgctgtaatgcaatgtgtgtcaaatgcccagttttattttggagatgatagtggtgatatctggttggaatttggaatctgattctaacagcaactatatctagaaagactagaattactggagttttgggacaccaggggtttttgcaatgcaagttaccatcgtgcctttttgttattcagtgtttagtctatgaagatgagtaaatggttgttttcaagatttaagtctcttgccatgataatgatgaatgaatgattttatagattgactatagtggtttagtgagcagagttacaattatgagcattaattcccagaccagttcccctaactcaccttgtgctcaaatatgaaaaaggataccacagaaaatgtcagttactctcagattaagtaaaaatggtcaaccttgaagttagttaacaatcctcaagaaagttcactgagtgcactctgccaggtactggggtggaggtatgtgggtatctggaaggagaaataatagaaaataaaagatgctgttcccacttttacagtgctgtgggcggagccccctaatggcaaaggatttgattaacttgaactgaacctttggttggtccactgtggttctactccttataccacctaattatggtacaggggttgtatgttttctagtctgccagtactctcatcgttgtgatttgggcttccttgagggtctcagccttcttgtaggaaagtccttatttaataggagccacagcatttggtatgtttctcttatattttcttcttaaggtagaggtctgtgagataaactgtaaaactgctgggatgatgagggcaacggtattgatgccatctgttttttctgtctcagaacttggtcctgatgtctgaccatggagatgtgagcctcccgcccgaagaccgggtgagggctctctcccagctgggtagtgcggtagaggtgaatgaagacattccaccccgtcggtacttccgctctggagttgagattatccgaatggcatccatttactctgaggaaggcaacattgaacatgccttcatcctctataacaagtatatcacgtaagacacctacagtttcctttttcctttctggtgactggtgcctcgcctatttggctcagaattgctaaaaccacagaacttcacaatatcatcaacattaatcatttttgctggcaactcctacatattggctgtccttgccgttcaaagacatgagtgctgaaggtgttattttcatgactcagtaatttatgagtaagagatttagttctttggcctatgcccacatagcccagctgttagacaaaagagttggtggttaaactagacatattatgttctgatgaatgcttttactgttctctttctactaaagcagccaatcataggattattgttggggtctagcagagccaaaattcctcacttgtacttattttgtagcaaatttagtgatacaggaaaaaattttttcctcttaacctttatcataatcatgcaaatcatcaaataattagtaactgcctacagtttgtgtggctcatcataataagacctttcccttaagttatttatcatcttagggtaggcagcataagtagaagatttcagtactattaacagcaaacaacttctaaaactccattgacaatgatacataatttagaaaggaaataatgttaaaggtcttatttatcatttctaatcttgttctttcacaatatcaggactttttaaaaaataattataatgtatttggttctgagtagctcatagtgtgtttcacctgcataatttcatttgatcttcacagttctgtgtgcatggaatagggtacactaccctacattctacatatgaggaaacaaactcagtgtttggtggatgctcatgtttgaagtgacaaaaccttggttttctgactcctaattcaggatttgttctacaacataggtcctgttcttcttgttttccatttagtaatgttctagagtcagaggtagtcttttgagatcatagtcatgagccacactggctatttttttgttatttattttactactgatttttgagtaggtaacatatatatatatatatatatatatacacatatatatggtgcacaattcagaggcacaaaagaataactatagttaaaaagtaagtcttggccaggcgcagtggctctcgcctgtaatcccagcactttgggaggccagggcaggcggatcacctgaggtcaagagttcaagaccagcttggccaacatggcaaaaccccatctctactaaaaatacaaaaattagtcgggcatggtggcgtgtgcctgtaatcccagctacttgggaggctaaggcaggagaatcgcttgaaaccaggaggcagaggttgtagtgagccgagatcgtgccactgcactccaggactccagactaggtggcaaagcgagactgtttcaaaaaaaaaaaaaaaagtctccccacccactcctcttttccccccaaaccctcagtgcttctccccagagacaaccactcttagtagtttcttagatatcttccaagagatgatatacacataccagttttatcacattaagtttttgatcacatactcctctaaagcagggcttttcaactttggccctattgaccttttggactgaatcattatttgtggtgggagctgtcctgtgtgtcacagaatgtttagcagcatccctggtttctgctcaccagatgccagtatcccccctccccgcagtgtgacaaccaaaaatgtcaccagacattatctgatgttctcccaggggcagaatcacctctgagaaccagtgctccaaaggaaagtatgcggaagaatggactgtctaggattcatattgtaattgtagagtggagaaatgggactgctattgtcttttttatttagaagtgttgcctgtgttaagaggagaaaaccttagacaagttaaatttaacagagtttaatccagtagaaaaaggttcagggaacactcaggaccaaaagtggtgcagaatgttccaccccatagtggaggttgtgcaggctatatttatagtcagagaaaaggaaatgagatacagaaatagcctgattggctacagttatgtgtttgccttatttggtcatgttttggcaggctttagcctccaattggctggaggtttcagctgctatgattggctgagactcagctatttgttacacttgtaacctaactcttatgttaagttacagtttgtttatacattaaattaggttacagttcactatctttggaggcagctttaacttaacacctgtttccttaaagatctgtagttctttaatgccattatgtcatgtcatgtggcctcaatgttgttaaggtttcataaaattataattatatttctgcttctgtttgctgttatgagtttttcattcctaggcacactatttattttcctgcacagtttttttgaccctgtcttctttatatattcttggtagaaagaatattcttatgtatttcctataagcttgtagattgttctctcagaatgaaacccaggggcacaattcctttggagaaacactaattcagaaagttcagtagaatcatggaatcactgcaccaggtatttcctgaagggccttcagaatcctattgccccacaatagaaagggctttcagggcaaagaccatattcattcaacacatgtatattgagtatacctgctgtctacatggcactgcactaggtcctgaacagcagtgagtaaaatggcccctgtccttattggtgttcctttataggtatgggagaagacaataaacagataagcaaataaatacagctgacccctgaacaacacagaggttagcaccaatcccccatgcaatcaaaaatatacatatggtcaggcacagtggctcacacctgtaatcccagcactttgggaggccgaagtggatggatcacttgaggtcaggagttcaagacaagcctcgtcaacatggtgaaaccccgtctctactaaaaatacaaaaattagcctggtgtggtggcgggtgcctgtaaccccagccacttgggagactgaggcaggagaattgcttgaactcaggaagtggaggttgcagtgagccgagatcacgccactgcactccagcctggggacagagcaagatcatgtcttaaaaaaaaaaaaaaaaaaaaaaaaaaaatatatatatatatatatatatatatatatatatatatatatatatatataaagtttttgactccccagaaacttaactactaatagcttactcttgactggaagccttattgataacatggtcagttatcacatactttatatattgtatgtattatgtactatattcttacagaaaagtaagcttgagaatagagaatgttattaagaaaatcataaagaatagaaaatatagatactatttgttaagtggaagtggatcattatgaaggtcttcatcctcgtcatcttcatgttgagtaggctgaggaagaggaggggttggtcttgctgtctcaggggcggcagtggcagaagtaaatccgtgtataaatggacccacaccattgaaacccatgttgtccaaaagtcagctgtagtcgaaataaggaaaatacttaagagtactgtgatagagaataagcaggggtttatgactagagtagtcagggtaaggtctgtctgagaagacaagatttgagctgagacttgagggatgcaatacagttggtcattccaagagcatagggcagagcattaaaacacaggtaactatgtgtttagaagtgcttagatgggaaagaccttagcatgttctggggattgaaagatcattgtgtttggagtatagccagagaaaagcaagatgactccaggtaaggctggagaggcaagtggggctggatcatgcaggactttatgggccatggtaaggagtctgttttttatcttgagggtaacagcaagccattgaaaagttttaagtgggattcagacctaaatttacttactgttttttaaaagagatgaggtctcggccgggcacagtggctcacgcctgtgatctcagcactttgggaggccaccctggagttcaaggccagcctggccaacatggtgataccccatctctactaaaaatacaaaacttagccgggcgtggtggcccacgtctacaatcccagctacccgagaggctgaggcaggagacttgcatgaacccgggaggcagaggtttcagtgagccaagatcgcggcactgcactccagcctgggtgatagagcgagactcggtctcaaaaaaaaaaaaaaaaaagagatgtcactaatgttgcccaggctggtctcgaactcctggatgcaagcgatcctcccatctcagcctcccaaagtgctaggattacaggtgtgagcctccatgcccaatcaatatttaaagtataaattttggcagttgtgtggtaaatggtggagcaagcgttaagagaaggcagggagagtagttaggaaattcttgcaggctggtggcttgaagtagtgtggcaacatggaaagagacagatggatttggtattttggaggtcaggtccataggacttactaatcacttaggaaaaaagatactgcggaggttgatgtcgtgtttctgccttgaacaacttaaacgatagggtagtccatgtattgagatgggaaaagccctctaaagagggctgggtagcgggggaatttaaccgttcacgtttggggtttttttgacatgttaaaatttgagatgcctgtgagatatccaagtagagatgtcaagtgggaggttgaatgtaccagtctgaactcagaagactgaggtctgggctggaaatacagacaagggagtcctcagcatacagatggttctgaagtcatgagaatggctgagattttctttttctttttttttttctgctgtagaaattaattttattcttattcagactattttcaaaagaagcagtggtgcgctgtttttctaaaaatacgcctttagagatttttatatatgtatataataaaatccatacatgtatttacatgattgctacatacaaaattacagcactgtggtatgtacacatctacaggtacattctttccacacatccctgctgtgctttccccgtgtgaaggagggagactgaatcagttgtgagcagccaagggctggcccgtcgtcggaacctccgaatgggggctggggtggaggaggtgaggcgattgccgaggcaggagcagcagctgttgcagggctctcctgcaggccagcaggcagcatctggaggctcccggcagcctccccctcccctccaccccgtggtgcccgcgctgccctcaaggtggggtggctgaccacagacccctctggtgccattctgtggcctagacttgcttggctgggccaagaagttgtgtatgtgaggggtggaggagggagctgtgggaggaatagaccctgtccagccccagccctgagcaggggaaagggctggatggctaaagcctgcagatgactggtgagaacactccgcttggcccggcactgctaagggtcagagactagaggctgggagggagagcagtggccgccggctggggaacagggccttcttcctccctggggctcagagggtggcctcagctgagcttgagtaagcccagctcttaggccctgcggccagaggcttggcctcctgccagcagaggtgcatgcacactggggaggggctgccatctccacttcaacccctgggccaggggctggggaagaaatggaggcttaggcctggcctgctgccctgtaggactaggtccccggggctcaggattcctgaggcatgcagagaagggcctgagaatgcctgagattttctagtgaaggggctcttaatctggggtccaggaacctcacagagattcattgatagaattcaggggatctgtgaaccggaataggaaaaacttttcttgttttttctaaccagtgactgaaatttagcatttccttccattttgaatgtaggcctcaaagtacagtagtagtaatatttgtaattttgtcaccagtagaaatcaagatattttcatattgcattacagttgttgctgacatctcaaaatagcatctaaacatcactacttcagaattacagtacagaattattagacctacagctagatcccattatcaaatgcattgataaagaacacattaggccgggcacagtggctcacgcctgtaatcccagcactttgggaggccaaggctggcggatcacgaggtcaggagatcgagaccatcctggctaacatggtgaaaccccatctctactaaaaatacaaaaaataagcctggcatggtggcaggtgcctgtagtcccagctactcagaaggctgaggcaggagaatggcgtgaacccgggaggcggagcttgcagtgagccgagatcgcgccactgcactccagcctgggcaacagagcgagactccatctcaaaaaaaaaaaaaaaaaaaaaaaaaaaagaacacattaatacagaagaatatatcacaatttttaaaatttttgaaaactgtttttccataaaattggggtattcttggtaatcctttgtactttaagttataccttaaaaaaattgttctgaaaagggtccataggcttcaccagatgccagaaggatccatggaacataaaagatcaagtatctttgttaataaggctagggaatgagaagagaaggagcctaggactgagccctgaggttagttaatggagggagagtcaataggggagactttctttgaagggaggttcaagaggcaggaggaaatccaagagagaatggtgttgtgtcatgggagccaaaataaattagtgtttgaaaaaggagagtagccacctatgtcagatgggtgaagacagaagattggcctttgggtttggtaagatgatgtcatgggtgatcttcataagcaatttcgctagaaggattacagagaccctaattagaacgggtagaaaggtgaatggacagtaagaaagtggaggcaaagggtatagacctgaaagtggcaaatttttttctataggggaccagagagtaaaaatttttggttttgtaggctacttgctgtgtctgtgactacctctgctttatagtgtgaaagtagccatagacaacacataaatgaatggatgtgactggttccaatgacactttatttacaagaacagatggctagctggatttggcacaccagctgtagtttgccaaccccggtatagacaactctttggagaagtttagatgggaagggaagtagaaaaatggggaagtagttgatgggggacaaggagcgtgtgaacatgtgtatgtattttaagttaggagattttagagcatgtttttgctgatggaaaaggatcttatggaggaggagaggctaacagtccagaagagagcttagctgtactaataaactcctcagaagtcaagaggggataggattaagagtacatggatgcctaaggaattgttttttatgacacttagtgttattttgagtgacatattagtgttaacagcaagactgatatggggagtttgtccctgtcacttataggaccacttaaaatgatgaactactaggagagttggtgcggatgagatttagcagctcatttacttgatttgtgggatttagagtttaatttggaattttgttgtattggccttacctgaagtaattaatgtagctaccttcacttttcttggagatacctttaaaatcttgattctgattctgattctgtgaacagaaaatcacagcaattgcaaacaaattctagctcactgattctcagtctgttttctgttgtattttacttagtacattcctatcaataacagtggctcagctttggcagttactacaaccgaggagaaaagagaggggagtatacatctgcctcaccactcctctgcctcccctactactgagaatcattgttctagaccttttgtggatactttctttacttcagggttttaaaaggcatgtttgttccttttcctggagcagttcaggcatcttaatgatctcaggcatatttcccccctcagtagcttccctaatgtaggaatgctttgccttttgcagaccccagtatagaagaaagagttcagcatattaaatcagtacatattttcatgatgagcgcagacaataaaccaggcagtggattctttcacagctttttatggtcatcaactaggctgcccagaagggagtgagagtattcaggcaattcctgtgtgctatgtgagcctcctggaacaccaaccctttttctgaaaatgaactgtcacctgtgttgaaaatgtttgctgggattggggtttatagactgaagaaggttccatctgtgatcatgcttaccatgctgagtaacttttaagactggaagaatcgagatgaggatccttaatgcatccatgttaaagaacctttgcttgactttttgaattagttgttttcatacaaaattaacacttattcacgatttaaaaaatttttcaaacactacaagggagatattaaagtgaaaagagaagtctcatctatcagaggtggccactattgtatttctggcatggatgaggtgtgattaagctcataggtgcccccatgtgtccttttccttaaagcatcaatgggatcttaccacgtattctgttctgcgacttgctttcttcacagtagtgtctttccatatcaggacatactgagccatctcattctgcctcagagctattccatctgcctggaacatgaatctggaacagtcccagattcatggctcactcttgtctagtccttactcaaatgcctccttcttaatgatgacttccttagctgctgtatctaaaatttcaaccattcccctatccctttctatcccccttccctattaatgactttcctagcatacttctgtttattgtctgttcccccattgtaatgtatactctatggtggggaggaatatttgactgtgttgttcactgccatatccccaacctttagaataattctggaccctgtagtagatgctcagtaaatattcactgaatgaatgggtgaatgattacattgtcttcacatttgaatgcacattattttttaaacaatcccctattgatggacatttaggggtttgttttttttttttttttcagttttttctactttttaaaacaatgctgtattgaatatttttatacatatatctttgtactgttttataatgatctctaggataaattcctagagatagaattgtgagtttaaaggatatacacattttaagttggatgcggtggctcacgcctgtaatcccagcatttcgggaggctgacgcgggcagatcacctgaggtcaggagttggagaccagcctggtcaacatggcgaaaccccatctctactaaaaatacgcaaattagctgggcgtggtagcaggtgcctctaatcgcagctactcgggaggctgaggcaggagaatcacttgaacctgggaggtagaggttgcagtgagccgagactgccccactgcactccaaccagggcggcagagcaagactctgtctcaaaaaaaaaaaaataaataaatcaaaaaaaaaataaatagtacaaattaaaaataaaggatatacacgttttaaattttgaataattagcttccattttccctcccttaagatgaaaggttatattaatttacaatcttgctaacactgtatgggtatcccatttctctataccaggtatgatcaacctttaagtcccatttctctaccaggtataattaacctttacgcctttgccaatccgatggatgaaaatggtatctcatcctaatttgaatttctttaattatgagtggattcagcattattgcatatattcatcttttgtatttacttttctgcttatgtcttcttttttcattgtttattgggtcattttgcttgtgtttttgcaatcatatctttgtttgctttggtacctttcctctctccaggcttcaaccagatataaccccagagaacagtatacatctgggccaccgctttctatccttagaaagtttctagggatagaactttgaaccatgtaatggagtctagtttataagtaaagaaaaaactcccaaacctgtatatgatgctggtgttagcatcttcatctcttattcttgctcacattttttgtttattagttaaaaaaaatcatagaaacccatagcaaatattgactatgttctagataccgtgtttagcattttattatctctttaagtgtcacagcaagcctgtcagggagtactagtttgtctccatctctacaattttatggacaggatatcagccatgtccaaccctttgaatgcaaggacttttttgcttatctatggtagcagatatcacctttttaaaagttcattagctagttagtgttagtgtattttatgtatggcccaagacagttcttcttccagtgtggcccagggaagctaaaaggttggacacccctgcaaaaaactgagggatggtgagattaagtgacttgcccaaggtcacatagctagtaaatggcaaaaccaggatttgagcccaggcacagtggctccagagccagccctactaaccactaagttcttttacctccagtatgagtaatggggtatgttgcccattgtctgtttcaggagacctttttgcccatctatccccattcagaaaactggctacagttgttgaagcaagggaaagctattcatgtacaggtctgggaggttttttttgtttgttttttgtttttgtttttttacttataaactagatttccattacatggctcaaagtcaaagtaatataaagaggtacttggtgaaaagtttcacacctactcttatctgttctattacccctgccctcatttctgtgtatacttcctgtttctttgtatacttacaaagcaaagtaaataaatacggcaggctaaatacggcaggttgtcaaataatgtcgttttgtccaatgtcgttttgttttaatgttgatgagaaaagaaaaatccattcctgcctggggccactgtctgtgtggagtctgcacattctccccatgtctgtgtgggttttctccgggtattcaagtttcttcccacaccccaaaggtctgcacattaggtgaactggcatgtctgaattgtccccagtctgagtgagtgcaagtgtatgtgtgatgccaatgggatggcatcctctccagggctggttcccaccttggccttgagctgctgggatggactctggccacctgggactgaataggcaggtaaatcatttacttacttgtttttataagtctttcttaaatgtatgtatagctcatatttatttcagtgtttaatattagaagtgttttggtctgtatttagaagtctggtgtttttgtgaccaggatagatcaaaggaacttaactcttgtttatgtcaattagtgcatggtaaagttggttttgttatatgtcattgtgcttaaagtcacaatttccaagaacctatcaacattaaggacttactgtgtatatgtacatacttgtacatatatgtaatgtttactcatcaaatatttattgagtgcctctttatacaaggcactgtgctggcttccaaggagtatacaaagaagcatgaaacacagaaatctctggcctcaggaagctcgcagtgtagttctataataagagcataagtaaaaataaaacatagtgtttatatgacatagtactttcttagctgattcaggcctcaatacaaagcacattcagcctgctaaaggtagtaaatattaatatgtatcttggcttttggggctaagatgagagttctactgaatcatctatcagtctctaaaatataagaaatatgtcttatttatcttaatagattcttcaggactttatggtttgaacaaatgaatctgtatttcttttaaatatagacttcaaggaaactgttttatatctttctttttttttttttttttccaaatagagataggatctccctctgtcacccaggctggagtgcagtggtgtgatcaaagctcactgtaacctcagacttctgggatcgagagatcctcctgcctcagcctcccaagcagctgggactacagatgcataccaccacacccagctaatttttgtgtttttttatgttttgttatatatgtttgtgtatgtatatatatatatgtatatatatatataaattaaaaaatataaatagagacaaggtctcaccctgttacccaggctggtcttgaactcctgggctcaagcagtcttcctgcctcggtctcccaaagtgctgggattacaggcatgagccaccgcacccagcctcttttatatcttcttcatgaacccaaaaggaagctttttaaagaaccatttttattttagagtccatccctgccttgaggagccttatcaagttggatcaaaatgaaacttgtgtgcctaatatagaactgaaggatgaggacttatctttagaaagtttgttttggtggggatcatcttttttctttattgaggattcttcttccaattacttctgccccatgggcagtaagtagaaaagagtttatcccaattacaatataatattttagagctatcagcaagctaccttcaatttatttttttatctcagtttctgtgtattacaacttaattctgttaaaagacatctttgttcagaatccctccagtagttctagacattccagaatccgtatggaagaagtatggtgtagtggttaaaagaataggctctggagccagcctgctcatactgaaattctgaatctgccactttctttctgtgacaggttactggacttttatttattttcactgcccctaagtagatgtcttaaatgttagagatttgtgaattaattaagtttattctccccactgagctttagagccatggacaagaaccaaaagatgaaatctagcatcttatatttacctaagcacttttcatcaaagacagtgcatgctaacatgtaatatgcacatactacatgcatagaacacatgcactaagtatttccatgcatttttgtatgatgcaaagtagtattcttctttgaaggaacacgaatcccaaaggaaaaaagccaaagttaaaggttacataagagctagaaggagtaaggaaacatggttttctcttgcttcctgcccatggctgccaaacggttctctgaagactgctatgtgacagaagccctttcctttgaaaacctgtcacgtcacaacaagaaaaagatctctttctttggaggtacatttttgggcacaagaaaggctttttaaaatttttttggccatctttttcattgtaggagtctggtgcttgctgcctagtttgggagtagaggaaaagactctggctctttagggggatagagatgggaaaggagcatggcccagctgggtgtattagctctccctccgctgcacttctggaacctttcatataagggcttcaggataagggggttgcatagctttagggtcttatggacatttggaccatttgcttcataatcattttgaactgtttccttaggctctttattgagaaactaccaaaacatcgagattacaaatctgctgtcattcctgaaaagaaagacacagtaaaggtgggtcttcactttcattgttgcccatctaaaagcttcagagcagcacagactgacttcaagataaaagtagtagtctctgcatctgagtaccagatcctgcaataggagataaggccatttcaccacaacagttctgaagtagcaggtatggtacagtagggggtattttaaatcattttgggaaatgttgcagtcaccaacttgacttaagtcttcttttggattctgtaattttctggcattgttctaattctattttctgttttgtgtctcagaaattaaaggagattgcatttcccaaagcagaagagctgaaggcagagctgttaaaacgatataccaaagaatatacagaatataatgaagaaaaggtcagtatataacagctaagaagaaaattattttgcttttttaggctgtgccctgggattgtaatatgacatttcaatatatcctgtgcttttaatgtgctgtttcaccttttttgggcaaagaccagaaactcaaaaaagtagaacaccagtggttaggctcagggttgtaacacagatatagcctatttgtcgaagagagtgacttgagggacagaaaatctgtcgcctacctgctatgtctagagtgagaatcataagaacaatgaacattctctccaaaacataggtttttagatcagagaatttgagggttggattcacatttggttatacctgaagctatttataagaattgacttttcaagctattttttttttttttttttgagacagtctcactctgtcgcctaggctggagtgcagtggcacgatctcagctcactgcaacctctgcctccccgactcaagtgattctcctacctcagcctcccgagtgactgggactacaggcatccgccaccatacccggctaatttttgtatttttagtagagatggggtttcaccatgttggccaagatggtctcaaactcctgacctcaagtgatccgcctgcctcggccttccaaagtgctgggattacaggcgtgagccgctgcacccagccatttcaagctattttcaaatgattctttttaggaagtcagttaaaacatgtggagaaactgccagggcgctgtcagtggccagctgtgaatacatactgcagccactcacaggctgttgtgtagctgtctgctggtctctattctggactctgatgttgaaaatcagcagagggatgaacagctatgaggtatatacttctaaagcaccaagtgagtgtaagctttaaggaggaggttattacttagcatttctttctttctttttttttttaatccaaatgcctctcaagtatttcttattagcttaaaatgtcactctgtgttgaacaaatgcacaaaaaccataaaaatttcagaggcctcattttgggttaaaattcagtagaaggcaagacgtggtggctcatgcctgtaatcctagcactttgggagcctgaagtgggtgatcgcttgagcccaggagttcgagaccagcctgggcaacatggtgaaaccccatctctacaaaaaatacaaaaattagctgggtctctacaaaaaatacaaaaattagtgtggtggcacgcacctctggtttcagctactcgggaggctgagatgggaggatcacctgcgcccagggagattgaggctgcagtgagccatgattgaccactacagtccagcctaggtgacagagtgagactctctaagaaaaaaaaaaaaaattcagtagagacccccaagatagcaggtataagtttggatctggttctattttatagccttacttgaaatatagaatatgtacatgacacagagagaagaataaaactgtctgtgatacaggttaggagaacacagatagtaagttgcatcaagatttcaggccagacattgtggctcacacctggaatcccagcgcttcgggaggccgaggtgggcagattgtttgagcccaggagttcaagactagcctgggcaacatggcgaaaccctgtctctacaaaaaatacaaaaattagccaggtgtggtggtgcacacctgtggtcccacctactcaggaggctaaggtgggaggattgcttgagcctgggaggtcaaggctgcagtgagctgtgatcatgccattgcacttcagcctgggaaacagaatgagaccctgtctcaaaaaaaaaaaaaaaaagatttcagtgaagaggaaagtgcattaggtagagtcattgtcgggagggtattgagaggattgggattttaattgtccttggagataggtatactgtggccagatagaaaggggtggtgactacactccgtgggtataaagatactgaggaaagcatgaattctgtgttaggtaatcaggccacagcagaagtacattttggaaatctccatgctaaaaagccttgttctcctgaagtgtgaagtcactgaggtgtgaagtgttagcctaaattttctctctttgtagaagaaggaagcagaggaattggcccggaacatggccatccagcaagagctggaaaaggaaaaacagagggtagcacaacagaagcagcagcaattggaacaggaacagttccatgccttcgaggagatgatccggaaccaggagctagaaaaagagcgactgaaaattgtacaggagtttgggaaggtagaccctggcctaggtggcccgctagtgcctgacttggagaagccctccttagatgtgttccccaccttaacagtctcatccatacagccttcagactgtcacacaactgtaaggccagctaagccacctgtggtggacaggtccttgaaacctggagcactgagcaactcagaaagtagtaagtgcatttgctgatgtcctcttccttctcagttgcagccaaacagtatcattctgacggggtcaacctaagattacctccctgatcccactcattaagctttggtcacagaaacccatctgataagtattgctgtactgtgtcctaatacactggctatgttataaaagtggcctttgctgaaacctagtctggtcgattttctgaagagctaatattattcttgaaagtcagactgtcaactttttagtgaaaggaaaagaatgtgccaaaccgaattcataatcctcagataacatcatcagactgctgtgtgactctgtgtcccctgctctgactttgttacctctctagcaattcagatcttgctgttgaatacgcaaaagcagaacatctttcccctcccactttttttttttaaatatgaaaatatagctgtgagagacacttcctaactttagcttgctggctgtctcacagagtttctccatggtgttcagaaactgggtccattcttggcattttttatgagctgctttgttcatgccttttttgggggactacactgtattttttattttgttgtggtttggcatttaacttcttccagaagagtaagttcagaagtaaataactgcccagattgttttccattctcaagaatatacaccagtgtatttcttttaaagtcatactctgatattcttatctgagataaaagagatttaaaattaaaagttcagatgaatgggcagtgtcttagtccattttgtgctgctataacagaatacctgaggctggataatttataatgaacataaatttatttggttcatagttctggagagtggaaagtccaagacccaggggcctggcaaaggccttcttgctgcgtcatcccacgacagaagggtggaagggcaaacaaagatccctcatagcctcatcacctcttaaagatcctacctctcaataattttgcattaggaattaagtttccaaaacatgaactttgggagacacagtcaaaccacagcagggaggttatttttttaattctttgtattagattctgacagaaaattcccaaatgtttcaagaacttgtgtctttttcccccctaaattttattttttacttttattttttaagtttttgtgggtacatagtaggtgtatgtatttatggggtacatgagatgttttgatacaggcatgcaatatgaaataagcacatcatggagaatagggtatccatcccctcaagtatttatcctttgagttacaaacaatccaattacattcttaaggttatttttaagaaaacttttcttaaggtagtagtttgcccttttcttaacttgaataattaaagcctactattttctcttcttgaagtaatgtgctccttacagctgtggcccaagattggagaagacactttacagccctttttttggtgccattagaatgagatccctactcactgcctgaagttgggggaatcccagtggcttaatgttgctcctccagggctgctggctgtgaggtctgcttgaggaggcagggctcagtggtcgcagactattctcctttctcctttacagttcccacaatcgatggattgcgccatgtggtggtgcctgggcggctgtgcccacagtttctccagttagccagtgccaacactgcccggggagtggagacatgtggaattctctgtggaaaactggtaaaaagaaaaaaaaaaccaaactcttctctgaaccgaaactgtttcttcccctcttggcatcctgtgactctcagagaaaatatccagggtcagttactctttgtaccaaggaaccgtggactgcataatttcatgtcactttgaatttggtgaccctgtattgattgattgaattgaagtggttattttaatgctagtagtaagaaatacctaattttaaacttggtaggaagatccagtcattatctacatatcaatttttttggtacctactttatggtaggacctgggaatataaaatatgtaaagcacatagtatgtgtccacgaaaagtgcccagtcactttggagagaaggcagacatgcactaaagtctaaccagcatgctgaaaaatatgtacagtataagtattgggaattttgaggaaggaaaggtcactgaatggaggcacttaaagaacccattactgctgaatgaataaataaatgaagtagagtaaatgtaagccgaggcttacaggatgagaagggcttaaggaaacagtgacaggacaacaactttagacctgagcaagggaagagaaatggtactctacccagagcttctcagcagagcagtttggcacagcaggaaattccctcagggctgtggtgtttgcccaggctgcagagttctggggttggtctctgcatctgtcgctgtacagagtaccccaggcaatgtgcatcagcagccaaggttgtgaaccactgagtggcaggactcctgctgtgtgggaagggctttcacttgtatagatgcttacctttccactgtcgggatggagtggagcagggttgcatgagcaccagggaattgtgaccagctgttttctcctttggcagatgaggaatgaatttaccattacccatgttctcatccccaagcaaagtgctgggtctgattactgcaacacagagaacgaagaagaacttttcctcatacaggatcagcagggcctcatcacactgggctggattcatgtaagcaattctgagctgtccgagagttagtctctgcctctcccatggtggtataaatacatgagtgtttctttgaacaaagtcaattatatccagattatttattgtttttctctcttttggatgcagtccttagcatacttgactattgcactttggtattgttttctgggaacacttagggcttttaaatttttttaactttttatttattttttagtaaaaataaactgttttccctaaagttccagtttccctctgagtgtaactggtgatgggatgctggcctagaatataagtggacattgaccttagagactatgcctactgtgtacagatgatgttccttaaaggtatataattcaaaatattttaaatgagccaaggaggttaattcagatgcttgcatttggtctttcttaaagcacctttatataaacaagaagggctataaatacacatgattttcaagtgtctgcatatcttgtgcagccttctggtaatgttcaggtaaaatataatgccttccctaaagattatttttaaatttttctttctattccttttcaacccctcactctcatagcccaagctgcattttatgctgtatgacagagttacaaataaattggcttattcttggattacacatacttgtatgccagaatttgggaaagactgacctgtgaggcagtcccatgtgccttctgtcctttcttctattcaattacattcatgttgatgatttgcctattattgtgtatccccatcccacccccattgtagtagatgggggagagaaaacttgttccttatctgccagggcatacaaatttgagtaaggtatgattttagcctcatgaaggagattaaataaatagacaattaataacttcacctggggcagaacgtgctaaaggccacaagaggtgccagcgaggcactgtggaattcagaggaaggagggaccatgcctgatagggtttagtagaatgttggcaagctgggccaagggcaagttccttaaggagcagacaggtggagaagaggcggactctgtccctggagcactggggggaccagttcactgagatttatggttcatatcaggaaacagtggtagatttttttttttttttttttgagacagagtttcactcttttcacccagactggagtgcaatggcaagatcttggctcactgcaacctccacctcccggattcaagcgattctcctacctcagcctcccaagtagctgggactacaagcgcccgccaccatgcccagctaatttttgtatttttggtagagatgggatttcaccatgttggccagactggtctcgaactactgatctcaggtgatccacccgcctcagcctcccaaagtgctgggattacaggcatgagccaccacgcccggctagatatgttttaatgtagtacattggagccgagttctggagggtctggggtggacaggcagaattgttccactttttagtaagtggaaaattcctaaaggtttttgagtagagcaatgatatgattaaagccatactttagaaaatttaacataaatacagttttaaggtaggttgtggcaaggagatgatttaagaggttagtgtgctgataaagcctaataatgataagagctagggtgatgctagtgtgtttgggaaggaggagatgaatgtaggatttcagaggatttgggaaatgagtaatagaggatgatgactcagagtcaatggtgactcagagatttggggccttgcagtgatcatctcataagcaaaagtaggggatccaggagaaggatttggtttgaaagtggggttcagttctgagcatgttaaatttcaggtattgatgagatattaaatcactggaggtagttatcagccagttggcaatgtagggctagaacttgggagcaaagtcaaagcaggagagagggctctgggaatccactatttagtgctgatcttggaagccctggaagtaggagaagagtctagagcaagaaaaggttcactggcaacttgggggacaggctacctaatgtaacatagaatgtagttagcaatggagcaaagagatgtatgaaaaaggtgagggtagtggtaaggcacagaagccataggaggaggaaggctcttttgttttgttttgtttttgagacggagtctcacactgtcgcccaggttggggtgcagtggcgcaatcttggctctgcaacctccgcctcccaggttcaagtgattctcctgcctcagtgtcctgagtagctgtgattacaggtacccgccactatgcctggctaattgtgtgtgtgtgtgtgtgtgtgtgtgtgtgtgtgtgtatttttagtagactgggtttcactatgttggccaggtgtgtgtgtgtgtgtgtgtgtgtgtgtgtgtgtgtgtatttttagtagagactgggtttcactatgttggccaggctggtctcgaaatcctgaccttgtgatcctcgtgattataggcatgagccaccgcacccggccaaggaaggctttaagaaaaaatttccagatgttaaccatgtcacatcctatggagagctccagaatggtgaagactcggatcggcctggatttgatgaaattattgaggatctcgatttagtgtgttttaggcattaatgggagtagactgtaagagtttaagaactcatagggattaagtttgtggagacaatgaagtatacactaccattttgagcaacttagctctagaggaaaggagaaacatggaatggtggtttaaggagaagttgggttgagagaatgtttggttgattgttcaaagtgaaaggcttgaacatgttttgttttgatgaaatataacacatgtaataagaaagcacacagaaactaaatatatactttaggccgggtgcggtggctcaagcctgtaatcccagcagtttgggagaccaaggcgggcagatcacgaggtcaggagtgcgagaccagcctggccaacatagtgaaaccctgtctctactaaaaacacaaaaattagctggacatggtggcgcatgcctgtagtcccagctactcgagaggctgaggcaggagaattgcttgaaccccagaggcggaggttgtggtgagccaagattacgccactgcactccagcctgggcaacagagcgagacttggtcttgggaaaaaaagaaactaaatgtacactttaacaaatcattaagcaaatatctatgtacatacactacctaggtcaggaaacagaacactgtcaggagcatgcatgccctaagggagggaagtcctcccttccttgcttcgtttataatttcaccacttcaatgtgtatctctaaacactatagtttacttttgcctggcttttacctttttgtaaatggagttataccatatgtatatttgtgtcttgcttcttttgctcaacattttgaaggtttatccacattcttgtgtgtagttttctgaacatgttcttatgcccaatgagccaacaatggagatgtaaaagggcaggagagacaaggtaatgtggtgataaggaaggatcgaatgagaagtacatagagggattcatcttcacagggggaaaaacatccattcctccaagacaagattgaatgaacggaaatgaagatccagagagatttttgaaatgatgtctggaggagttgaggaaacacgttttagacaatcttgacctcaataaggttggagtctaggtctgctgttgagcaagagggagaccaaggaggaattagaaactggaggagatgggggaaagtttagaatcattactgtacagacttcaggtagaacttagctacaaatgaataaaagagttttaagtatcagtgagggtccagttgggaacagatttgaagcctaaattgatagtagttcagcttttttatttttattttttgagatgaggtctcactacattgtttatgttggaatacagtggctattcacaggcacaatcatactgcactacagccttgagctcctgggcccaagtgatcctcctgcctcagcctcctgagtagctaagactacaagcacacaccactgtgcccagctagttcagctttttttcctccatatttctgcaccattccttcctaattcgggattaaaaacaaacaggctgagtatggtggctcacacctgtaatcccagaactttgggaggccaaggtgggaggatcacttgaggccaggagttcaagaccagcctgggcaacatagcaagacctcatctctataaattaaaaaaaaaattatgcatttgtggtggcacacgcctgtggtcccagctacttgggaggctgaggcaggaagatcgcttgagactgggaggtcaaagctgcagtgagccgtgatcacaccactgcactccagcctgggcacctgggcaacagagcgaaaaccctatctcaaaaacaaacgaaaagcagaccgaaagatttattcagatcttaaaattggccagaggaaaatgcaaaagatcagttcttccttcttaaccttgtcaactatgaatcagctgcccaggtcaaaagtatggttatggattgatcaccaactgttgtcaaacctccagcccagaactcaaggcactcctcatcatgtttcagcgctatctgagccatttccctttagggaaaatttccctcttaggtacccaggctgccttcagcattcaccctccttgctcatttctgctccttcggtatattgttttctctttgtcaaagtgccttcctctatccccagcagcatgggcacagtgaacataatgaactattcattcaagaaacttgactgtgaaaggaaggagggagagaaggtacagtagttagagaggagcaggggatcatggcaaagttttttgattctgtttaagagttgtttactgagtccctgcttatgtctctttattatctttctggctacccacgtttgctcccagttagaatcctggactctaaccatgggatggaaggtggtgttggcacaggccactgctctttagcagcctaaaggattatattctcatcaggtagaaactttgtggtcactgaagtccttacatgccccatgaagacttgtgtgtggatttgctgcctgcactgagctaacacgttcctgtcctgaaggcttcttccacagtgagctcatcacagcaccctgtggaatggtgcttctcagatgaggctgcacataagaatcacttagtgagctttcaagaaaaatgttccttcatgatggttctttctaggagtggggtgcaggagtctgggcttttgtcaagctcctcaggagatttgtttttttggacagcaggtttgaaaacgctagtcaattgcatgtctttattgtctgtgcttttctgtcagtgaaggttggttgtctttttgaatcatgctagatctttttccatttttgttacctaagatcacacctcctctaagatgaacataagtcattatatagttgtctgttttgtatataaaatatgtgcttaataaaacaaacaatggaaacaaataatcgggatgcacatttaggtgatattttaactgattaacctcaaattttagcatcgtgttctccttccaaacagaatggtctcctttgtatggtttaactatcaactgaaattcaagtattcccctacctcccatatcttccttggatgatgctttagctacaggacagcctttgcctatagaacctgattcatgtttgaccttttaacacctctgtgggagagaagaatcattcatctaattgtggtttactaagtccttgacttccaccatgttgaaatattgggtatgtaccatctgttccagaatgggtgactcagtggtatgaagagaccttgtaaggaaccaaataagtcttgatggtcagttagaaattatgagtctcttgaaaaaccaaagcctgaatcatccagagagaaacacttcttagaggagatagaagaaattccctagcaaaagttccaagggccactgagtgccattcacaattgttgaggacacccacctaccttgtccatggatgcccatcatgacaaccccattaacacctttgattccatggatccctgggtgaatccaacatcatagtccttgagttcttccaatttggttcaagaacaggagagctagagcaggaaatatcaacaaacaaccccctcttctgtctccaaccctgagatgcaaatgtcttttcctgtctccactcctactgtctggtgatctttgtgcagcaggtatgtgcctgaaggaggtctccaagccagtttctgtgtgctgtcatctgagatggggttccccttgccagttctcacaccccacaagacccaccatactgatctcctggctagcacacaccaaccccagggaagccttttcttcacacttggaacctagatcttgatttccttttgtgaggtcagaatttgtttaactggaatgtggcacagcattgaattcttctgccttgtctattccagcctcagaattctgtttttctcccactttgcagtggtctttgagttttaacactgtggaacagtatctttccccgatgatgccccagatggaaggtttgagttctgtccctgggtcctctccataccctacctgtttaatggcccgatgtcttgatgccttctcgcatcaaggctctgcgcctacagtccttcatccaaccaggaattccagaacccatcaggtaccctagatcttctgaaccagtgggatcagagtccccgttttgagtagtacagagaagaaagttccccctttgtgtttacctccctttttgtctgcctactccagttcccccttccccctgagtgctcaagctgcctaacatcttccactgccttcaaacaagggaagccagaaagttccaagcctcttcgtccacagtttacttttgtccagtacagccttggtgacctctgggagctctctccctgagaaggttgtctgagtgaattagatgaaatgtggtgggtgggttatttggtatgtcatctataaccatgagctaggacggcatgcgcttgcctgggcttaatgctgttactttccattagaaaaagatcaccttatcattcatcagacactctacagaatctcagaattatggttctgcacaatgtaagtgagggcatacatccacctacccaggaactgaagtggaatctcccccaccccacttgtggcatctccccacgattgctcttcagacaaatcctcatctgtttagttgtcattctgctggggacaatgcaatctaagttatttcatttagttattttcatccccttcccctctctcattgtatccttcaccacagacagctcttccagtttccaataattgtttatactccttatttctttttctttttttttgagatggagtctcgctctgtcacccaggctggagtgcagtggcgcgatctcggctcactgcaagctccacctcccgggttcatgctcttctcctgcctcaacctcctaagtagctgggactacaggcgcgtgccaccacgcctggctaattgttttgtattttttttttttttttttttttttttagtagagacagggtttcaccatgttagccaggatggtcttgatctcctgacctcatgatctgcctgcctcagcctcccgaatagctgagattacaggtgcccgccaccacgcccagccaacttttgtatttttaagagagatgtggtttcaccatgttggccaggctggtctcaaactcctgacctcaaatgatctgccctcctcagcctcccaaagtgctgggggttacggacataagcctccatgcccagcctgtttttgttttttctttttttaattgacaaataacaatagtctatatgttttgaaatatgtatgcatatattgtggaatgggaaaatcaagctaattagcatatgcattatgtcacatacttttttgtggtgagaacacttgaaatctactctcttaagcagttttcaagtgtataatacattgtgatgaacagtagtcaccatgttgtatagtaagtctcttgaacttaaaaaaggaaagaaattatgagtctcttcacatactggtattaagcaatatttgtttacagtgctggaaaggagcttccttacttattaggaacctcaggtggacctctcatggttgcagatggcttctcacttacaaaggagattgtgaccagctgttgagaactgtttggctttacttccttcagagaccagacttggttgtatgtcagagtagtcccccccttatcctcaggggatatgagcccagaccccccaatggatgcctgaaatcacagatagtaccaaaccctatatatgctatgtttttttcctatacatgcatacttgcgataaagtttaatttataaattaggcacaggaagagattaacaacaactataataaaacagaacagttataaaaatacagtgtaataaaagttatgtgaagatgatctctctttctcaaagtatgttatcgtatgtaatattttcagattgcagttgatatggatagctttaaacctcagaaagggaatcgcaaataaggagggattaccatatatcctcgctaagagtcctctgactctttttctctcctcagactcaccccacacagaccgcgtttctctccagtgtcgacctacacactcactgctcttaccagatgatgttgccagagtcagtagccattgtttgctcccccaagttccaggagtgagtatagagggcatggttctgggtgtttcaagggggtagtagggaagaaagcctcaggggaaaaggtctctattcttgtggacttgtcctttgtaaaatacatagattataatgtaagttggttattctaaagggcttccttttaagccccatatcatgatttatctatcatgcttgttcaaaaagatatccaagtaacaacttagttgcttttctaagaaaagtctacaagaaatttgaagtgtttgacttgaagcgataggaatgtcaagagttttatgttggattagaaagtttcaaaatcataaaatataaaaaaataaaaaataaaaaataaaaaaatataataaaaaaataaaaataaaaaataagaaagtttcaaaatcaaacacattatctcagaatgcacttctttttcataccaaatcctgtctctactcccactttgattatttactatgaattctccagcaaaactagtgtgatggcagtaatgagtcattctctaactgtgattcattcaccagagaagagacctgtgaggcagcatcctacagaagctgtctcacaatgacctctgccctgctgtgtgagtgtgcatgctggtgtgtgtgtgcgtgcatatgtttgggatggagggacacctttgcttgactcttagcctgccttttttaaatttcagaactggattctttaaactaactgaccatggactagaggagatttcttcctgtcgccagaaaggatttcatccacacagcaaggatccacctctgttctgtgtacgtatctatgtaaaagaaaatggggctatgcttcaagcagggaggacagtcagagctgatgaaatgcatcatcctttctgatccacacagaagaccagctttgtcacttaccttgccagatctccataataaggacgtacatgagaagcagtgtgggacaggaatagatttgaatcttagctttgccactgtgtgcctttgattgggctacttaccgttcctgggcctcagttttcccatctataaaataggcataataataacacctactttatagggttcttgagatgattaaatgaagtaatgtgcaggaagtacgtaatgcagttgctggcttattaaatgttactttttcctttcatcaatgtctctttctaagcctgtacttcaataagagatttgaaggcaaaggaaaagagaagccacttcagataggtaaattaagtatatttgtagaattttgcttaaatcataggggctttacgaccttcctacaaagttcttttttccctatgttgtggtctgtgaataaaaagtttagttgatgataagatcagtatgtttccatttgcccctgcaagctgatttgatggtgttgcattactccatgctggccatggagtattatttcttttgggttcagagaaaagtgagcaatatggaaaagggactaagaaccttgacacttaaaaggacctggagatgcttagaagagaaaccccaggaaggatctgagagctgatttcaagtgttagaagagttgaagtataaaaaaagggattgggtatatttcacgtcactcctagcactaaaacaaagacttcatggaatgatggttttctgctgagcgtgaggaagaactttctgacaaatctgttcaaaaatagatcagtctgccttggaatgtctaagtactaggatgttgaaacaaagactacacaatcagaaaaaaaggtctggggcaccagtgcccatgttttcagttataaaggcccctgttgcatgccaaaagggagcattcttctctcaccatgtgacagtaggtatactttattatttgggtgacatcatagctaaaaaaactgtgatgaattcagtaattcttttaaattaatatatattttagggatgacactatttgttcccaagtttaggaatcaaagaatgagtctagaatgtatatacattttaaaaataaacaaaggtaaatgggcaaacactgattccatctacaggtgggactggtggtagtaatgagtcccagactcttaccacaactaccacttaaatagcagtctggcttccagactgagaaccactagcctagaatgaacattttaaataagggtttttttgtttttgtttttgtttttgtttttgtttgaaacagagtctcgctctgttgccgggctggagtgcagtggtatgatctcagctcactgcagcctctgccccccaggttcaaacaattctgctgcctcagcctctcgagtagctgggactacaggtgcgcgccgccacaccgggttaaattttttttttttttttttttttagtagggtcagggtttcaccatgttggccaggatggtcttgatctcctaacctcatgatctgcccaccttggcctcccaaagtgctgggattacaagcgtgagccaccgcacccagccaaaaagtggttttttaaaatgacttttcaggccgggcacggtggctcacgcctataatcccaatactttgggagactgaggcaggcagattacttgaggtcaggagttcaagtccaggctgaccaacatggcgaaaccccacctctactaaaaacacaaaattagccaggcatggtggctcgtgcctgtaatcccagctactgggaaagctaaggcagaagaatcgcttgaacccaggaggcgggggttgcagtgagccgagatcgtgccactgcactccagcctgggcaacagagcaagaccctatatgaagaaaaaaaaaaaaaagacttttcagaattttctaggactccacctttcttttttcctattgcagagctgcagccacgtgactgttgtggacagagcagtgaccatcacagaccttcgatgagcgtttgagtccaacaccttccaagaacaacaaaaccatatcagtgtactgtagccccttaatttaagctttctagaaagctttggaagtttttgtagatagtagaaaggggggcatcacctgagaaagagctgattttgtatttcaggtttgaaaagaaataactgaacatattttttaggcaagtcagaaagagaacatggtcacccaaaagcaactgtaactcagaaattaagttactcagaaattaagtagctcagaaattaagaaagaatggtataatgaacccccatatacccttccttctggattcaccaattgttaacatttttttcctctcagctatccttctaatttctctctaatttcaatttgtttatatttacctctgggctcaataagggcatctgtgcagaaatttggaagccatttagaaaatcttttggattttcctgtggtttatggcaatatgaatggagcttattactggggtgagggacagcttactccatttgaccagattgtttggctaacacatcccgaagaatgattttgtcaggaattattgttatttaataaatatttcaggatatttttcctctacaataaagtaacaattaacttatgtttttgtgcttcagagtgatccatttgatcaagcattgtataaacaggttaaaaaaaaggtatggttgttttggaaaggtgaaggaaaaatggaatttgagatatactgacactgatggtgtgtcccagttcacttttaattactccttgttttttatctgcctgttgccatcttccagaggtgttgtgaagtcatctctgttcttttggtgctgtctcaaatgggtcaaccattcacttcctccttatgccctccatgcttttggctgaggataatgaagcctttgtttggagtaccaggttacactccaataaatgattacatttcccagccaccccaccctaccaatttcattgtgttggctgttcttttctgactaaggcaatacctaggaaaacgcttgaagcagcaattgttactgcaattttctgtgagctgagcctggtgttctaggtggcctagaaataatggtgtcatttgtgacacctcgagtgagggcaggagagtaaatactttggctaggagaagagtgatttattctttatcagaattctaggtgggggagggagaatctgtgaatgcataaagttttcttcatttttaaattttgtctcagtctttattgcttaggttagtggtccttgaacttgtcccctgaaagagcccagttctctatattctttttcttctcttgggttcttaattccccatatagtggaaattccttctttgctgttttggtatgggtgggtctgggggccagctgggcttggacaagccatttcctgctgcagcccagagcagcctggctgttccaccttgctctaaacagtcctgaaattgcccagtcctctgcttttgggaaatccatccccttcttcccattctttgtctaccacttagcttagggctttcttaccttttatttcgactgtagccgttggcttttaccaagtctctttgtttttagcatttcttcattccagtctgttctgcacactttgatcaggagaagcttctcacattccagccatgttcatgttttctctcttgctcaaaaacctgcaatagcttcccattgctgaaaatctaaatttagcttttagtcagaactttccacttaaagttcttacccctggctatatattcaaatatctagggagcaatttaaaaaatactgatgcctgtgttctaccccccaccaattaaagctgaatctctagggtggagcctcagatgttgtttctgcatttgtctttcaagctgctagaattctcaagtacaaccagggttgacaaccactgcattggtctttgatacctaagaattgtgagctctcttatccgtctctgcccaccaaagacattcagccaggtcaacaacatatcatacgttgcaaccacattgatcacagactgatcaccaaactgctatattttcttttctcttcctctaggcacaagatatcttagtggctagatgggtgcaggaaatcagtctgtagatccctcttcatatctgctgcagcctagccactgcagaggcactctgcataggatggtctaagtgtctctgtcttcatcttacctctgtggaggagacgtggaatcaagccagcccacaagccctgagactggataggccggagagaaagaggagtagccagagcggtcgggaaaagaggaaaggaatactgtgggtaaaagggacaaagaccacgcaacctgaggaaagacattgtattgaaagggtaatgactatttggctaaagggactgactcctgggttcccgaggctcaaagaccaggagacttttccactcttgcaagctgcacaagtaccatacttagtgttctgggctgagaggggagacaaaagcatcgtcaggttgccaaacaatgtcccagttgccctgggaggcacaaacctaccaaagtgccataggccaggtgcagagagaatcagaggagctgatttgcttggggtcagagcagagctgggttttttcagatgatcactttcacatactccttgttaaatgggaccaaaggggaagaagaagaaacccttaagcttttgtaatattgtcttgggtaccagataccataaaaggcagcatgagagaaacattcccttgggccagtgtcatggtggattttcttgcttgagaggcaaggatttcagctttcatttggtaccacagaatttaaaattgtaagtgcctatcccttttgactgttgatggcttctttggggttttagttaccccagttgaaagagaaatttttcatattggggttgagaagaatggaggctattaggagcaaagctttaatgagtgaaagtctggtgaatcctgcaattttgatatgtttccagtggattttgagaacacagttttaggaccagagtagatgttgttccctagaaaatagagtcagctattgatattgtgcctcccatccctcatatctcagtgttttaaccccacctgagtttggagaccagtttgtccaaggatctttcaaacatgtgagcccagagtagaacttctgagtcaaggatcatgtctttttctgaggagctttgcttggggcactggaaatcctgtttagatcaggactattggaatattatcctctccaggggaagtgccaggttgaacatttaaggctttgcttctaggcccagctatacattcaccagcaaatcacttaacttcctaaatttctttaaaatctgtaaaatgggatcagtctaatatgcctacctcaaatgatgacagaatgacatctatatgcatatgaggcctacgttagttgaaagatgctataaagatataagggatttgttacttgtctttcttgaaatgttacagttggggtgcggttgcttctatcttctggacctctgcccattcagcatacagctagaggaatctttgggcagatccacattctttagcactagctaggctttgactccaaagctatctggtctaccttgatgttctgagcaggaaaactgaggacctcaagaaccattccaaatttctactcattctccctaagacccagagcagacccaggacctaaagaaattacatcatctctattttcccttggctccagcccactcttgtttgaacctcccacttttgttgttccaactacttcttgagatgaaggaagggcagaacattggccctcttcactgaagtcttcaccccttaatccagggttcaatttttagttcaccttagcctgtttgagattagaagctgggccttaacttacaggtgtgtccggcatcattcaatcagcctgttagatccagaatccagcactgtgacgctacataaccatgggctctgtccttccagttcctttagtgccttccctcactggtaggttcactctgagggcttccttccttgaactccagtggcaactatagtctgtttcccacaatttgttgtgtgtgttttttgttgttttgcagcgttttcatattgtcttttatgtaagtcatgtttctgaactatcgtataaatttcattagggtaagaatcatgtttgctttatgcactgtgtaacatgccttgcagtcagtataggcacttaaccttattgatcagttgttccttggtgttgaataatgtgttaggtagccaggtggacctgtgtcctagcctggagaagctctatgtcaccttgtaggaagccatctgaatttgactcagcatcatatgctgggcctgtgctgcacttgagctttctttccagccgccaggagggatggttgtcctggccaacagcgaatttaatgggtggtcaaaagaagatgtgcctgcatagaaggctgaaagagggagctggaagtaggaggagacaaggagatagtgacaccagtatcttgtcacagaaatcaaggaaggcaacagtttaaaggaggggagggagatcagtggtgccaactggctcagaagaggtttgctgggttaaatctcaagatgagcccatgagatctggtggttagcagaggcctttcctgacaaccccattttaagcacctcttccccatcactctatctcatcactgttactgtctgtgtagccctgtcatgagctaaaatcatcctgtttgtttattgctagcttatgtgtctaaagtatactccttgagaacagcaactttgtctttttcacctttgtactgagtcccctgacatggaataagatatgaataaatgcacagacttgtccaaaatcatccaattaa

SEQ ID NO: 15828 - DNA, 44672 bp, Homo sapiens
tttccggaacctccgggtgtcatccgcggggaaaggtggggaagggtcccgggaacgtggtggggcagggcctccgagcgtggttggactttgaaggggatcggccgccgtgagtgtggggcctgcagcctactctccccgagtcccctgcccggcctgcctcgctcgaggcacccgacggcttctgtctccgcgggctggcgcctgaccagccaggcccagcggttccccgcctactgcatttgaaagatcccgaaaaccctggatgattgtgcctggggttggcaagttcgtcttgagtgccttcaagaagggttcctcaagcagttgtcgatagagccctccctactgtatacgccccctccgctcattcctgctacttcctttctcctcctcgtatttccccctcggtcctttacgccgcctttccccctcatttgcagatgctgcatcccctttttggaattgctcaaccaggtggtaaccggcgccgcttcctggccttgggaggtggttcctttcttaacccacaagaacctctcccaagaggtactgagatgcaacaagcatcctctgtttcagttaactttcatgggccgtggactaggtttactaattacttggggaggttttagatatgcttgcggctttctgagtccctaaggaggcctcgtgagagatggactatctctgcatccctagtagtcctcacggcttttgtgctattagtgagggtgttttagaggggaaggtttgtggaggaattgtgacccgaatattgaagagacctaaagatggaattggctgagagaagactacccctgagggaagagttgtagtagaaaagaaaaactggatagataaatgaaactgaaatgtgaggatgcctgggcggattggaatcctgactgaagcaaaagatctctgttggggagggccagttgccacagggccttgaattccaagatttattctactgtagtttgtgtattctagagcatactgattagggtttgctgtaatgcaatgtgtgtcaaatgcccagttttattttggagatgatagtggtgatatctggttggaatttggaatctgattctaacagcaactatatctagaaagactagaattactggagttttgggacaccaggggtttttgcaatgcaagttaccatcgtgcctttttgttattcagtgtttagtctatgaagatgagtaaatggttgttttcaagatttaagtctcttgccatgataatgatgaatgaatgattttatagattgactatagtggtttagtgagcagagttacaattatgagcattaattcccagaccagttcccctaactcaccttgtgctcaaatatgaaaaaggataccacagaaaatgtcagttactctcagattaagtaaaaatggtcaaccttgaagttagttaacaatcctcaagaaagttcactgagtgcactctgccaggtactggggtggaggtatgtgggtatctggaaggagaaataatagaaaataaaagatgctgttcccacttttacagtgctgtgggcggagccccctaatggcaaaggatttgattaacttgaactgaacctttggttggtccactgtggttctactccttataccacctaattatggtacaggggttgtatgttttctagtctgccagtactctcatcgttgtgatttgggcttccttgagggtctcagccttcttgtaggaaagtccttatttaataggagccacagcatttggtatgtttctcttatattttcttcttaaggtagaggtctgtgagataaactgtaaaactgctgggatgatgagggcaacggtattgatgccatctgttttttctgtctcagaacttggtcctgatgtctgaccatggagatgtgagcctcccgcccgaagaccgggtgagggctctctcccagctgggtagtgcggtagaggtgaatgaagacattccaccccgtcggtacttccgctctggagttgagattatccgaatggcatccatttactctgaggaaggcaacattgaacatgccttcatcctctataacaagtatatcacgtaagacacctacagtttcctttttcctttctggtgactggtgcctcgcctatttggctcagaattgctaaaaccacagaacttcacaatatcatcaacattaatcatttttgctggcaactcctacatattggctgtccttgccgttcaaagacatgagtgctgaaggtgttattttcatgactcagtaatttatgagtaagagatttagttctttggcctatgcccacatagcccagctgttagacaaaagagttggtggttaaactagacatattatgttctgatgaatgcttttactgttctctttctactaaagcagccaatcataggattattgttggggtctagcagagccaaaattcctcacttgtacttattttgtagcaaatttagtgatacaggaaaaaattttttcctcttaacctttatcataatcatgcaaatcatcaaataattagtaactgcctacagtttgtgtggctcatcataataagacctttcccttaagttatttatcatcttagggtaggcagcataagtagaagatttcagtactattaacagcaaacaacttctaaaactccattgacaatgatacataatttagaaaggaaataatgttaaaggtcttatttatcatttctaatcttgttctttcacaatatcaggactttttaaaaaataattataatgtatttggttctgagtagctcatagtgtgtttcacctgcataatttcatttgatcttcacagttctgtgtgcatggaatagggtacactaccctacattctacatatgaggaaacaaactcagtgtttggtggatgctcatgtttgaagtgacaaaaccttggttttctgactcctaattcaggatttgttctacaacataggtcctgttcttcttgttttccatttagtaatgttctagagtcagaggtagtcttttgagatcatagtcatgagccacactggctatttttttgttatttattttactactgatttttgagtaggtaacatatatatatatatatatatatatacacatatatatggtgcacaattcagaggcacaaaagaataactatagttaaaaagtaagtcttggccaggcgcagtggctctcgcctgtaatcccagcactttgggaggccagggcaggcggatcacctgaggtcaagagttcaagaccagcttggccaacatggcaaaaccccatctctactaaaaatacaaaaattagtcgggcatggtggcgtgtgcctgtaatcccagctacttgggaggctaaggcaggagaatcgcttgaaaccaggaggcagaggttgtagtgagccgagatcgtgccactgcactccaggactccagactaggtggcaaagcgagactgtttcaaaaaaaaaaaaaaaagtctccccacccactcctcttttccccccaaaccctcagtgcttctccccagagacaaccactcttagtagtttcttagatatcttccaagagatgatatacacataccagttttatcacattaagtttttgatcacatactcctctaaagcagggcttttcaactttggccctattgaccttttggactgaatcattatttgtggtgggagctgtcctgtgtgtcacagaatgtttagcagcatccctggtttctgctcaccagatgccagtatcccccctccccgcagtgtgacaaccaaaaatgtcaccagacattatctgatgttctcccaggggcagaatcacctctgagaaccagtgctccaaaggaaagtatgcggaagaatggactgtctaggattcatattgtaattgtagagtggagaaatgggactgctattgtcttttttatttagaagtgttgcctgtgttaagaggagaaaaccttagacaagttaaatttaacagagtttaatccagtagaaaaaggttcagggaacactcaggaccaaaagtggtgcagaatgttccaccccatagtggaggttgtgcaggctatatttatagtcagagaaaaggaaatgagatacagaaatagcctgattggctacagttatgtgtttgccttatttggtcatgttttggcaggctttagcctccaattggctggaggtttcagctgctatgattggctgagactcagctatttgttacacttgtaacctaactcttatgttaagttacagtttgtttatacattaaattaggttacagttcactatctttggaggcagctttaacttaacacctgtttccttaaagatctgtagttctttaatgccattatgtcatgtcatgtggcctcaatgttgttaaggtttcataaaattataattatatttctgcttctgtttgctgttatgagtttttcattcctaggcacactatttattttcctgcacagtttttttgaccctgtcttctttatatattcttggtagaaagaatattcttatgtatttcctataagcttgtagattgttctctcagaatgaaacccaggggcacaattcctttggagaaacactaattcagaaagttcagtagaatcatggaatcactgcaccaggtatttcctgaagggccttcagaatcctattgccccacaatagaaagggctttcagggcaaagaccatattcattcaacacatgtatattgagtatacctgctgtctacatggcactgcactaggtcctgaacagcagtgagtaaaatggcccctgtccttattggtgttcctttataggtatgggagaagacaataaacagataagcaaataaatacagctgacccctgaacaacacagaggttagcaccaatcccccatgcaatcaaaaatatacatatggtcaggcacagtggctcacacctgtaatcccagcactttgggaggccgaagtggatggatcacttgaggtcaggagttcaagacaagcctcgtcaacatggtgaaaccccgtctctactaaaaatacaaaaattagcctggtgtggtggcgggtgcctgtaaccccagccacttgggagactgaggcaggagaattgcttgaactcaggaagtggaggttgcagtgagccgagatcacgccactgcactccagcctggggacagagcaagatcatgtcttaaaaaaaaaaaaaaaaaaaaaaaaaaaatatatatatatatatatatatatatatatatatatatatatatatatataaagtttttgactccccagaaacttaactactaatagcttactcttgactggaagccttattgataacatggtcagttatcacatactttatatattgtatgtattatgtactatattcttacagaaaagtaagcttgagaatagagaatgttattaagaaaatcataaagaatagaaaatatagatactatttgttaagtggaagtggatcattatgaaggtcttcatcctcgtcatcttcatgttgagtaggctgaggaagaggaggggttggtcttgctgtctcaggggcggcagtggcagaagtaaatccgtgtataaatggacccacaccattgaaacccatgttgtccaaaagtcagctgtagtcgaaataaggaaaatacttaagagtactgtgatagagaataagcaggggtttatgactagagtagtcagggtaaggtctgtctgagaagacaagatttgagctgagacttgagggatgcaatacagttggtcattccaagagcatagggcagagcattaaaacacaggtaactatgtgtttagaagtgcttagatgggaaagaccttagcatgttctggggattgaaagatcattgtgtttggagtatagccagagaaaagcaagatgactccaggtaaggctggagaggcaagtggggctggatcatgcaggactttatgggccatggtaaggagtctgttttttatcttgagggtaacagcaagccattgaaaagttttaagtgggattcagacctaaatttacttactgttttttaaaagagatgaggtctcggccgggcacagtggctcacgcctgtgatctcagcactttgggaggccaccctggagttcaaggccagcctggccaacatggtgataccccatctctactaaaaatacaaaacttagccgggcgtggtggcccacgtctacaatcccagctacccgagaggctgaggcaggagacttgcatgaacccgggaggcagaggtttcagtgagccaagatcgcggcactgcactccagcctgggtgatagagcgagactcggtctcaaaaaaaaaaaaaaaaaagagatgtcactaatgttgcccaggctggtctcgaactcctggatgcaagcgatcctcccatctcagcctcccaaagtgctaggattacaggtgtgagcctccatgcccaatcaatatttaaagtataaattttggcagttgtgtggtaaatggtggagcaagcgttaagagaaggcagggagagtagttaggaaattcttgcaggctggtggcttgaagtagtgtggcaacatggaaagagacagatggatttggtattttggaggtcaggtccataggacttactaatcacttaggaaaaaagatactgcggaggttgatgtcgtgtttctgccttgaacaacttaaacgatagggtagtccatgtattgagatgggaaaagccctctaaagagggctgggtagcgggggaatttaaccgttcacgtttggggtttttttgacatgttaaaatttgagatgcctgtgagatatccaagtagagatgtcaagtgggaggttgaatgtaccagtctgaactcagaagactgaggtctgggctggaaatacagacaagggagtcctcagcatacagatggttctgaagtcatgagaatggctgagattttctttttctttttttttttctgctgtagaaattaattttattcttattcagactattttcaaaagaagcagtggtgcgctgtttttctaaaaatacgcctttagagatttttatatatgtatataataaaatccatacatgtatttacatgattgctacatacaaaattacagcactgtggtatgtacacatctacaggtacattctttccacacatccctgctgtgctttccccgtgtgaaggagggagactgaatcagttgtgagcagccaagggctggcccgtcgtcggaacctccgaatgggggctggggtggaggaggtgaggcgattgccgaggcaggagcagcagctgttgcagggctctcctgcaggccagcaggcagcatctggaggctcccggcagcctccccctcccctccaccccgtggtgcccgcgctgccctcaaggtggggtggctgaccacagacccctctggtgccattctgtggcctagacttgcttggctgggccaagaagttgtgtatgtgaggggtggaggagggagctgtgggaggaatagaccctgtccagccccagccctgagcaggggaaagggctggatggctaaagcctgcagatgactggtgagaacactccgcttggcccggcactgctaagggtcagagactagaggctgggagggagagcagtggccgccggctggggaacagggccttcttcctccctggggctcagagggtggcctcagctgagcttgagtaagcccagctcttaggccctgcggccagaggcttggcctcctgccagcagaggtgcatgcacactggggaggggctgccatctccacttcaacccctgggccaggggctggggaagaaatggaggcttaggcctggcctgctgccctgtaggactaggtccccggggctcaggattcctgaggcatgcagagaagggcctgagaatgcctgagattttctagtgaaggggctcttaatctggggtccaggaacctcacagagattcattgatagaattcaggggatctgtgaaccggaataggaaaaacttttcttgttttttctaaccagtgactgaaatttagcatttccttccattttgaatgtaggcctcaaagtacagtagtagtaatatttgtaattttgtcaccagtagaaatcaagatattttcatattgcattacagttgttgctgacatctcaaaatagcatctaaacatcactacttcagaattacagtacagaattattagacctacagctagatcccattatcaaatgcattgataaagaacacattaggccgggcacagtggctcacgcctgtaatcccagcactttgggaggccaaggctggcggatcacgaggtcaggagatcgagaccatcctggctaacatggtgaaaccccatctctactaaaaatacaaaaaataagcctggcatggtggcaggtgcctgtagtcccagctactcagaaggctgaggcaggagaatggcgtgaacccgggaggcggagcttgcagtgagccgagatcgcgccactgcactccagcctgggcaacagagcgagactccatctcaaaaaaaaaaaaaaaaaaaaaaaaaaaagaacacattaatacagaagaatatatcacaatttttaaaatttttgaaaactgtttttccataaaattggggtattcttggtaatcctttgtactttaagttataccttaaaaaaattgttctgaaaagggtccataggcttcaccagatgccagaaggatccatggaacataaaagatcaagtatctttgttaataaggctagggaatgagaagagaaggagcctaggactgagccctgaggttagttaatggagggagagtcaataggggagactttctttgaagggaggttcaagaggcaggaggaaatccaagagagaatggtgttgtgtcatgggagccaaaataaattagtgtttgaaaaaggagagtagccacctatgtcagatgggtgaagacagaagattggcctttgggtttggtaagatgatgtcatgggtgatcttcataagcaatttcgctagaaggattacagagaccctaattagaacgggtagaaaggtgaatggacagtaagaaagtggaggcaaagggtatagacctgaaagtggcaaatttttttctataggggaccagagagtaaaaatttttggttttgtaggctacttgctgtgtctgtgactacctctgctttatagtgtgaaagtagccatagacaacacataaatgaatggatgtgactggttccaatgacactttatttacaagaacagatggctagctggatttggcacaccagctgtagtttgccaaccccggtatagacaactctttggagaagtttagatgggaagggaagtagaaaaatggggaagtagttgatgggggacaaggagcgtgtgaacatgtgtatgtattttaagttaggagattttagagcatgtttttgctgatggaaaaggatcttatggaggaggagaggctaacagtccagaagagagcttagctgtactaataaactcctcagaagtcaagaggggataggattaagagtacatggatgcctaaggaattgttttttatgacacttagtgttattttgagtgacatattagtgttaacagcaagactgatatggggagtttgtccctgtcacttataggaccacttaaaatgatgaactactaggagagttggtgcggatgagatttagcagctcatttacttgatttgtgggatttagagtttaatttggaattttgttgtattggccttacctgaagtaattaatgtagctaccttcacttttcttggagatacctttaaaatcttgattctgattctgattctgtgaacagaaaatcacagcaattgcaaacaaattctagctcactgattctcagtctgttttctgttgtattttacttagtacattcctatcaataacagtggctcagctttggcagttactacaaccgaggagaaaagagaggggagtatacatctgcctcaccactcctctgcctcccctactactgagaatcattgttctagaccttttgtggatactttctttacttcagggttttaaaaggcatgtttgttccttttcctggagcagttcaggcatcttaatgatctcaggcatatttcccccctcagtagcttccctaatgtaggaatgctttgccttttgcagaccccagtatagaagaaagagttcagcatattaaatcagtacatattttcatgatgagcgcagacaataaaccaggcagtggattctttcacagctttttatggtcatcaactaggctgcccagaagggagtgagagtattcaggcaattcctgtgtgctatgtgagcctcctggaacaccaaccctttttctgaaaatgaactgtcacctgtgttgaaaatgtttgctgggattggggtttatagactgaagaaggttccatctgtgatcatgcttaccatgctgagtaacttttaagactggaagaatcgagatgaggatccttaatgcatccatgttaaagaacctttgcttgactttttgaattagttgttttcatacaaaattaacacttattcacgatttaaaaaatttttcaaacactacaagggagatattaaagtgaaaagagaagtctcatctatcagaggtggccactattgtatttctggcatggatgaggtgtgattaagctcataggtgcccccatgtgtccttttccttaaagcatcaatgggatcttaccacgtattctgttctgcgacttgctttcttcacagtagtgtctttccatatcaggacatactgagccatctcattctgcctcagagctattccatctgcctggaacatgaatctggaacagtcccagattcatggctcactcttgtctagtccttactcaaatgcctccttcttaatgatgacttccttagctgctgtatctaaaatttcaaccattcccctatccctttctatcccccttccctattaatgactttcctagcatacttctgtttattgtctgttcccccattgtaatgtatactctatggtggggaggaatatttgactgtgttgttcactgccatatccccaacctttagaataattctggaccctgtagtagatgctcagtaaatattcactgaatgaatgggtgaatgattacattgtcttcacatttgaatgcacattattttttaaacaatcccctattgatggacatttaggggtttgttttttttttttttttcagttttttctactttttaaaacaatgctgtattgaatatttttatacatatatctttgtactgttttataatgatctctaggataaattcctagagatagaattgtgagtttaaaggatatacacattttaagttggatgcggtggctcacgcctgtaatcccagcatttcgggaggctgacgcgggcagatcacctgaggtcaggagttggagaccagcctggtcaacatggcgaaaccccatctctactaaaaatacgcaaattagctgggcgtggtagcaggtgcctctaatcgcagctactcgggaggctgaggcaggagaatcacttgaacctgggaggtagaggttgcagtgagccgagactgccccactgcactccaaccagggcggcagagcaagactctgtctcaaaaaaaaaaaaataaataaatcaaaaaaaaaataaatagtacaaattaaaaataaaggatatacacgttttaaattttgaataattagcttccattttccctcccttaagatgaaaggttatattaatttacaatcttgctaacactgtatgggtatcccatttctctataccaggtatgatcaacctttaagtcccatttctctaccaggtataattaacctttacgcctttgccaatccgatggatgaaaatggtatctcatcctaatttgaatttctttaattatgagtggattcagcattattgcatatattcatcttttgtatttacttttctgcttatgtcttcttttttcattgtttattgggtcattttgcttgtgtttttgcaatcatatctttgtttgctttggtacctttcctctctccaggcttcaaccagatataaccccagagaacagtatacatctgggccaccgctttctatccttagaaagtttctagggatagaactttgaaccatgtaatggagtctagtttataagtaaagaaaaaactcccaaacctgtatatgatgctggtgttagcatcttcatctcttattcttgctcacattttttgtttattagttaaaaaaaatcatagaaacccatagcaaatattgactatgttctagataccgtgtttagcattttattatctctttaagtgtcacagcaagcctgtcagggagtactagtttgtctccatctctacaattttatggacaggatatcagccatgtccaaccctttgaatgcaaggacttttttgcttatctatggtagcagatatcacctttttaaaagttcattagctagttagtgttagtgtattttatgtatggcccaagacagttcttcttccagtgtggcccagggaagctaaaaggttggacacccctgcaaaaaactgagggatggtgagattaagtgacttgcccaaggtcacatagctagtaaatggcaaaaccaggatttgagcccaggcacagtggctccagagccagccctactaaccactaagttcttttacctccagtatgagtaatggggtatgttgcccattgtctgtttcaggagacctttttgcccatctatccccattcagaaaactggctacagttgttgaagcaagggaaagctattcatgtacaggtctgggaggttttttttgtttgttttttgtttttgtttttttacttataaactagatttccattacatggctcaaagtcaaagtaatataaagaggtacttggtgaaaagtttcacacctactcttatctgttctattacccctgccctcatttctgtgtatacttcctgtttctttgtatacttacaaagcaaagtaaataaatacggcaggctaaatacggcaggttgtcaaataatgtcgttttgtccaatgtcgttttgttttaatgttgatgagaaaagaaaaatccattcctgcctggggccactgtctgtgtggagtctgcacattctccccatgtctgtgtgggttttctccgggtattcaagtttcttcccacaccccaaaggtctgcacattaggtgaactggcatgtctgaattgtccccagtctgagtgagtgcaagtgtatgtgtgatgccaatgggatggcatcctctccagggctggttcccaccttggccttgagctgctgggatggactctggccacctgggactgaataggcaggtaaatcatttacttacttgtttttataagtctttcttaaatgtatgtatagctcatatttatttcagtgtttaatattagaagtgttttggtctgtatttagaagtctggtgtttttgtgaccaggatagatcaaaggaacttaactcttgtttatgtcaattagtgcatggtaaagttggttttgttatatgtcattgtgcttaaagtcacaatttccaagaacctatcaacattaaggacttactgtgtatatgtacatacttgtacatatatgtaatgtttactcatcaaatatttattgagtgcctctttatacaaggcactgtgctggcttccaaggagtatacaaagaagcatgaaacacagaaatctctggcctcaggaagctcgcagtgtagttctataataagagcataagtaaaaataaaacatagtgtttatatgacatagtactttcttagctgattcaggcctcaatacaaagcacattcagcctgctaaaggtagtaaatattaatatgtatcttggcttttggggctaagatgagagttctactgaatcatctatcagtctctaaaatataagaaatatgtcttatttatcttaatagattcttcaggactttatggtttgaacaaatgaatctgtatttcttttaaatatagacttcaaggaaactgttttatatctttctttttttttttttttttccaaatagagataggatctccctctgtcacccaggctggagtgcagtggtgtgatcaaagctcactgtaacctcagacttctgggatcgagagatcctcctgcctcagcctcccaagcagctgggactacagatgcataccaccacacccagctaatttttgtgtttttttatgttttgttatatatgtttgtgtatgtatatatatatatgtatatatatatataaattaaaaaatataaatagagacaaggtctcaccctgttacccaggctggtcttgaactcctgggctcaagcagtcttcctgcctcggtctcccaaagtgctgggattacaggcatgagccaccgcacccagcctcttttatatcttcttcatgaacccaaaaggaagctttttaaagaaccatttttattttagagtccatccctgccttgaggagccttatcaagttggatcaaaatgaaacttgtgtgcctaatatagaactgaaggatgaggacttatctttagaaagtttgttttggtggggatcatcttttttctttattgaggattcttcttccaattacttctgccccatgggcagtaagtagaaaagagtttatcccaattacaatataatattttagagctatcagcaagctaccttcaatttatttttttatctcagtttctgtgtattacaacttaattctgttaaaagacatctttgttcagaatccctccagtagttctagacattccagaatccgtatggaagaagtatggtgtagtggttaaaagaataggctctggagccagcctgctcatactgaaattctgaatctgccactttctttctgtgacaggttactggacttttatttattttcactgcccctaagtagatgtcttaaatgttagagatttgtgaattaattaagtttattctccccactgagctttagagccatggacaagaaccaaaagatgaaatctagcatcttatatttacctaagcacttttcatcaaagacagtgcatgctaacatgtaatatgcacatactacatgcatagaacacatgcactaagtatttccatgcatttttgtatgatgcaaagtagtattcttctttgaaggaacacgaatcccaaaggaaaaaagccaaagttaaaggttacataagagctagaaggagtaaggaaacatggttttctcttgcttcctgcccatggctgccaaacggttctctgaagactgctatgtgacagaagccctttcctttgaaaacctgtcacgtcacaacaagaaaaagatctctttctttggaggtacatttttgggcacaagaaaggctttttaaaatttttttggccatctttttcattgtaggagtctggtgcttgctgcctagtttgggagtagaggaaaagactctggctctttagggggatagagatgggaaaggagcatggcccagctgggtgtattagctctccctccgctgcacttctggaacctttcatataagggcttcaggataagggggttgcatagctttagggtcttatggacatttggaccatttgcttcataatcattttgaactgtttccttaggctctttattgagaaactaccaaaacatcgagattacaaatctgctgtcattcctgaaaagaaagacacagtaaaggtgggtcttcactttcattgttgcccatctaaaagcttcagagcagcacagactgacttcaagataaaagtagtagtctctgcatctgagtaccagatcctgcaataggagataaggccatttcaccacaacagttctgaagtagcaggtatggtacagtagggggtattttaaatcattttgggaaatgttgcagtcaccaacttgacttaagtcttcttttggattctgtaattttctggcattgttctaattctattttctgttttgtgtctcagaaattaaaggagattgcatttcccaaagcagaagagctgaaggcagagctgttaaaacgatataccaaagaatatacagaatataatgaagaaaaggtcagtatataacagctaagaagaaaattattttgcttttttaggctgtgccctgggattgtaatatgacatttcaatatatcctgtgcttttaatgtgctgtttcaccttttttgggcaaagaccagaaactcaaaaaagtagaacaccagtggttaggctcagggttgtaacacagatatagcctatttgtcgaagagagtgacttgagggacagaaaatctgtcgcctacctgctatgtctagagtgagaatcataagaacaatgaacattctctccaaaacataggtttttagatcagagaatttgagggttggattcacatttggttatacctgaagctatttataagaattgacttttcaagctattttttttttttttttttgagacagtctcactctgtcgcctaggctggagtgcagtggcacgatctcagctcactgcaacctctgcctccccgactcaagtgattctcctacctcagcctcccgagtgactgggactacaggcatccgccaccatacccggctaatttttgtatttttagtagagatggggtttcaccatgttggccaagatggtctcaaactcctgacctcaagtgatccgcctgcctcggccttccaaagtgctgggattacaggcgtgagccgctgcacccagccatttcaagctattttcaaatgattctttttaggaagtcagttaaaacatgtggagaaactgccagggcgctgtcagtggccagctgtgaatacatactgcagccactcacaggctgttgtgtagctgtctgctggtctctattctggactctgatgttgaaaatcagcagagggatgaacagctatgaggtatatacttctaaagcaccaagtgagtgtaagctttaaggaggaggttattacttagcatttctttctttctttttttttttaatccaaatgcctctcaagtatttcttattagcttaaaatgtcactctgtgttgaacaaatgcacaaaaaccataaaaatttcagaggcctcattttgggttaaaattcagtagaaggcaagacgtggtggctcatgcctgtaatcctagcactttgggagcctgaagtgggtgatcgcttgagcccaggagttcgagaccagcctgggcaacatggtgaaaccccatctctacaaaaaatacaaaaattagctgggtctctacaaaaaatacaaaaattagtgtggtggcacgcacctctggtttcagctactcgggaggctgagatgggaggatcacctgcgcccagggagattgaggctgcagtgagccatgattgaccactacagtccagcctaggtgacagagtgagactctctaagaaaaaaaaaaaaaattcagtagagacccccaagatagcaggtataagtttggatctggttctattttatagccttacttgaaatatagaatatgtacatgacacagagagaagaataaaactgtctgtgatacaggttaggagaacacagatagtaagttgcatcaagatttcaggccagacattgtggctcacacctggaatcccagcgcttcgggaggccgaggtgggcagattgtttgagcccaggagttcaagactagcctgggcaacatggcgaaaccctgtctctacaaaaaatacaaaaattagccaggtgtggtggtgcacacctgtggtcccacctactcaggaggctaaggtgggaggattgcttgagcctgggaggtcaaggctgcagtgagctgtgatcatgccattgcacttcagcctgggaaacagaatgagaccctgtctcaaaaaaaaaaaaaaaaagatttcagtgaagaggaaagtgcattaggtagagtcattgtcgggagggtattgagaggattgggattttaattgtccttggagataggtatactgtggccagatagaaaggggtggtgactacactccgtgggtataaagatactgaggaaagcatgaattctgtgttaggtaatcaggccacagcagaagtacattttggaaatctccatgctaaaaagccttgttctcctgaagtgtgaagtcactgaggtgtgaagtgttagcctaaattttctctctttgtagaagaaggaagcagaggaattggcccggaacatggccatccagcaagagctggaaaaggaaaaacagagggtagcacaacagaagcagcagcaattggaacaggaacagttccatgccttcgaggagatgatccggaaccaggagctagaaaaagagcgactgaaaattgtacaggagtttgggaaggtagaccctggcctaggtggcccgctagtgcctgacttggagaagccctccttagatgtgttccccaccttaacagtctcatccatacagccttcagactgtcacacaactgtaaggccagctaagccacctgtggtggacaggtccttgaaacctggagcactgagcaactcagaaagtagtaagtgcatttgctgatgtcctcttccttctcagttgcagccaaacagtatcattctgacggggtcaacctaagattacctccctgatcccactcattaagctttggtcacagaaacccatctgataagtattgctgtactgtgtcctaatacactggctatgttataaaagtggcctttgctgaaacctagtctggtcgattttctgaagagctaatattattcttgaaagtcagactgtcaactttttagtgaaaggaaaagaatgtgccaaaccgaattcataatcctcagataacatcatcagactgctgtgtgactctgtgtcccctgctctgactttgttacctctctagcaattcagatcttgctgttgaatacgcaaaagcagaacatctttcccctcccactttttttttttaaatatgaaaatatagctgtgagagacacttcctaactttagcttgctggctgtctcacagagtttctccatggtgttcagaaactgggtccattcttggcattttttatgagctgctttgttcatgccttttttgggggactacactgtattttttattttgttgtggtttggcatttaacttcttccagaagagtaagttcagaagtaaataactgcccagattgttttccattctcaagaatatacaccagtgtatttcttttaaagtcatactctgatattcttatctgagataaaagagatttaaaattaaaagttcagatgaatgggcagtgtcttagtccattttgtgctgctataacagaatacctgaggctggataatttataatgaacataaatttatttggttcatagttctggagagtggaaagtccaagacccaggggcctggcaaaggccttcttgctgcgtcatcccacgacagaagggtggaagggcaaacaaagatccctcatagcctcatcacctcttaaagatcctacctctcaataattttgcattaggaattaagtttccaaaacatgaactttgggagacacagtcaaaccacagcagggaggttatttttttaattctttgtattagattctgacagaaaattcccaaatgtttcaagaacttgtgtctttttcccccctaaattttattttttacttttattttttaagtttttgtgggtacatagtaggtgtatgtatttatggggtacatgagatgttttgatacaggcatgcaatatgaaataagcacatcatggagaatagggtatccatcccctcaagtatttatcctttgagttacaaacaatccaattacattcttaaggttatttttaagaaaacttttcttaaggtagtagtttgcccttttcttaacttgaataattaaagcctactattttctcttcttgaagtaatgtgctccttacagctgtggcccaagattggagaagacactttacagccctttttttggtgccattagaatgagatccctactcactgcctgaagttgggggaatcccagtggcttaatgttgctcctccagggctgctggctgtgaggtctgcttgaggaggcagggctcagtggtcgcagactattctcctttctcctttacagttcccacaatcgatggattgcgccatgtggtggtgcctgggcggctgtgcccacagtttctccagttagccagtgccaacactgcccggggagtggagacatgtggaattctctgtggaaaactggtaaaaagaaaaaaaaaaccaaactcttctctgaaccgaaactgtttcttcccctcttggcatcctgtgactctcagagaaaatatccagggtcagttactctttgtaccaaggaaccgtggactgcataatttcatgtcactttgaatttggtgaccctgtattgattgattgaattgaagtggttattttaatgctagtagtaagaaatacctaattttaaacttggtaggaagatccagtcattatctacatatcaatttttttggtacctactttatggtaggacctgggaatataaaatatgtaaagcacatagtatgtgtccacgaaaagtgcccagtcactttggagagaaggcagacatgcactaaagtctaaccagcatgctgaaaaatatgtacagtataagtattgggaattttgaggaaggaaaggtcactgaatggaggcacttaaagaacccattactgctgaatgaataaataaatgaagtagagtaaatgtaagccgaggcttacaggatgagaagggcttaaggaaacagtgacaggacaacaactttagacctgagcaagggaagagaaatggtactctacccagagcttctcagcagagcagtttggcacagcaggaaattccctcagggctgtggtgtttgcccaggctgcagagttctggggttggtctctgcatctgtcgctgtacagagtaccccaggcaatgtgcatcagcagccaaggttgtgaaccactgagtggcaggactcctgctgtgtgggaagggctttcacttgtatagatgcttacctttccactgtcgggatggagtggagcagggttgcatgagcaccagggaattgtgaccagctgttttctcctttggcagatgaggaatgaatttaccattacccatgttctcatccccaagcaaagtgctgggtctgattactgcaacacagagaacgaagaagaacttttcctcatacaggatcagcagggcctcatcacactgggctggattcatgtaagcaattctgagctgtccgagagttagtctctgcctctcccatggtggtataaatacatgagtgtttctttgaacaaagtcaattatatccagattatttattgtttttctctcttttggatgcagtccttagcatacttgactattgcactttggtattgttttctgggaacacttagggcttttaaatttttttaactttttatttattttttagtaaaaataaactgttttccctaaagttccagtttccctctgagtgtaactggtgatgggatgctggcctagaatataagtggacattgaccttagagactatgcctactgtgtacagatgatgttccttaaaggtatataattcaaaatattttaaatgagccaaggaggttaattcagatgcttgcatttggtctttcttaaagcacctttatataaacaagaagggctataaatacacatgattttcaagtgtctgcatatcttgtgcagccttctggtaatgttcaggtaaaatataatgccttccctaaagattatttttaaatttttctttctattccttttcaacccctcactctcatagcccaagctgcattttatgctgtatgacagagttacaaataaattggcttattcttggattacacatacttgtatgccagaatttgggaaagactgacctgtgaggcagtcccatgtgccttctgtcctttcttctattcaattacattcatgttgatgatttgcctattattgtgtatccccatcccacccccattgtagtagatgggggagagaaaacttgttccttatctgccagggcatacaaatttgagtaaggtatgattttagcctcatgaaggagattaaataaatagacaattaataacttcacctggggcagaacgtgctaaaggccacaagaggtgccagcgaggcactgtggaattcagaggaaggagggaccatgcctgatagggtttagtagaatgttggcaagctgggccaagggcaagttccttaaggagcagacaggtggagaagaggcggactctgtccctggagcactggggggaccagttcactgagatttatggttcatatcaggaaacagtggtagatttttttttttttttttttgagacagagtttcactcttttcacccagactggagtgcaatggcaagatcttggctcactgcaacctccacctcccggattcaagcgattctcctacctcagcctcccaagtagctgggactacaagcgcccgccaccatgcccagctaatttttgtatttttggtagagatgggatttcaccatgttggccagactggtctcgaactactgatctcaggtgatccacccgcctcagcctcccaaagtgctgggattacaggcatgagccaccacgcccggctagatatgttttaatgtagtacattggagccgagttctggagggtctggggtggacaggcagaattgttccactttttagtaagtggaaaattcctaaaggtttttgagtagagcaatgatatgattaaagccatactttagaaaatttaacataaatacagttttaaggtaggttgtggcaaggagatgatttaagaggttagtgtgctgataaagcctaataatgataagagctagggtgatgctagtgtgtttgggaaggaggagatgaatgtaggatttcagaggatttgggaaatgagtaatagaggatgatgactcagagtcaatggtgactcagagatttggggccttgcagtgatcatctcataagcaaaagtaggggatccaggagaaggatttggtttgaaagtggggttcagttctgagcatgttaaatttcaggtattgatgagatattaaatcactggaggtagttatcagccagttggcaatgtagggctagaacttgggagcaaagtcaaagcaggagagagggctctgggaatccactatttagtgctgatcttggaagccctggaagtaggagaagagtctagagcaagaaaaggttcactggcaacttgggggacaggctacctaatgtaacatagaatgtagttagcaatggagcaaagagatgtatgaaaaaggtgagggtagtggtaaggcacagaagccataggaggaggaaggctcttttgttttgttttgtttttgagacggagtctcacactgtcgcccaggttggggtgcagtggcgcaatcttggctctgcaacctccgcctcccaggttcaagtgattctcctgcctcagtgtcctgagtagctgtgattacaggtacccgccactatgcctggctaattgtgtgtgtgtgtgtgtgtgtgtgtgtgtgtgtgtgtatttttagtagactgggtttcactatgttggccaggtgtgtgtgtgtgtgtgtgtgtgtgtgtgtgtgtgtgtatttttagtagagactgggtttcactatgttggccaggctggtctcgaaatcctgaccttgtgatcctcgtgattataggcatgagccaccgcacccggccaaggaaggctttaagaaaaaatttccagatgttaaccatgtcacatcctatggagagctccagaatggtgaagactcggatcggcctggatttgatgaaattattgaggatctcgatttagtgtgttttaggcattaatgggagtagactgtaagagtttaagaactcatagggattaagtttgtggagacaatgaagtatacactaccattttgagcaacttagctctagaggaaaggagaaacatggaatggtggtttaaggagaagttgggttgagagaatgtttggttgattgttcaaagtgaaaggcttgaacatgttttgttttgatgaaatataacacatgtaataagaaagcacacagaaactaaatatatactttaggccgggtgcggtggctcaagcctgtaatcccagcagtttgggagaccaaggcgggcagatcacgaggtcaggagtgcgagaccagcctggccaacatagtgaaaccctgtctctactaaaaacacaaaaattagctggacatggtggcgcatgcctgtagtcccagctactcgagaggctgaggcaggagaattgcttgaaccccagaggcggaggttgtggtgagccaagattacgccactgcactccagcctgggcaacagagcgagacttggtcttgggaaaaaaagaaactaaatgtacactttaacaaatcattaagcaaatatctatgtacatacactacctaggtcaggaaacagaacactgtcaggagcatgcatgccctaagggagggaagtcctcccttccttgcttcgtttataatttcaccacttcaatgtgtatctctaaacactatagtttacttttgcctggcttttacctttttgtaaatggagttataccatatgtatatttgtgtcttgcttcttttgctcaacattttgaaggtttatccacattcttgtgtgtagttttctgaacatgttcttatgcccaatgagccaacaatggagatgtaaaagggcaggagagacaaggtaatgtggtgataaggaaggatcgaatgagaagtacatagagggattcatcttcacagggggaaaaacatccattcctccaagacaagattgaatgaacggaaatgaagatccagagagatttttgaaatgatgtctggaggagttgaggaaacacgttttagacaatcttgacctcaataaggttggagtctaggtctgctgttgagcaagagggagaccaaggaggaattagaaactggaggagatgggggaaagtttagaatcattactgtacagacttcaggtagaacttagctacaaatgaataaaagagttttaagtatcagtgagggtccagttgggaacagatttgaagcctaaattgatagtagttcagcttttttatttttattttttgagatgaggtctcactacattgtttatgttggaatacagtggctattcacaggcacaatcatactgcactacagccttgagctcctgggcccaagtgatcctcctgcctcagcctcctgagtagctaagactacaagcacacaccactgtgcccagctagttcagctttttttcctccatatttctgcaccattccttcctaattcgggattaaaaacaaacaggctgagtatggtggctcacacctgtaatcccagaactttgggaggccaaggtgggaggatcacttgaggccaggagttcaagaccagcctgggcaacatagcaagacctcatctctataaattaaaaaaaaaattatgcatttgtggtggcacacgcctgtggtcccagctacttgggaggctgaggcaggaagatcgcttgagactgggaggtcaaagctgcagtgagccgtgatcacaccactgcactccagcctgggcacctgggcaacagagcgaaaaccctatctcaaaaacaaacgaaaagcagaccgaaagatttattcagatcttaaaattggccagaggaaaatgcaaaagatcagttcttccttcttaaccttgtcaactatgaatcagctgcccaggtcaaaagtatggttatggattgatcaccaactgttgtcaaacctccagcccagaactcaaggcactcctcatcatgtttcagcgctatctgagccatttccctttagggaaaatttccctcttaggtacccaggctgccttcagcattcaccctccttgctcatttctgctccttcggtatattgttttctctttgtcaaagtgccttcctctatccccagcagcatgggcacagtgaacataatgaactattcattcaagaaacttgactgtgaaaggaaggagggagagaaggtacagtagttagagaggagcaggggatcatggcaaagttttttgattctgtttaagagttgtttactgagtccctgcttatgtctctttattatctttctggctacccacgtttgctcccagttagaatcctggactctaaccatgggatggaaggtggtgttggcacaggccactgctctttagcagcctaaaggattatattctcatcaggtagaaactttgtggtcactgaagtccttacatgccccatgaagacttgtgtgtggatttgctgcctgcactgagctaacacgttcctgtcctgaaggcttcttccacagtgagctcatcacagcaccctgtggaatggtgcttctcagatgaggctgcacataagaatcacttagtgagctttcaagaaaaatgttccttcatgatggttctttctaggagtggggtgcaggagtctgggcttttgtcaagctcctcaggagatttgtttttttggacagcaggtttgaaaacgctagtcaattgcatgtctttattgtctgtgcttttctgtcagtgaaggttggttgtctttttgaatcatgctagatctttttccatttttgttacctaagatcacacctcctctaagatgaacataagtcattatatagttgtctgttttgtatataaaatatgtgcttaataaaacaaacaatggaaacaaataatcgggatgcacatttaggtgatattttaactgattaacctcaaattttagcatcgtgttctccttccaaacagaatggtctcctttgtatggtttaactatcaactgaaattcaagtattcccctacctcccatatcttccttggatgatgctttagctacaggacagcctttgcctatagaacctgattcatgtttgaccttttaacacctctgtgggagagaagaatcattcatctaattgtggtttactaagtccttgacttccaccatgttgaaatattgggtatgtaccatctgttccagaatgggtgactcagtggtatgaagagaccttgtaaggaaccaaataagtcttgatggtcagttagaaattatgagtctcttgaaaaaccaaagcctgaatcatccagagagaaacacttcttagaggagatagaagaaattccctagcaaaagttccaagggccactgagtgccattcacaattgttgaggacacccacctaccttgtccatggatgcccatcatgacaaccccattaacacctttgattccatggatccctgggtgaatccaacatcatagtccttgagttcttccaatttggttcaagaacaggagagctagagcaggaaatatcaacaaacaaccccctcttctgtctccaaccctgagatgcaaatgtcttttcctgtctccactcctactgtctggtgatctttgtgcagcaggtatgtgcctgaaggaggtctccaagccagtttctgtgtgctgtcatctgagatggggttccccttgccagttctcacaccccacaagacccaccatactgatctcctggctagcacacaccaaccccagggaagccttttcttcacacttggaacctagatcttgatttccttttgtgaggtcagaatttgtttaactggaatgtggcacagcattgaattcttctgccttgtctattccagcctcagaattctgtttttctcccactttgcagtggtctttgagttttaacactgtggaacagtatctttccccgatgatgccccagatggaaggtttgagttctgtccctgggtcctctccataccctacctgtttaatggcccgatgtcttgatgccttctcgcatcaaggctctgcgcctacagtccttcatccaaccaggaattccagaacccatcaggtaccctagatcttctgaaccagtgggatcagagtccccgttttgagtagtacagagaagaaagttccccctttgtgtttacctccctttttgtctgcctactccagttcccccttccccctgagtgctcaagctgcctaacatcttccactgccttcaaacaagggaagccagaaagttccaagcctcttcgtccacagtttacttttgtccagtacagccttggtgacctctgggagctctctccctgagaaggttgtctgagtgaattagatgaaatgtggtgggtgggttatttggtatgtcatctataaccatgagctaggacggcatgcgcttgcctgggcttaatgctgttactttccattagaaaaagatcaccttatcattcatcagacactctacagaatctcagaattatggttctgcacaatgtaagtgagggcatacatccacctacccaggaactgaagtggaatctcccccaccccacttgtggcatctccccacgattgctcttcagacaaatcctcatctgtttagttgtcattctgctggggacaatgcaatctaagttatttcatttagttattttcatccccttcccctctctcattgtatccttcaccacagacagctcttccagtttccaataattgtttatactccttatttctttttctttttttttgagatggagtctcgctctgtcacccaggctggagtgcagtggcgcgatctcggctcactgcaagctccacctcccgggttcatgctcttctcctgcctcaacctcctaagtagctgggactacaggcgcgtgccaccacgcctggctaattgttttgtattttttttttttttttttttttttttagtagagacagggtttcaccatgttagccaggatggtcttgatctcctgacctcatgatctgcctgcctcagcctcccgaatagctgagattacaggtgcccgccaccacgcccagccaacttttgtatttttaagagagatgtggtttcaccatgttggccaggctggtctcaaactcctgacctcaaatgatctgccctcctcagcctcccaaagtgctgggggttacggacataagcctccatgcccagcctgtttttgttttttctttttttaattgacaaataacaatagtctatatgttttgaaatatgtatgcatatattgtggaatgggaaaatcaagctaattagcatatgcattatgtcacatacttttttgtggtgagaacacttgaaatctactctcttaagcagttttcaagtgtataatacattgtgatgaacagtagtcaccatgttgtatagtaagtctcttgaacttaaaaaaggaaagaaattatgagtctcttcacatactggtattaagcaatatttgtttacagtgctggaaaggagcttccttacttattaggaacctcaggtggacctctcatggttgcagatggcttctcacttacaaaggagattgtgaccagctgttgagaactgtttggctttacttccttcagagaccagacttggttgtatgtcagagtagtcccccccttatcctcaggggatatgagcccagaccccccaatggatgcctgaaatcacagatagtaccaaaccctatatatgctatgtttttttcctatacatgcatacttgcgataaagtttaatttataaattaggcacaggaagagattaacaacaactataataaaacagaacagttataaaaatacagtgtaataaaagttatgtgaagatgatctctctttctcaaagtatgttatcgtatgtaatattttcagattgcagttgatatggatagctttaaacctcagaaagggaatcgcaaataaggagggattaccatatatcctcgctaagagtcctctgactctttttctctcctcagactcaccccacacagaccgcgtttctctccagtgtcgacctacacactcactgctcttaccagatgatgttgccagagtcagtagccattgtttgctcccccaagttccaggagtgagtatagagggcatggttctgggtgtttcaagggggtagtagggaagaaagcctcaggggaaaaggtctctattcttgtggacttgtcctttgtaaaatacatagattataatgtaagttggttattctaaagggcttccttttaagccccatatcatgatttatctatcatgcttgttcaaaaagatatccaagtaacaacttagttgcttttctaagaaaagtctacaagaaatttgaagtgtttgacttgaagcgataggaatgtcaagagttttatgttggattagaaagtttcaaaatcataaaatataaaaaaataaaaaataaaaaataaaaaaatataataaaaaaataaaaataaaaaataagaaagtttcaaaatcaaacacattatctcagaatgcacttctttttcataccaaatcctgtctctactcccactttgattatttactatgaattctccagcaaaactagtgtgatggcagtaatgagtcattctctaactgtgattcattcaccagagaagagacctgtgaggcagcatcctacagaagctgtctcacaatgacctctgccctgctgtgtgagtgtgcatgctggtgtgtgtgtgcgtgcatatgtttgggatggagggacacctttgcttgactcttagcctgccttttttaaatttcagaactggattctttaaactaactgaccatggactagaggagatttcttcctgtcgccagaaaggatttcatccacacagcaaggatccacctctgttctgtgtacgtatctatgtaaaagaaaatggggctatgcttcaagcagggaggacagtcagagctgatgaaatgcatcatcctttctgatccacacagaagaccagctttgtcacttaccttgccagatctccataataaggacgtacatgagaagcagtgtgggacaggaatagatttgaatcttagctttgccactgtgtgcctttgattgggctacttaccgttcctgggcctcagttttcccatctataaaataggcataataataacacctactttatagggttcttgagatgattaaatgaagtaatgtgcaggaagtacgtaatgcagttgctggcttattaaatgttactttttcctttcatcaatgtctctttctaagcctgtacttcaataagagatttgaaggcaaaggaaaagagaagccacttcagataggtaaattaagtatatttgtagaattttgcttaaatcataggggctttacgaccttcctacaaagttcttttttccctatgttgtggtctgtgaataaaaagtttagttgatgataagatcagtatgtttccatttgcccctgcaagctgatttgatggtgttgcattactccatgctggccatggagtattatttcttttgggttcagagaaaagtgagcaatatggaaaagggactaagaaccttgacacttaaaaggacctggagatgcttagaagagaaaccccaggaaggatctgagagctgatttcaagtgttagaagagttgaagtataaaaaaagggattgggtatatttcacgtcactcctagcactaaaacaaagacttcatggaatgatggttttctgctgagcgtgaggaagaactttctgacaaatctgttcaaaaatagatcagtctgccttggaatgtctaagtactaggatgttgaaacaaagactacacaatcagaaaaaaaggtctggggcaccagtgcccatgttttcagttataaaggcccctgttgcatgccaaaagggagcattcttctctcaccatgtgacagtaggtatactttattatttgggtgacatcatagctaaaaaaactgtgatgaattcagtaattcttttaaattaatatatattttagggatgacactatttgttcccaagtttaggaatcaaagaatgagtctagaatgtatatacattttaaaaataaacaaaggtaaatgggcaaacactgattccatctacaggtgggactggtggtagtaatgagtcccagactcttaccacaactaccacttaaatagcagtctggcttccagactgagaaccactagcctagaatgaacattttaaataagggtttttttgtttttgtttttgtttttgtttttgtttgaaacagagtctcgctctgttgccgggctggagtgcagtggtatgatctcagctcactgcagcctctgccccccaggttcaaacaattctgctgcctcagcctctcgagtagctgggactacaggtgcgcgccgccacaccgggttaaattttttttttttttttttttttagtagggtcagggtttcaccatgttggccaggatggtcttgatctcctaacctcatgatctgcccaccttggcctcccaaagtgctgggattacaagcgtgagccaccgcacccagccaaaaagtggttttttaaaatgacttttcaggccgggcacggtggctcacgcctataatcccaatactttgggagactgaggcaggcagattacttgaggtcaggagttcaagtccaggctgaccaacatggcgaaaccccacctctactaaaaacacaaaattagccaggcatggtggctcgtgcctgtaatcccagctactgggaaagctaaggcagaagaatcgcttgaacccaggaggcgggggttgcagtgagccgagatcgtgccactgcactccagcctgggcaacagagcaagaccctatatgaagaaaaaaaaaaaaaagacttttcagaattttctaggactccacctttcttttttcctattgcagagctgcagccacgtgactgttgtggacagagcagtgaccatcacagaccttcgatgagcgtttgagtccaacaccttccaagaacaacaaaaccatatcagtgtactgtagccccttaatttaagctttctagaaagctttggaagtttttgtagatagtagaaaggggggcatcacctgagaaagagctgattttgtatttcaggtttgaaaagaaataactgaacatattttttaggcaagtcagaaagagaacatggtcacccaaaagcaactgtaactcagaaattaagttactcagaaattaagtagctcagaaattaagaaagaatggtataatgaacccccatatacccttccttctggattcaccaattgttaacatttttttcctctcagctatccttctaatttctctctaatttcaatttgtttatatttacctctgggctcaataagggcatctgtgcagaaatttggaagccatttagaaaatcttttggattttcctgtggtttatggcaatatgaatggagcttattactggggtgagggacagcttactccatttgaccagattgtttggctaacacatcccgaagaatgattttgtcaggaattattgttatttaataaatatttcaggatatttttcctctacaataaagtaacaattaacttatgtttttgtgcttcagagtgatccatttgatcaagcattgtataaacaggttaaaaaaaaggtatggttgttttggaaaggtgaaggaaaaatggaatttgagatatactgacactgatggtgtgtcccagttcacttttaattactccttgttttttatctgcctgttgccatcttccagaggtgttgtgaagtcatctctgttcttttggtgctgtctcaaatgggtcaaccattcacttcctccttatgccctccatgcttttggctgaggataatgaagcctttgtttggagtaccaggttacactccaataaatgattacatttcccagccaccccaccctaccaatttcattgtgttggctgttcttttctgactaaggcaatacctaggaaaacgcttgaagcagcaattgttactgcaattttctgtgagctgagcctggtgttctaggtggcctagaaataatggtgtcatttgtgacacctcgagtgagggcaggagagtaaatactttggctaggagaagagtgatttattctttatcagaattctaggtgggggagggagaatctgtgaatgcataaagttttcttcatttttaaattttgtctcagtctttattgcttaggttagtggtccttgaacttgtcccctgaaagagcccagttctctatattctttttcttctcttgggttcttaattccccatatagtggaaattccttctttgctgttttggtatgggtgggtctgggggccagctgggcttggacaagccatttcctgctgcagcccagagcagcctggctgttccaccttgctctaaacagtcctgaaattgcccagtcctctgcttttgggaaatccatccccttcttcccattctttgtctaccacttagcttagggctttcttaccttttatttcgactgtagccgttggcttttaccaagtctctttgtttttagcatttcttcattccagtctgttctgcacactttgatcaggagaagcttctcacattccagccatgttcatgttttctctcttgctcaaaaacctgcaatagcttcccattgctgaaaatctaaatttagcttttagtcagaactttccacttaaagttcttacccctggctatatattcaaatatctagggagcaatttaaaaaatactgatgcctgtgttctaccccccaccaattaaagctgaatctctagggtggagcctcagatgttgtttctgcatttgtctttcaagctgctagaattctcaagtacaaccagggttgacaaccactgcattggtctttgatacctaagaattgtgagctctcttatccgtctctgcccaccaaagacattcagccaggtcaacaacatatcatacgttgcaaccacattgatcacagactgatcaccaaactgctatattttcttttctcttcctctaggcacaagatatcttagtggctagatgggtgcaggaaatcagtctgtagatccctcttcatatctgctgcagcctagccactgcagaggcactctgcataggatggtctaagtgtctctgtcttcatcttacctctgtggaggagacgtggaatcaagccagcccacaagccctgagactggataggccggagagaaagaggagtagccagagcggtcgggaaaagaggaaaggaatactgtgggtaaaagggacaaagaccacgcaacctgaggaaagacattgtattgaaagggtaatgactatttggctaaagggactgactcctgggttcccgaggctcaaagaccaggagacttttccactcttgcaagctgcacaagtaccatacttagtgttctgggctgagaggggagacaaaagcatcgtcaggttgccaaacaatgtcccagttgccctgggaggcacaaacctaccaaagtgccataggccaggtgcagagagaatcagaggagctgatttgcttggggtcagagcagagctgggttttttcagatgatcactttcacatactccttgttaaatgggaccaaaggggaagaagaagaaacccttaagcttttgtaatattgtcttgggtaccagataccataaaaggcagcatgagagaaacattcccttgggccagtgtcatggtggattttcttgcttgagaggcaaggatttcagctttcatttggtaccacagaatttaaaattgtaagtgcctatcccttttgactgttgatggcttctttggggttttagttaccccagttgaaagagaaatttttcatattggggttgagaagaatggaggctattaggagcaaagctttaatgagtgaaagtctggtgaatcctgcaattttgatatgtttccagtggattttgagaacacagttttaggaccagagtagatgttgttccctagaaaatagagtcagctattgatattgtgcctcccatccctcatatctcagtgttttaaccccacctgagtttggagaccagtttgtccaaggatctttcaaacatgtgagcccagagtagaacttctgagtcaaggatcatgtctttttctgaggagctttgcttggggcactggaaatcctgtttagatcaggactattggaatattatcctctccaggggaagtgccaggttgaacatttaaggctttgcttctaggcccagctatacattcaccagcaaatcacttaacttcctaaatttctttaaaatctgtaaaatgggatcagtctaatatgcctacctcaaatgatgacagaatgacatctatatgcatatgaggcctacgttagttgaaagatgctataaagatataagggatttgttacttgtctttcttgaaatgttacagttggggtgcggttgcttctatcttctggacctctgcccattcagcatacagctagaggaatctttgggcagatccacattctttagcactagctaggctttgactccaaagctatctggtctaccttgatgttctgagcaggaaaactgaggacctcaagaaccattccaaatttctactcattctccctaagacccagagcagacccaggacctaaagaaattacatcatctctattttcccttggctccagcccactcttgtttgaacctcccacttttgttgttccaactacttcttgagatgaaggaagggcagaacattggccctcttcactgaagtcttcaccccttaatccagggttcaatttttagttcaccttagcctgtttgagattagaagctgggccttaacttacaggtgtgtccggcatcattcaatcagcctgttagatccagaatccagcactgtgacgctacataaccatgggctctgtccttccagttcctttagtgccttccctcactggtaggttcactctgagggcttccttccttgaactccagtggcaactatagtctgtttcccacaatttgttgtgtgtgttttttgttgttttgcagcgttttcatattgtcttttatgtaagtcatgtttctgaactatcgtataaatttcattagggtaagaatcatgtttgctttatgcactgtgtaacatgccttgcagtcagtataggcacttaaccttattgatcagttgttccttggtgttgaataatgtgttaggtagccaggtggacctgtgtcctagcctggagaagctctatgtcaccttgtaggaagccatctgaatttgactcagcatcatatgctgggcctgtgctgcacttgagctttctttccagccgccaggagggatggttgtcctggccaacagcgaatttaatgggtggtcaaaagaagatgtgcctgcatagaaggctgaaagagggagctggaagtaggaggagacaaggagatagtgacaccagtatcttgtcacagaaatcaaggaaggcaacagtttaaaggaggggagggagatcagtggtgccaactggctcagaagaggtttgctgggttaaatctcaagatgagcccatgagatctggtggttagcagaggcctttcctgacaaccccattttaagcacctcttccccatcactctatctcatcactgttactgtctgtgtagccctgtcatgagctaaaatcatcctgtttgtttattgctagcttatgtgtctaaagtatactccttgagaacagcaactttgtctttttcacctttgtactgagtcccctgacatggaataagatatgaataaatgcacagacttgtccaaaatcatccaattaataaatggtaaggctttgcttttttgggagaagtgcaacaaatgtgagcacattttaaatattgatgtttaaagattgtgaaaattaaaaattaacaatcagccgggcatggtggctcatgcctgtcatcccagcaggaggccaaggcgggtggatcacctgaggtcaggagtttgagaccagcctgatcaacatggagaaaccctgtctctactaaaaatacaaaattagccagatgtggtggcacatgcctgtaatcccagctacttgggaggctaaggcatgagaatcgcttgaacctgggaagtggaggttgtggtgagccaagatcacgccattgcactccagcctgggcaacgagcgaaactccgtctaaaaaaataaataaataacaataatagaaggttacctctagaagaaaggcaaatgagaaaaactacatatataatcattcatcttttatttagagatgaacgataatacaatatcacaaattaaaatttctgtaatttctacaaattatacagagaaggaaatttagaactctaaatgctttcattatttaagaagaaagaatcaaaagatatgaattaagcatcggactcaaattagaaaaagaataataaaatatactaggaaaccagggggaaagaaataagtactaaagcagaaattggccaggtgcggtggcttacgcctgtaatcccagcactttaggaggccgaggcgggtggatcacctgaggtcaggagttcaagaccagcgtgacaaacatggagaaaccccatctttactaaaaatacaaaattagccggctgtggtggcacacgcctgtaatcccagctacttgggaggctgaggcaggagaatcgtttgagctcaggaggcggaggttgtggtgagccgagatcacgccattgcgctccagcctgggcaacaagagcaaaactctgtctcaaaaaaaaaaaaaaaacccagaaattaagtaaatgacataagtcatttttatgagcacaatctcataaattgtgtacacacacacacacttcacatcaaaatcaataatatagatgcaaaaattctaaatagaacactaaaaaaatcatcaatctagtaaaggaataaagtatcctaactgccagcatgtattatgcatcctcatgtaggacttgcccatgattccactgctagaaagtgatgagtcggatggcagcccaggtctacctgactctgagagccctgaggcgtttggtgatttttgtccctagaatgtaatggtgacctcattaaaagaaatccactgatataatatatcacaggagtaggtcaaaggaaacaagcagaaacaagagtctctcataaaaaaaaatttttttaagatgaaaatcaacatttattttttattttttaaactcccctagtaaggaaagaaagggccaggcacagtggcatacatctgtgatcccagcgctttgggaggctgaggtgggcggatcacttaagcccagggattcgagaccagcctgggcaacatagtgaaaccctgtctctacaaaaaactagccaggcattggtgcatgcctgtggtcctagctacccagtaagctgaggtgggaggatcacctgagcccagggaggtcaaggctatagtgagctgtgatagcgccactgcactccagcctggacgagggtgagagaggccttgactcaaaaaaagaaaaaaaaagaaagcaagaagcttcgttaacatgataaaataaatcttctaatatataacacccagcgtcatacttaataagcaaacactgctgtcagggacaagatagatccattctaactactattattgaacagtgtcctgaaaggataatctaaccaatgcagtgaagcaggataaagagtatactactggaaagcagacaggtttgggctacaagctaagtatctacctagaaatctgaagataataaattctgaaaaatggtcagacctattaagagaaaggcacaacgatgttcactaaaagatacattttaaaactttgaaaatagcttttcagtacaggtaatagccatttgtgattgggggaaaaaaaatctaattcagcacatagcaactaaaaatataaaatactttggaacaaagttaacaggaaatgtgcaagcctcatatgaagaaaaccagtaagcttttcagaggaacatgaagaaaataaatggaaagacaggcacactatcggtattctatgagagaaagacaatgttttaattttaaagatgctacgtcttctttaatccaaaaatttaaatgcaagtctgctaaaaagtatcattttttaacttgaaagattattctaaaattaatctgagatatgtgaaataacatttaaaaattgaaagaaaaaaagaattttgggggaaatttattaccagataatgcttattataaacctatgctaaatgacgagttaatgggtgcagcacaccaacatggcacatgtatacatatggaacaaacctgcacattgtgcacatgtaccctaaaacttaaagtataataataataaaactttaaaaaataaaaataaaaaataaacctataagttaaagtaatttgatactgaccgaggactagattaagaatcagcaaactttattgttgaaggaagtaagacttagaagagtttaagttgaccaaggccacagaactccaaatgaatagtgtcagactttcaaacccacactcaaccacactgtaatgctgccttcctaaaatatacattaatacatgtattcagaaaaactatgaataagaagtacctaaaaatattaatattagttatctgtaggtgatagaattatgggatgactgttcatttttcccccatatcctttttcgaatttcttcaaatgtactacaaagaacatgtattgcttttataattggacaaaaaggacaataccttctattttcagaaaccgaaacttcattgccccttcaatgtgggaatccagccagaccctattcttggacagcatcagtgaaaggggcttgggaaagctcttgggcgtagcagcagaggcatgtcatatatggaaaccttccatgagggtgacctcaccactggaacccgttcaacataaaccttgctgcaagaactagcagagctctttggacaaaacgtggtgagtggagagctgagaaagaactgacctaaagaagagagaagtgctggtcttacagcatgaagaagtcctgggtacccatctgggcttagcaggcctcctttatgatctattcctagagaaggattacttttcccaacctcagcctccttcaaagaagaactcccaccgtggcccagggttatttctgtctttttttctggacttgcgttagaatgtaggatgtttcttgtgttggacaaatcataatgggttattggtgggtgacagaagtgaaaacattacctagactaaaggaagtaacactattcttagatatccctccataattccctatggttagcttccctatccccagcagcctcctctcttcaccccattttgccttcaaaaaagtgaatggcatcatatcaaagcacaattccatcaaaatatttccatgccacctgcagcaccaggccctgtgccacgttgaacagctcttaacaccctgcttgccacacttagacacctgtgtctagaacttttctcacacagcctagtatacacctttcccatgttgtaggagggtttaaattttattttatattatttttagtagagacgggagtctcactttgttgtccaggctggccttaagctcctggcctcaagcaattctcccaccccagccttccaaagcgctgggattacaggtgtgagccactgtgccttggccaagagtttaaaattatttttaattgaaccatagtaaatgcaggataagtttacacaaatattttggttctcagccacagtgttgttctgtaagcacagggcctatgattatggcctttgagacttcagctggcctatgaggaaaccacataatgaaaatagaaccctgttagttaaaattcttttaattgcggccgggcgtggtggctcatgcttgtaatcccagcactttgggaggctgaggtgggtggatcaccagagatcaggagttcaagaccagcctgtccaacatagtgaaaccccgtctctacgaaaaataccaaaaaaaattagccaggcgtggtggtgggtgcctgcaatcccagctactcaggaggctgagacaggagaatcacttgaacccgggaggcagaggttgcagtgagccgagatcgcatcactacactccagcctgggcaacagagtgagactccgtctcaaaaaaaaaaaaaaaaattcttttaattgcactgacagaaaactcaattaaaactggtgttcaggtacagctggatccagtgtccattgtcatcaaggctaattttttattcatctctaggctcttctatgcttaatgtttgttcatttaattgggtttttcaatgaggtagctttgacagctagaaggttatagcctattgccttggtaaactcagcaagaaaaaaactttttttttgaaacagaggctcgctgtgtcacccaggctggagtgcagtggcgtgatctcagctcaccgcaacctctacctcctgggttcaagtgattcttctgcctcagcctcctgagcagctgggattacaggcgcacaccaccatgcctggctaatttttgtattttttttttagtatagacggggtttcaccatgttggccaagctggtctcaaactcctgacctcaagggatccacccgcctagacctcccaaagtgctgggattacagacgtgagccacctcatctggccaagaaaaagaactttttagttcaacagtttcaacacaatatttggaattgagatattgggtcatggctttggtcatgacttcatccttgaaccaatcactctgaccaggaggatggaatattagccaggcctggatcatgtacccataacccatctacgccacatgcactgagagtggggcagcattcatttccaaagaagaatggtggtggcagaaggggaagtagatgctgggcaggcaaaggcaacagatgtccaccatgcatgcctagaagaaaaaagtgctgttagctttagataatagcagctggacgatggggtagtgaccttctcactcccaaaaaggtgggtcgcacatccaggctgtgggtcattcatttaatttgcatatattgagtacctgctgtgtgcagagcactgttcaaagtacacaagaagtagatgttacgctctctgtcctcaaggagcagataagtaagataaaggagccctactctcacagtgcaagagcaattcatgatcaatgagtgtacgcagaatcatgagcaccaactttatcccgaagtgttgagggaacccaagtgagggagaaatgaatgttctcattttaatttctgtatcttccacttttattcaacaaatatttactgtatgcctactaaattcaagtcccacaggactctagaaacctcgtagaaaggatttcagacagattcctaggatgtgtaaaatatgagaaagagaaaataaattgaaagtgggggaaggatctagaaatcaagtatgcaacaaagtgaattcaggaataaagtaaaacacgtaaaccgtgattacttacattcctaccgtggatgggccgtaggatgtatgatgtaataaataatttgcataacaaacccaacatcaggtagaggggttctgttttcccatagaaatgatggaatctcactaaagcacaagatatggtaaatgtaattctactggaactgtggtgagtgtggggaaggcaacatagtccagctgagacaccgggttgtctgctaactggacctagcctagggatggatttcatcacatctgggagctcaggtggactgcatgcattttaaacaactctgggttgttttctgcactgacattttaataaatatttagtgacagtgagctcagaatcgtatctttggcaagtgcctggggtgcagctgccattctttattgatggctgagtaagatatgaggcgcttaacttttaactcatttttgttttgttttaacacagctcaccaagatggaggaacagagcccatggcccacttactacatggattcccactttacagtggagaaggagcttgcagtaaccacaaaagtttctgtataagcaaatttagggaattgaacttcagacagtgtggttgtctccttacttatgaacttgggaatacttacttaggtaacaactaacatcagaggtttttgatctgtagcctttctttctgtccataattagctaatagcttctgctgtacaaacacaaaccattccctgtccaagaaaatta

SEQ ID NO: 15829 - DNA, 129675 bp, Homo sapiens
cacttgagccgaagttaatttctcggggagttctcgggcgcgcacaggcagctcggtttgccctgcgattgagctgcgggtcgcggccggcgccggcctctccaatggcaaatgtgtgtggctggaggcgagcgcgaggctttcggcaaaggcagtcgagtgtttgcagaccggggcgagtcctgtgaaagcagataaaagaaaacatttattaacgtgtcattacgaggggagcgcccggccggggctgtcgcactccccgcggaacatttggctccctccagctccgagagaggagaagaagaaagcggaaaagaggcagattcacgtcgtttccagccaagtggacctgatcgatggccctcctgaatttatcacgatatttgatttattagcgatgccccctggtttgtgtgttacgcacacacacgtgcacacaaggctctggctcgcttccctccctcgtttccagctcctgggcgaatcccacatctgtttcaactctccgccgagggcgagcaggagcgagagtgtgtcgagtgagtgtgcgtctgtgtgtcccggcgagggtgcgcgctcggcgccgggagcgcggccagccgagtccggaggcatcgggaggtcgagagccgccgggaccccagctctgcgttcactgccccgtccggagctggacttcggggccggggccggggccgtgcgccggggacaggcagggccgggtcgcgggccgcgcgtcccccaggccggaggtaaaagcgctagcgcgcggagggctcgaggagggcaccgcggctgggccccccgcgccccgggccccagccgtccgcggctcccggcccgacgctccccgccccggagcgcgcccgcctcccctgcgtggaggccggcgggcaggcgagcggggggcggtagcgccgtgccaaggggctggctggggcagcgtggccggccgggctggggcgatttaagagcggtccgggcggggtgcggagccggactttggctggggcggcgcgcggggagggggccgggggcggtggcggcggcgttggggggcggggaggaggcaggaggaggagcagcagcgctcgccgggggatgcagcagcggcagcggcggcggcggcggcggcagcggcagcggcggcgcggagtcccctgcgcccagcggcccggccgggctgcggcagaggcggcggcggcgccccgctccgggtgaggttgccggggccgtgcgcgctggtgagtggggcgtggggggcaggtgggtggctgggggacgcggggctcgggcgggggctcgcggcggccggagccttccccggcgtgagcccggccgcgagcgccgcccaggtgagccggggctggtccggaccgcccggctccagccccagcgctgcttgcggaggtgggtccgggcgggcgggagggaggctccggcgccggccgtccgcagagggatgacctgtttgaccccgctggctggcgggcgggcgaggacttcccgccgcgcccctgacccgcggacacggcacaccgagcacaggcggccccgggtaggggagcgcgcctgggccggccatccgcaggggcatggccttgttgacccttagggtttagacccaagggaccggtagatgccagcccacgtggggcttgtccgggcaggactcggggaagcagtgggccggatcttcagagtggttggaaactcgcagacaccgaaaggacaaacaggatcgaaaaggcagacttcctcccaggccagggcagaacgagtttccatcgcctggcggagggatgctcccctccccggctcctcggggtttcagaagtctagcggtgaattctaggagtgcacttttccaaacattccttatagtagttcgttcattcgttctacaagcatttctggagcaccccctcgtgccgggcaccgcgttctgttccagggaaacgcggctgaacaggatctggctcctgcgcgccagaagctgccggttcactgggagggcagcagggtagagagatgccgtctcggggtggaagatggaaagggaagcctgcaatcctagtttgcacactggcctcggtccgcaactcccccacctgcacgcagtaggcccagcacacagtaggaagagcaagccagacctgcctgtgacgaccctctcctcctcctcctcccccttgaaagctttgattcattccctgcccccctttctggaaagtcttcctgcagcttgttttaatcactttttgagttaaaagtcaatatttaattaaccaagtaattacattcagcttacgtttcaatctgggtatttgctcatctgtgcgtgttgggacacccgccctctcgcccctccatctgtcccctgcctgtttcccaccgggtccacccccacttttggggcagagaaggggaggctgcgctggagcaggttctcagggggagacagggagcaggagagacgggctttctctggaggacacccccggatctgcgcgctctccaaatttcagcttgtagtgaatagtgaaggtgatttcttgacagcctctgcctcccattacagaaccaccagagggttctaattaaattagagccaatcgttaagtataggaacggggtagggaggacagaacgaagggggccccttccctgtaagagatgttctccccagcttcgtctctcccacatcatagagaagagaaaactcatccagacagcctgtcggatgtgtaatttagcgttctaataagcagcttgaaaggcgaaggtggtgggcttggcagatggcatgttggacctttgtacatgaaggcctcttccttccccagctaaatttatatacataaaggccgtgatgttggcatcactgctgcagctgagggtcaatgtgggtttggggtttgggctttgtgtgtacttcttgggttttttatttgaatttatggctttttctgaaaccctaataacatgttaaattttcaaacttgagagtagagtgatgagttgactgtaaaagtctggtcttggaggaggacagcatagcagtgtgtgtgcatgcacgtgcatgtcccccagttcagctgctgtccaaagaacccagttgatatgcagtttcacacctgatttggacctgatttgggagataacatttccttctcactttttctggcactggttagtttatctgcttggacctgcctcaagagggcagctgggttaaccaggcagaatatcacccaactctgtcaagctttggccattatctgaccttagactttagtcctgcagaaggagtccagaagccctgtcctacagaaaaatatcagcatttctgaccagcttgtagttaaaagaaaaggtttagtccagacttaagataattggtaacacttaagtagttttgtatgggcctgatctgaggcattgatctaagcccttataccttactcattaaatccacacaaataccctgttaagtaagtactgccattgttgccatattaaagatgaggaaacaggcacagagaggattgtgacttgcctacagctggtcacaggtagagctgggattcaagaggccctcaagctccggggtccacttggaaccactggactctcctccatgaccttggcctttgtcccagatgtagaagaaacacatatgcaggggaagaaaacaccttcagacagtcaaactttgcaaagtaaaaggcccttaactttccataaacccccactgttccgacagagagtccgggtttgtatttgaggttttttgccccaaggaaaacatgtgtctgcctggtgctttttcttctgcttatgagcagacacactgtcccctcccccagtcaaaatgcaaagggaaacatcaaatgcagctgatggaaaagccaggtgaaccatggtgaagatttcagcccactcagagcacagtggccagagagcaaaagctctcctagaggtgagaccttcctgtggttggtgatggagtctcgatggcctggccctgggggtggtgccagggtgctctgtgtcaggcctgggcggatgtggaagatgggggcctctctcaatgctgatctgcaggtgagggggccctccctgaaacctgctttctctgggcctccttggaatgggccttggtggagatctacagacagccctggcccagccggattgaaggcactgtctaattgggagggcattaagatcgttataattaattggcatcccgataaatggcatggttgcctaattggggtggttgctagggaacgaggcctcacttggagcctaaaggggaagaagcgctgggctggccacagttgggtgtcagggtacagatccagcagtgaatggaccggaagggagagcagtccatccgtatctgctggtgtttactgagcagctgctgtgtgcaagttgcaaatggagtatcagttaggggtacttgcctagaagaactgtaaagtaatcaggttcctttctcttgcaagcaacggaaaaagagaagaaaaaaactcaagccagcttaaggagaaaagaagtggacttactggttttcataaccaaaagtcttaaggtgactaactctagcttcagacacagctggacccacagctcagattttgtaatgagaatccattcctatccaccgctcctctgccttccatgaggctgatgtctctccagctctggggcgggcagtccctggcagctgtgggcaccgtggctaggagagccagactgcctggctccctgcccagcagtgggatctggggcatgctacttaacctttctgtgccttgatgttcacatccaacaaatgatgatgatcatagcacctgtctcctgcttgtggtaagcatgaaatgagatgatcaatgtcaagtgcttagcagggcgtctgacccaggtgagccttcagtaggcattgactgttaccataacttaggtgtcaggacagatgtcatggagcagaggggtctcatcccctctggtttaagcccaaaaggaaagaacaagcctctgatctggcaatgcacacctgagccccatggttccctctgattggactgttttttgtccaaaccagtcactggctaaggaaatgagttgccaacaattggcttaagccaggctcacaggcctctccctggagctggatggaggctgactgctgagaccccaaagcctggaataaaacagcacggggagtccccagtgaaagggaagcccggttgctggagaggcagatggccagtgcctgcgatgatgggccactaatgtgagcaatgctggccagatggacccatcttcattttggccaaggtggagactggggaaacacgctgcctgggcaatgcctctcccttccaccagggccaggaggcatcaaaggcctgacttttctgccttactgtctgaaggatggggcctggccttgatcctgtgctttcggggggccaggggcagtgtttgtctaacctcccaccatgagaatcatctggctgtatttgtttaaaaaggcaaagaccagatcctgttgaatcaaacttctagggagggtcctggatgctggggggcatgaccaatatgtcatgtgtatattctatatcagcaggagggtttggcgaagagagctctggagcgtgggcctctttgtcttcctgcctaatgcaggggctgtcagaaggcggggaaaatgctctaggcctggcgtgctggctcatgcctataatcccagcactttgagaggccgaggtgggaggatcccttgaggtcaggagtttgagaccagcctggccaacatggcaaaaccctctctctactaaaaatacaaaaattagccaggtgtgatggtgcttgcctgtaattccagctacacaggaggctgaggcaccagaatcgcttgaacccaggagtcggaggttgcagtgagctgagatcgcactactgcactccagcctgggcaacaaagtgagactcagtctcaaaaaaaaatttaaaagaaaaatgactgcatgatgtgatggggtgggaggcaactttaggcaggctgtcagggaggcctctgtgaggatgtgacctttgaactgtgacctagattttaggaaggagtccgccttggaaagatctgggggaagagcatgccaggtagaaggaacagctagtgcaaaggcccagaggcggtgggaggggcctgtccaagacacctgccccaaacacaaatagaagtcaagtggggtaggccaggcgtggtggctcacgcctgaaatctcagcactttgggaggctgaggcagttagatcactggaggtcaggagttcaagaccagcctgaccaacacggtgaaacctcatctctgctaaaaatacaaacattagccaggtgtggtggcacgtgcctgtagtcccagctatttgggaggctgagacaggagaatcacttgaacccgggaggcaggggttgctgtgagccgggatcacacttctgcattccagcctgggcaacagagtcagactctgtctcaaaaaaaaaaaaaaaaaaagtcaactagggtagagggtcaggagtaagtgggggagggcacgtcagagatgagaaatacaggccatgctaagaaattttagactttattttaaataaaatggataactgtctggacgcggtggcttatgcctgtaatcgcaacactttgggaggccaaggcgggtggatcacctgaggtcaggagttcaagactagcctggccaacatggtgaaaccccatctctactaaaaatacaaaaattagccaggcacggtggcgcacacctgtaatcccagttactcgggaggctgcagcaggagaatcgtttgaacccaggaggtggaggttgcagtgagctgagattgtgccattgcactctagcctgagtgacagagcaagactccatctcaaaaataaattaaaaaataaaatggagaaccattggagggttttaagtcagagaatgatatgatttgtgtttcaagaagatcctgctggctcctgtgagaggcgtgctgtgcagatggaagtggtatcaccgggactgttaggcaacagagagggcccgagagtggcttggaccgtggtggtatcaatggagatggagtgaaatggggattggagatgtattttggaggtagggcccacaggacttcctagtggattggattacagagtgagggaaagggctttgattctcaaccgagggtgattttgacacccagaaaacattttaacactatccggagacagtataggttgtcccaactggggaagggttgctactggcatctagagggtagaggccagggatgctgcttaacctgcaatgtacgggatgaccccacagtgaaaaatgattcagcccaaatattcatgatgtatcctgccaaggagtcaaaggtgactaggcagcctggtgcgtggtgattgctaaatagggaagataggagagaaggttttggggaggaggagtgatctggaattccgacgtggaaatgttgggtttgagatgaaccccacctggatgtctgaaagctcagtgggtggtgaacgtggatgtctgcagccggtcggggctggcaacctaagtttgggagttatcggcatattgatgttattttaagctgtgggactggacacaattatccagagagaatgtgttttgttttctagtgtggttttctccccccagcctccccctagtgcctgtcatgaatctatttgatgaatatttttagcatatcccacatgctcacctctctgacatttccaagaagttcctgaaggctcgggctgagcctccccttcttcatcgcctggtttctcagtgattaacagacagagctaaatattcattgctctgccacagatgcccttgggaaattgcttaaggtcatgtgggatctcgggccttgtaggcagcacgatgccttctgggtggaacagctgttggcatggccttcagagcttctcctccagcccaggccagggcttcttggaattctctgtaaccagaatgttttgaattccccacgttctcttaatgtgattccaaagcacacgttgcccagtggccctggcctctgccatggagcgtcatcttacagaaggcctggcccactgctctgcacacctgggcccagcttgaatcttagataaattctatcccaaactcagagttgttatggccaggtcttgtgtgtgtaagttggtggacagggccatccccagggaccacaaatagtaccaaagatgtgtttggccatgtggaagccagatgtgttaggggaagaatgtggccaatagcttttcttattggctcatggtcaggaccccagcgggtgacttgacccaccccagtagccagagaagaggagcttttttgtttttgagacagggtcttgcactgtcatccaggctggagtgcagtggcacagtctcagttcactaccacctcaacctcccaagctcaagtgattctcccacctcagcctcccaagtaggtgggactataggcacaggccaccatacccagctaattttttttttttttttttggtagagatgagatcttgctatgttgcccaagctggtctcaaactcctgggctcaagtgaccctccaaaagtgctgggattacaggcgtgagccaccctgcctggcctggaactttttgaaaagagattgaaaaaactgttagctcacagaagccttggagatgttcctgcttggtgaaaatcagaccatctgaaagccacatttctggtctgctctcgagacagatactatccatagacttctgattgcaggccacttatctggatatttcagagaccaggaaagcctactataattcttagtagcttagagtcctgatcattttaatgtgaattgaaatggtttcattatgaggaatcacatttctgactgacagtggcttatgcaatagaaacatttaattctcacataacaccaagtccaaagcaggggagtccaggcgctggtttttcagtacaacagtgtcatccaaggtcccaggatctttcaagcctcttcttctgtcctcatcatgtctttggccttgttgcctcatagtctcaatatggctgccacagctccagacgtcgcatcaccctacaaagtgggactataggacaggactccttgctgtctctcttttaatcagagagtaaaatccttgccagaacactcccaccctagcagactttgctttctgtttcattggtccggagttgggttttgcactcacctctaaatcaaacactgggaaaggacctggctccttcctatgcttcggatctcagctgaaatgtcacctccctagaatgctggaaggacaacctgttttatgttttataacacttatcactctctggaattagcctggtttgcttatttgtcctttgtcttctctctcctcactaaaaagcaagctctgtgcttgtagggacattgtctgtcttgttcatcgctgtatccccagcactgagaaccagggtggcactctttggatactcagtaaatttttttttgaatgaaggaagcaagaaaagaaagaggcttggagagctacaggcacatctggctagcatgtttgctcgaaggtgactgctcagggcaaggatgtcaaaacctgttagtcatttgcaaaaagctaagcaggtggctgggaggattggtttcatacacactcacttgctccccagtgccagagctggggttttgtgctagcattgcttgcagaggaaggatcgtcccctttatgccacggcagggacctcacggccttgcagaagggctggtggaaccctccacttctgatgactctggggccaagctagtcttccaggtcagtggtgtgacattctaatgagggctcttgggttaaatatttctgcatgtgcccttgaaaagacaactcccttccctaaattgtcccttcctgaaagaacagcggtcacagcccaggagagcagcctctttaacctccactccccaacctaccctcctgaaagctcacatttaccgagcactttgtacaggctagtggtggtttaagtgcgcgctcctgtgaatgtggaataactcagcgatgtggggatcttccaaccccgttttacaaaggaggaaagagacacaacgaagtctctccttgctctgccatgctggtagaataggacatcacaggccacctaaccaggggctctgttcagctcgcagaaatgttttgtttgaaccttctaaaaagctgtcagatttgtaacaactacgagatttcacattttaaaaatctggattttcagcttctcctgaaaaatggggagatgtggtccccaccatcccctatagcctgacattgtgaaccaattcatttggcttttcattgcactttcccttctgtttttctcattgtggagcaatatttctctgttccatctctaccaaaagtggccagatgagagctggagaggaagtggggtgtggagttttcttatgcgtccacttcacccgtttacattatctgcctggcccacgtaggcatttgagtttgtctcccgttgtgacactttgtacccaatggctacacttccagggacattgcaagtgtccctggacacttacattgtgcattgcaagtgtgtagtaataataatgtctaatatctattgattactttttgcccagcatttcatcatcacagcaagcctttgaagcagggactaatatcatcttcactttatcagtaaggaaactgaggcactgtgtgtgatgccctcactagaacaggaggtcctgaagcttgttcatctttgtaccatctgtgctaggcttactggctgtttgaatgaatgactaaaggaatgaatgaatgatgttctcctccaagtgttcattagccgaagaggctgaaagtcttaacctcatagtcatttgtgacatttctgttgggggaatgggctctgatcagtgtcactgaggattcttgggttgtgtttctgctgtataacaaaccactccaaactcagtggtttaaggtaacaacattttattttggacgattctgtggtttgaccaggtggttcttcagcttcatgtgatatcagctggcaggtctaaaacaaccccattcaaatggctggcagctcttgctggtcaccagatgggagctcagttattctccatgtgggctctgccctatggctacttgggcttcctcgcagtatggcaggttcagggtagcctgacttctaagagtgcaaaaatgaaagctgccacggtctcttaaggcttaaccgcaaaaccggcacagcatcacttctgccaccttctcttggtcaaaacaggtcccaaagccagcccggtttcatgaggtggggcccacacaagggtttgaataccaggcagtgtggctttttggagtccaccaaagtacccattcatcacagactgcaagtagcagagcccaacacttactacctcaagctggaacaggatttactggggggctcaggaaaggacaggtcaggaactgaggaaattctggggaccttggcgcaggagttactagcagcctcctgaaggagagtttccatcccaatgcgacaaatgcacccctgctttttctttctgcccttgacactttatttgacagttggggacatggtaagaaagtctgattgaccttggtcacatgatcaccccttggcagagaggatgggggcatcttggcagaggggagggagtcctcaaaaggaagctggggtgctgtcaaaagaaggggaccagatggacaaaaattgttagaaatctctgcaccgcccctgcataggtgactccacccctggcagagcaatgaacattttaaaacgagtgaatggactttgaaagtccagtataagtagaatgcccaaacctgtgtggcagcttctccagctccagggccccatagctcaggtgctgctgggggtctggaagcttctctccactttacggggcaaagtcaactcctagaacccctgccatgcctcaatatccccctccagaagataggggcagtttgcttctggctcctgaaaggagagcatgcgcggtaatgagggacctgggctcaatgcctgcactccctcctcccagaccccgcctcaccagtgacactgccttccaccccaacacctggtgacacccagtgagtccccgcagcaggggaggctgctagtaggaaaaactgatccagactaatctcagctcgcagagcctctgacccgggctttcctcccacttgccggtctatttccggctgctaattagattgcacagcaagccacattgggaagccgacctgtcgttccaaaggcactccactcgcatctccaaatgtagcaggtgatttggtaaaagttgattctgactccttcccccagcttctaaaataattgtaagtgtcgggctgtttccaaggtgaactaatgaacagctcatctgctaatagcaggggcaagctggctgaggacggcacgctcgcctgtggattgggtgaaaaggaaagaagtaattggattattaataccaagccgtcaaaataccttttattccttttatattcttctggaaggaaacgacaatctctggaaacataaatacatgttctgtgggggtaagcagggctaagaaaatgtggggctgaaaaggaggagggggttaaaaaggtggaattgtcagtccccactgtggcagtctacactgagaaccagcccacagttaggcgtgaataatgactctgttcaagtcggactttattgcttttggccaaaggccttttgcagaaataactttgtaactccctgccagggaagcttttgtccacagctgagacaaaggaacaaagaacagaggtgggaatttctgtatctgatttctacttcctctaaacagccagaaaggacagcgggtgtggcctgcccagaaggcatgggctggggcaaaggggtgtccagcctcctgtgggccacactgccgtgctcggctgcaccatgttggtttcattgtgcacattcccaccccagggcctttgcacttacttcctccgttcatagaaagcattttgcccacaactggcttctcgcccgcctctgctctcagctcagatgccatttccttatgccacctcctcatgccagagaggcctttcccaatttactgtccatcctatcacctgacagcttcctccaaagctcttaagacaatcttcattcattcattttctcctccaccaaggtatcacagctccatgaggacagaggcctggcctgccttgtggccactgctgtttcttagcatgtggcacatagtaggtgctcaggaaagattggatagcttggaagagtcgcacatagctcccaggccaagctccagcggggctttatggagcccgctcagtgcttaaaataggttgaaagtttttactttggaaatggtgtttccggtgtagtccaggcgccaccccatctctatcctaaatctaggccactttactcactcaggtctcctgcccgacccttggatgcatttgcatatttgtccctgctttagacaaaggccactgcaaacatatctctctccaaaggtcaccagacaacatccagacttcttgcattgccaagtcttgtgccagaccggtggcctccaccaaccaggtcccattgactggatcaaggtgtagtcttcatcttagccgtccacgcacagggcgtaagtggcgttgatctcatcataagcaggtcatggcaggaggagggtcgggcaggagacctgagtgagtgaagtggcctagattcaggataagagacggggtagggcctggactacattggaaatgccatttccaacgtaaaaacctttaacttttcctttttccccttttccttttctgctctcctccaagcctctgggtcatcaaggagggaatcgcgtgaactcctcctttatggtcttcaaggagacctactcccaatgtaaggggaagcgcagaggccttggcaagcaagaatgtaaccacaatgtcattgcctttatactgttgccatctaagtatggcaggggttctcacctaggggcagttttgccccctagggggacatttggcagtgtctggagatatttttgattgtcacaactggggtaggtgctacttgcatctcatggacagaggcctgtgaacaccctgtgatacacagcacagtcccccatcgaagaatgatcctgcccacgcggcagtaatgccaaggttgagagacccaggtttatggcaatgggtgctggttcctccaagatagacttttctttctaaataaatttattgaaataagaaagggaatgaatgaatgaatttaggcccagatttgggtattctacttataccagacttttaaaaattcatttatttattctgagacgctggcatatgggatggagcacagaggttaacgatcagccctgtcatccctttcggagcagatcaggctgtaccatttgcctcaaatcaggagcccctgccctggaagctgccatcttgccagaaacttcctggggagctgcctgtaaaaaactctagcagcagttgattctggcccaggtggaaaagctgtgttatcccaggcggagttccggcaggttgggagatgtttccaggtctcctgcccagccaggcatgatgagcatccttccaagcttggccccggagccctggcccagcacccccatttgaagcctgcagagcctcatcatcactgcccccgcccccgccccatcctgccactgacaagccaatacctgcctgatgagaggggctcccagggacagcagccttccctcctggactccagggcaacctccatgttgttgggcggctttgagcacagggctcaagggcagaggctgagttggaaaatttcttgcctctgcagaagggaagagctgggggaggttggggcctttttccccaaacgaggtcttattcttctgtggggttttctgggtttgttaggtggcttcctttctacttaaaaataagctgggagtggttaaaaaatgggaagaaatcaatgtttctggcgtacatagaactgagcagatgtgttatctagaataaggaggagaggttgttgtgactctagctcctggtacgagcccttcagttcaccctcctgccctgctcagaaccccctggacctgacatcgtggctttaacacccttgggtcatgtgagaaggaagagtgcccacccaggactttccgaggctcacagattctttgaaatggacgtgagcacaaacgcccagccccgacagccagggatcagatcgggtttcacttcctaggagggaggatgtactgcaggggaggcccacgtggctgccccaggcctggccagcctctgtgacccagcaggactgactgttttacgggatggccacacggtaccctgcaggctcatccatggtgggaccttgatgctcctttgttgagatgtgggtctgtgtcccctccccttgaatctggccagacgtgcgtagccctggtggaaggaacaccatgggacagcagaaaagatgagccagctccccctggatcactgggaccctcgctgttgtgtaagaaatcagaccccactgcaaggccgccatgctgtgaggaagcccaagccacactgaggccacatggaggtgcccactccgcagcccctcccaagctcccaaccgactgccagcaacaactgccagacaagccaaggccctgctgagccttctcagcagtggcctcagacgttacaaagcagagaccagcccttcctgccatgtcctgcgcaagttcctgatcaggagcctctgagaataaaagaaagattttaattcaccactaagttttgcggtaaattgttacacagtattagtaactggagcattcagccaattccagtcttcccaccgtgcagttattcattcattcactgaacaatattcagaaaccgtccacctcttgccccttctttgctcccacctagtcatctcagtggcctccctgtgcctaccctcatgccctgcagtctgttcccctcacatagtcagaaggattctgttaaaacttacatcagggctgggcatggtggctcatgcttgtaatcccagctctttgggaggctgaggtgagaggattgtttgagtccaggagttcaacaccagcctgggcaacatagcaagacctcatctctaccaaaaatttaaaaagtaatcgggcatggttgtcctcacctgcagtcccagctgcttgggaggctgaggtgggaggattgcctgagcctgggaaatggaggttgcagtgagctatgttcgtgccgctgcactccagcctgggcgacagagcaggactctgtctcaaaaaaaaaaaaaaaaaaaaaaaaactacaccagatcacatcacccgcaagctagaaccccccagcccccttcactcagctccgtgccgccatgcgtgccccctttccggccctccctcaggcatcttcctacctcaggacagttgcgctttctgttccctgtgcctaggatgctcttcccctaaatatccacaaggcatgttccctcccctcctgcagggatccacccaactgtcatctctcaggccttcgctacccaacctatttaaagttacaccccctcactccctagcactccaacctccctccttaggacttgatctccttgggacacgttgcctcatatgttgtgtaatttattttggtgtctgatccatgaaggattgtttttcctgattcccagcactgaagaatagggccgggaacatagtaggtgctcaggaaatctcggctgcctatctggaagaattagcacctcggctctgccaggagctggggccgtggcgtcaggcaaccaagagacagcccctgcccatgcgagcttctggtggagggatgcccctctacaaaataaaaacccaggccaggtgcagcggttcacgcctgtaatcccagcacattgggaggccaaggtgggcagatcacttgaggtcaggagtttgagaccagcctggccaacatggtgaaaccctgtctctactaaaaaaaaaaaaaaaaaatacaaaaattaggcaggtgtggccgggcgcggtggctcacgcctgtagtcccagcactttgggaagccgaggcgggtggatcacaaggtcaggaaattgagaccattctggctaacacagtgaaagcccgtctctactaaaaatacaaaaaaattagcgggcgtggtggtgggcacctgtagttccagctactcaggaggcggaggcaggagaatcacttgaacccaggaggtggaggtatgcagtgagctgagatcacgctactgcactccagcctgggcgacagagtgaaactccgtctcaaaaaaaaaatgaggcaggcatggtggcgggtgcctgtaatcccagctactcaggaggctgaggcaggagaatcacttgaacctgggaggtggaggttgcagtgagccaaggtcatgccactgtactccagcctggatgtcagaggagactccatctcaaaaaaaaaaaaaaaaacacgcacacaaacacaaactcaggccagagagtaaatagaggaatcacaagttatgataagtgctctgaagagagcagtgctgggactgggggtgggggtgaccgagcagggcctgcttcagggacagagggccagggaaggcccaagtcacagccagggtggccgagtcaggtccagaatttgtgattcccacacccacgttccttccgcttttccacactaccttctcttatcagttgtcaaagaaggatgggcgagttggccctcagtaaggcggagagttgggcacaggccaaggaggcctagcgtgggctggtaggccgtgccctgaggcctctgttcacacaggcacgaggtggccaggaagccacgggagtcagccctctgcctccagcccgccccccaatttgggttcatttggttgcaagtgagagagcaactaggaatgacctaattgaaaaaagggaatttcacttctgatcttgaagagtcaaaagtatggggaaactgacctacaaagaaaacagaaactagttaaagaggaatttattgggcctgaaacaaagaacccaacccaaatcttcctctttcaggctgggctggatcccaggtgtccagtgctgttaagtcccaagtatggtgcatttcacagcactgctgtgttcggtgtgttggcttcattcccgaccccactcaagacaaagtggcgtcgctgtcttccctggtcctcacattggaaccacatggagtgagttagccagttgtaaagactggatgcctcttcctgaccagtcaggccaaagggcctggattactctggcccgtcactgaggcaaggggtggggaggctctgattggcccaggtctaggatcccacgatctagcattgtagctccagaactggagcctaatttgaactttgtggaccaagggtggggagaaaaggatcccccaatattttttttttttttttgagacagagtcttgctctgtcgcctaggctggagtgcagtggcgtgatctcagctcaattctcctgccttggcctcccgagtaactgagattacaggcacatgtcaccacacctggctaatttttgttgtttttgagacacggtcttgctctgtcacccaggctggagtgcagtagcgcaatctcggctcactgcaagctctgcctcctgggttcacgccattctcctgcctcagccttccaagtagctaggactacaggcatgtgccaccacacccagctaattttttatttttagtagagatggggtttcaccgcattaaccaggatggtctcgatctgacctcatgatccacctgccgcagcctcccaaagtgctgggataacaggcgtgagccactgtgcccagcctaatttttgtagttttagtagagatggggtttcaccatgttggctaagctgatctcaaactctggacctcaaatgatccacctgccttggcctcccaaagtgctgggattacaggtgtaagccgccacacccggcctcagactcccaagaaaattgggagctgttatagaaaggagataatcctgggtggcccaaacctagcagagaacacaagccagcatttattgggcacttgctgcatacagatctgttgaaagtctccgtgcatgttaaaccatccactctgtaggcaagtgcttgtaggtgtcctcactttccagatgaagtcactgagaagacaagaggttcagacacttgcccaacctctagtaagtgacggagctgagatccaaacccaggcaggctagctctagatcctaccctcctcctactcagcgtgttccctgtggcattttcccccaagtaagtatcaggctgtttgcttacctctgtccgctgtttgtcagctctctgagaatcgagagttttgtctgttctttttttttttttctactgatcatgaaacagtacaaagcaagtggcagatgctcaggtatttgagggtgtgaattatatggcctgtcaaacatctacccacttgacatacaaaacattttggtgctcagcttcctaagacttgaatacattgtttctaaatttcctttgtgctctaactttaatccatggccactctgttctcacagcttgccggtggtttgccattatttccagtcctcttttctgatcattctcacatgtagctggaatctttcaactccagcttttcctatgttgacttagagtatcacttccaggagggcagggagctttcttttcactgctttatccacagtgccaagaactgtgcctggcacacacgagccttcaggaatgtcttgttacatcaatagttaggcaggtaactgggttcctaagccctgcatttttgccctacaatctttatgccctaatttcctttccagatcctgagcctttgtcttgaaacctgatctttccctcctccctctgaatgacccttctattgtctcctgccctgttcttgagagccggcttggttctctgcctccatttggaattccaagaacaggcaaggagagccacaagatggcctgggctaggtaggggagacagggagaagctgtggcccataggttacaggagcttctgtcctttctttgacggccccaaagaggaggagagaaggctggagaaagcctgtagccaggaagaaagggagacacaggggagtgtaaagtttaacagatgtgcgtgtgtcatcccctgtctagacagcttctgggcttgtgaggtttgggaccacactttcccatccctccaggggcctctctctgtttcctctgcctgctctttgcccaaactgtttctcctgcctgaagcatcctgtcctccaccctcctcttcactggccatccaaatcctttggattcttcagaactttgctcctgttaggctgctcagtttatgctaagtactcctccaggaagccctccctgactgctcccaggccagcagtttcccctttcctcttgctgtttatacaacacacttaacctcagtcccttgtatcacttgttgctttccaagtcagcataagtgtcaaaagagtaggctctggggtcagaatgtctgtgtgcaaatagccatgctggcttgcttgttttgtctgtcacttggaggtggcacatccaagtgaacctcccaggggacagggaagagtggattactgttgtaatcgggcaggattctcctatcactgaacactgcctcacatatagcaggcccttaataaatatttgtaaagtaaatgaaggaagagagaaatgatcaggctccctggaccacctgaggaggccctcaggtctgttgctgggctctggccccagcccgtgggacatatctgcacacccacaatttcctttcttccctcctctcatgagtgtttcccgtctgaccaatgccgccttctgcctctggccccttcttcctctcccaccacctcaactgcctaattattaccaaacttctctctcctgtttttttttttttgttttgttttgtttttttttaaggcagtgtcgctctgtcacccaggctggagtacagtggctcgatctcggctcactgcaggctccacctctgagttcacgctattctcctgcctcagcctcccaagtagctgggactacaggcgcccgccaccacgcccagctaatttttttgtattttttttagtagagacggggtttcaccgtgttacccaggatggtctcgatctcctgacctcgtgatccgcccgccttggcctcccaaagtgctgggattacagacgtgagctgccgcgcccagccctctctcctcctcttgttggatttggaggtggagagaagatgggaagggaggaccaaagggacagtattcagcacccatgctgcacgacactgggcaggttctggaacctgtccgtgccttatcttccttgtctgtaaatggagcatcccaactcacaaggtggttgtaagggtggcgtgaggtcacacactaaaagtgcttagaattgtgcagggcccctgatgttagctatcattcattattgttcttctagggtgtttcctgtgttggtctgggtgctccctgttgcaaatgacagccctaattcggactctcttaagcagcaaagggcacttttttgagtctgtacctggctacaagatgcaacttggtccaccccattgtcaccagcatcctctctctcgggctccatccaatgggcggccaccatcagcaccatattcatgcctcctggcacccagcacagtctcctccagcctccaggactccctctcgcttattggccagacttgggtcacatgtctgccccaggaccaatcgctgaagctagagctggaattgctgattggctccacctggctcacatgcgctgccctgcagtcaaaccatatataagggggggtgggaaataagagcacttgtggcctcaaagcactaacaggggctgttaccaggagacaggagataattctttgttaagccagtaaatattttgaatgcctgctatgccgcaagcattgttttaattgttgaggatatagatctgaacaaaaatgacaaaaacctgtaccttcagggggctgatattctgctggaggacatccgcaaagaaataaaggagctagctgtgagaggtggtaagtgctactggggagggcagagatttcggttttaacctgccaaggtgaaatttgagcaaagacctgaggagggggaagaagggatggtgaagataacctgaatgaaggctccaggcagagggagcagcaagttcaagggccctggggtgggctgtgctagcatgtgcaaggaacagtacagagaccgtgtggctggaaccaggtgtgcaagggagagaggggaaggcaataaggtcggagaggtgatggagcaggttgggtgggttcttgtagcccctttggagggtttttgcgttttactctgcgtgggatggaagttattgaaggccgttcagtggaggaaggcaggcccttgcttttgttttaacaggatctgtctggctgcttgatggaagggacgaggtagaagcagggaaaccagttaggaggctgttggaatccaggcaggattctcctatcactgaacactgtgcctcataggaggtccttcatacgtatttgtaaagtgaaagaaggaagagagagaaatgatcaggttctctggaccacctggggaggccgctaggtctgttgcggggctctggccccagcccgtgggacgtatctgcacacccacagtttgctttcttcccgcctttcatggacatttaccatctgaccagtgcctccttctgcctctggccccttcttcctctcccaccacctcagctgcctgattgttcccaaacttctctctcctcctcttgttggatttggagatcctcagaggaaaacagcccatctgggtctttctaaacaggtctggatgaggtcccaggtgtttgttcaccgctgtggtttgtggcattgggaaggtgagggcatcagtcactcagacccgttcctcttggcagatcggcagagaaattgagaactaaaaatgatgtttctaaatgctcaggacgttagctgtttccagagatgtctcctgggctggcgagcctttgccaaggtcctggagaagactcaggatggagaggaggagccagagagacctggaaaggaactggtgggaaggagaggtgttgtccacagcagggatggagtggcaggcggctggtgctgcgtgagttcactgggtgctctctcggttcagccactttgaatattttaccaagaaaaaggaaaaaaaacaaggcagaatcccttgtgtcatctttaattgatttcttcagcatccggagagaaactggcatgaggccacgagaagtctgagccaggggaattcatcagaaatcgacccactgatgacttgatctgatgaaataattagctcctgttattctctggcttctggtgccggagctttgacttccatccagaggagagcgggtgatagccgcccaggagtggggggtgctctgaaaccaacatgggagccaggaacgaagtccagctgactgtgccccgggctccatctttacccagcccagggctcccaatgaagactgcccttcccagcccccctgtaccctggcatcacaggcccagggccaaaaaggccctcagagggcacctggccacctggcaaatgaggaaactgaggctgggagactcttaggaacttgttcaaagatctgcttctagggggtcctggttgagctgcccaaatcgggccagactaggtttgaaccccttctctgccacttacccatatgatcgggggaaagtgattttaactctctgtgcctcagcttcttcatccataaaatgggtgaaatattgatgggtgggtgtgcatattaattgggttgacacctgcaaacagctcagagcagagactggagtgtgctgcaagctttcagaaaggttttcctgtgattggtttctggtttcagagagttgctatttgtagggcaccccatcggaattctcccaatattagcactccacgtctgtctctctgaaggaacgtgaatgtgcatcttagaacgctggctgctgcaatcgtagtttcaagtgcaaagcatcccgtagtgtttcccgatggagggacatgggccactgataatgtattagtctgttttcacgctgctgataaagacatacccgagactgggtaatttaaaagaaaaagatttaatggactcattgttccatgtggctggggaggccttacaatcatggtggaaggtgaaaggcacgtcttatgtgatggcagacaaaagaagatgagaaccaagcaaaaggggaaaccctttataaaaccgtcagatctcatgagacttattcactaccatgagaacagtatgggggaaccacccccatgattcaattatctcccaccaggtccctcccacaacacgtgggaattatgggcgctacaagtcaagatgagatttgggtgaggacacagccaaaccatatcagatacacaacatagtttgaggattactctgatttggggtggttcagggactgattcgatggctagagtttgtctccttttcagctgtctggcagcctccagttacctccagcagaaagtctcagatggtgctaatgtgctttgactcctttcaacacctgctaatctcacttcaaaagagagtgcgagcgcgagggcacgcgaagcctgggaagctatttgcatcaagttccactgattcagctttctttgacttttatttgtacaattagctctacagggaagcgatgtccactttccatttatctttgggtaggaagttttcttttcccaaaacatgtgtttgtgtttttattttaaaatgaggccatttaaagaagcacgttaagcaaataatcactgaagggctctgcagattcagcagaaatcagggccgtggtccttgaacggaaagagttgggaaatccgagtttcgtgatgagaagcccacattgaacggtgagggagggcagaattcacatcccatccctgccatcttctgtctgggtggccttaggacagtaatgaaacctcagttttctctggggctaataatagtacttgcaggagggagccttggtggaggttgaaggagatttcagagtgcctgacgcaggacagctgcagcggtaggatcactctaataatggtttacattgtggaatatgtatcccagttagtactatggccaggctctagtcccagcacactgtatcaacacatttaatcctgcacacccatttcacagatgaggaaactgaggcacaaaggtgttaagttactagctcagggtctttcagcaagtaactccaaagtccacatccttaaccatcacaccacgtggcataaagcaggtgcccagcaggcagttgccgcagtggctctggctgtcatgaggtgtatgtttctgcagacgagagattgagaaggaaggtgttgttcaccctctggtcccatgaaactcacagttctcatgtcagacgactgcatcgagtgtgtccccagctcccctgaaattgtgactctcagagccacctgggaaggaggcattgagcggagcctgcttcctgctcccaggggaggtgctagaagggagacttgctgtcctggccagcctgacataggatacaggtccctgaatgaagtaaattagggtgcgcatcagggcagctgggagagttgattgaaagcactgttttcagaggcaggtgggcaaagggagcaaagaaatgatgctgcaccgaggaaccggtagcaacaggagcccttactttcccgagacttgatggggcaagaggagggagaggtgaactcagaactggggagacgctagagccaggaggggccccaggcaggagctgcatccacacacacagacacgaaggctactgcctggggagctactgcgtgcgggaggagaataaatgcacggacttcccaccacctcccatgctgcagcctcccagccggaagccagagagcagggacgtgccgaccgtgccatctgtagagctcagcctcccagggtgccaagcagagctgggggagaaatggagcaggagtgacccttcctggggtttttcaaccatagcgctgcccagagaacacagtggccagctcctcgttggtgtccatggagggtggctggggcaaggcatcagtgatggacgcctctgagccatgtagacccaagctatggcacggccctgccaagtccagcttccctcactctgcagaactcaaaggaccttagcagaacctccgttcctttatttatctatttctttgtgccaaggcctggagacagccatgaataacataagcctgtctctgtcctcagggagctgaccccctagtggggaagaattggacaataaataagaaattgcaggctgcagtagtgattacaagagaaataaaaccggttataaaatgcagagtgcctgggttgggggcccccgctttaaatagggtggccagggcaggcctctctgaggtgatgacgtttgttcttttgacagaaagagccaggagtacaaagcaggagtttgttgttgttgttgttgtttttgagacggagtctcactctgtcacccaggctggagtgcaatgacatgatctcggctcactgcaacctccatttcccaggttcaagcgattctcctgcctcagcctcccgagtagctgggattacaggcatgtgccaccatgcccagctaatttgcgtatttttagtagagatggggtttcaccatgttgatcaggctggtctcgaactcctgacctcaggtgatccacctgcctcagcctgccaaagtgctggaattacagatgtgagccactgcgcacagctgcgggagttatttttaaaagagcaggtgcaaagaccctggggcaaagagaagcttgacttgtccattcgacagaaagaagccagtagggctggaaaggagaggtcgaggagaagtgggcaggggccagatctcacgggccagggcagccctggcaagaagtttgcatcttatcctgtgagccatgagcagccagggaaggtgcggcaggtgagcacaggactggcactaaggtgaggcgagtgcctggcacttgtgcagcctgggagcgagcacccccttcagtctgtacctgcacgaggcactgtgccctcccctgcccagtgctgtgatctgatctgtattttaggaagattcctccggctgccctgggaaaatggaggatgggggcagggaagagggaggcgggagacccctcaggccaccttgcagtccccaggagagatgaagcaggcagcacatccccctgctgaacccggagaccttgctgagcctctgagtcatgactttgagctgatggctggggttccccatgaagggcaaggacaaacagaccctttcaaggtcacagcaacacagccacccccacagcacttggcttcctcccggcacatctgcaggctgtggctctctcgctcatgctctcttgttttaaataaatgataccaaaagtctatatctggacaggacttgaaggctcatttcctcaagaagtgaaaaaatgaccacggagagcaaagagcagggcgagattagagacctgcttgagccagagtcgcgtccccacctccccgcacccaccttcgctggtgacctagtctgacctggggccaggggggtgactgagggcacagtggcctgtggcaggtcttccccctccaccttttagcgctcaattttctctattgtcatttcatttattctgcaacttaaaactaataggctgggcacagtggctcacacctataaccccagcactttgggaggccagggcaggtggatcacctgagttcaggagttcaagaccagcctggccaacatggtgaaaccccatctctaccaaaaatacaaaaaattagccgggcgtggtggcaggcgcctgtaatcccagcttctctagaggctgaggcaggagaatcgcttgaacaccaggaggcagaggtcgcagtgagcccagatggcgtcattgcactccagcctgagcaacaagagcaaaactctgtctgggaaaaaaaaaaaaaaaaaaaaaggaatacttttttgcccaactacaagatcccttaacaaggggctttcacacgcatccccagcagactgaaatcttacaacagccctgtctactcattttgttcatggggaaaccgaggttccaaacgggcttgctcacgggaaaactgagccagtgagtggaagatctgccactcacacatgccagttgtccagcccaaaacatccagctccaggctctcgtttaaacccctgattgaatcccccgctgctggggagctggaacttcatctccctcacctctgtaccccacggtgcgggcagatgcaagaggacggcaaatattcaccccttgagaccagcccgctgctgttcctctccctggggacgatttgtctgtggagttgggtggattattcagagacggctgttatctgactcgggtcttgggctgccaccgacacatcagaggctcactggatccagggaagaaattgtttctgcagaagtggccacagaaggcttttctgccagtctgttgaccaagcaaactgtaaagactttgctaacttcagcggagttcggttttcactctgccatagccacccctgttcaaagaaactcccattgttcatgccagccgccatacaaatcattatgcaagaatgagcagccggcagccttgacataaatattgacctgattcttcctcctcctctagatctgcgagtgaagagggacgagggaaaagaaacaaagccacagacgcaacttgagactcccgcatcccaaaagaagcaccagatcagcaaaaaaagaagatgggccccccgagcctcgtgctgtgcttgctgtccgcaactgtgttctccctgctgggtggaagctcggccttcctgtcgcaccaccgcctgaaaggcaggtttcagagggaccgcaggaacatccgccccaacatcatcctggtgctgacggacgaccaggatgtggagctgggtaagcctcggggccccagggtggcacctcggcccctcggagcagggtccctgggttaggctgaggctcctgaggcaaggcggtggtgttgatgcgtcgtgctcacttttgagtacattgaaaccaagacacgggccacccacacgtgtttggggtcacaactgggtcctcaaggttaggggtctctacccttctccagttgcacaaccgttcctggatttctccaaagagttaaagagaacaggctgggcgctatggctcatgcttgtaatcccagcacgttgggaggccgaggcaggtggatcacctgaagtcaggggttcgagaccagcctggccaacgtggtgaaaccccgtctttactaaaactacagaaatgagccaggcatgatggcgcacacctgtaaccccagctactgaggagactggggcacaagaatcacttgaatccaggagaaggaggttgcagtgagtggaggtcatgccactacactccagcctgggtgacagagtgagactctgtctcaaaaaaaaaaaaaaaagatgagacatgagcctggagccaaattttggaggctcttgtgggttgtggcaaagactgtcaatcattgatcccgtgaagggtgatccctcagcctctgtccactcttaaaggataacagcgtgttgttggtggcaacaaatgtgaaggttgactaggttagccttgacaacctgaatttgtcttttagctaccaggaaaaggcaatttacataaaaccaagttgttccttgcaatgctttgtattaatgatcacaagtatagtttttttcctccgggagcttctcagtgcagaaagaatttgtagccaggaagcaatcagagcccagagcttttattgacaatttgacacataggatacctatctcctggcagcatttagaatgaggcgcatttgataactatggggagtctgcagactgtggccagagaggtgtgtttcgtttcttgaagaattttgcagaggggtcttgcaggcagcacctggacctcagagcttcttggtctcacattgtgtagccccgacgctgtttcggctatagtcatgcttagaatttccgatgccctgcacgtttgttcattcatccagcagatgtttattacgcatttgttgcattcagtgcactgtgtcaggagccagagaactaagggaggctcattccaggtgaggagaacaggaaattcaaagatactgagatagaaatgggctcggtggtttggagcaaaaaaaaaaagtgccagggagccggagtggagggagctggggccgtgatggagagagatgaagctgaggagctgacttggcccgggttgcaccaggccttgtggccatggtgggggctttgagtttgattcttagtaaaatagacatggatgagggggccttaagaagaggaaggccgtgacctcacttaggttctaacaggatcccccagctcttttgatgaaattaaatcgcaggggtaagggcagaaacaggacactcattcagaggccgatggggtgatagggcagtgatgatggaagctcagacccgggtgctgagatgcggtcccacctgatgtatatttgggaaataaactgatcaatgggttaggtatgtgggttatggaaaagatacgtttcaagggcagccgctagatttggggcccgaatcaacaggtgagtggctgaatacccactcttaggaacaacacatttttgcaacatgatccagctaagtctcatgtctgaatctgactgaattttgcatctgtgacttgtgaataaaaccaacagtgtatgcagataaaaagaaagcaaaggcatatgcagatataaggaaaccaacagcgtatgcagatacaaggaaaccaatagcaggtatgaagtagacacaggagagaggggaacaaagaaagccgtggctgacttaaaatacagagatttcttctctccatttgacagatggaaaaactgaggcagagagaagtcacttgtccaagtttgcacagctagaatgtgattaaacatgatttgagctgggtgcagtggctcacgcctgtaatcccagcattttgggagcctgaggatcacttgaggccaggagttcgagaccagcctgggcaacatagtgagaccccccccgtcttaacaaaaaatgtaaaaatcagccaaggatggtggcacacacctgtagtagcagctaatgggaggctgaggtggaggatcacttgagcccaagaggtcaaggctgcagtgagcctaggtcacaccactgttctctagcctgggcaatagaacaaaaccccatcttagaaaaaaagagaaaaacaagatttgaacccagaacgcgtgatcttagccactgctctatttagccagattcctgggatggatattgagttgttttcagattggtagcgtgtgcgtttgttagtttttcactgttacggatattgttgctggaaatttaaacaggcatcgttgcacagacaagggagtgcttctgaaggataaattctaggaggtggatgcggtgggtttagagcccctggtgttcagtggcctgtgtcagctcttgcccaatagcactacacagcatagattagggcctacaagtcttgccctctataaacaagccagacctcttccaccagcagcactgggttttgaaggaggcaagggatgggaaggtggttgtgggaggggcatgataggctttttataaaccactagacagacccagatcaataatgcatgtcccaaaaaagcccaatacattatctcacagtctctgctacaactggcatgcagcgggtggtcctaaaaaatttatcatttgctattttctgcccatccgtgcagcagttctgacagccctctgggctggagacttcttgactgagataatcccaggattctttccagtcccaggacagagaacagacgtccatcctcattagggtccggttgggaggactggtgccagatacacaagacgaggggcttgttctgtttcctaattgcaaggttggggggttcggggctgtaccacgtatattcaattttcctttccctgcacgcatttgactccctaagctgtcatttggaattatcaaatgcccaggggaactgcttccagggccatactagttcgtaagtggcctaaattatcattacatgtttaaagtagttggggacatccctgtgtctcaatggccctctgagaccaacggacttttgctggacttccgctccaaaagaataagagggaagcacatggaggtaaaggtctcgtttgcagacgtcctttgttcagggaggcagtagaatctttgggctctgccagggtttactgatttaatttgatctaaacctctggggagcctctggggctccagcaggctctgagacagcaagaggattaagacatggttctggcctggagcaagagaatttttgcagcatcccagttctgatctatgacttgagaatttctttaactggacttatttttgaagcttaaatattattttaaaaggaacctccaaattctgactgtaaaggaaaaaaccaatacccattgccttcggcaaaggatcactgtaaaaccaaacacagtgaaaaccaagtcgtgtttttaaatttcagcaagatgctgcctcccagaaagccagtgtgtctctactgtaatgagggtgacgggcagtttcagaagcggcattaaaggtgaagtagcacctgccaagactttcttcttggcctcatcagcaggatagagactagaaaagagaagaactttctcaagcttttgatgtgggggtcccacttacatggggaccacttggtggtggctcttgtatcagagggttaaggacacagccagactccaaaccccagaatatcagagcggattccccagtgctcattttcctgagtgttcacaccaggcagagatgggtgccttttcgaggcccctcagattgtcggatttgaagtgtgccccacgagactgcatccagtgtttgcatttcttttcttttctttctttttttttttttttttttttgagagagtctcactctgtcacccaggctggagtacagtggcgcaatctcggctcactgcaacctctgcctcctgggttcacgtgattctcctgcctcagcctcccaagtagctggaattacaggtgcccgctaccacacccagctaatttttgtatttttagtagattcagggtttcgccatgttggccaggttggcctcgaactcctgacctcaagcagtccgccgcctcggcctcccaaaatgctgggatcgcaggcgtgagccaccacacctggcctgatgtttgcatttcaaaagaattctttgcctctcagaacatctttatttttatttgtttatattttttgagacggggtctcgctctgtcacccaggatggaatgcagtggtgtgatcactactcactgcagcctcgacctcctgagcttaagcaatcctcttaccccagcccccgaagtagctgggactacaggtgcgcaccatcacactcagctaattttgggagtttttggggttttttttttttttttttagagatgggcttttgccatgttgctcaggctggttgcaaactcctgagctcaaacaatccgccccccattggcctcccaaagtgctggaattgcaggtgcgagccgctgcacccagcctatcagaacatctttaaatgaaaatactccgagtaaagttgcaagggtaagagctgtctcattagccaccaggttcaaatcctcactctaccattgaccatgtgtccttgggaaagatttgccctctctgtgcctcagtttactcatctataaagtggagatgatgatctgtttccctggcattcttgtgaggaatacctggcacctgtcatatgtgtgacagtttgctctcacttgggttgttaaagccatcctctgttagagcaccctgggccaatgccacagtgttgtttgtctacagcaagctttgcatatcaaaacgacattaaaatctaaatgtctcatggcactgaacagcaacattagagtctcctcccagctgacacagtggggtgagtgctgtccacgctcatgcaggtgagctggcacccactctgccaggtatgtgagcctggcatggttacataccccataatttgagtgacacttgtcaatcaagtttggcatgggttcttctgccattactgcctctgctgatgaacagagttgcaccatcatggctgttgaaaagcaactgagtggtggttttggggcctgcaaaagtgccatgggaaccagccttccactgggtgttaaaaacgcgtgtgtcacaaccactctctgtcagcctggattctctcagttacgagtgatgtaaacccaactcgagcaggattgaggaatcaaaaaggggactttattggactcatatgaataagtccaagtatacattgagcttcaggtgcggctggatctaggagctttgtctctgggtggcctctgtccctccatctccctgacctcagctttcctccaagttggctttactctcaggccagctctccaggcagcattcctggcatcactagacccacatgaacaccatacaggtgcaagccatccctgtggaaagagagcttctctcacctagaagagagtacccaaattgagtctttttggtctgacactgtctgggacttctggtcaaccagattcaggggaatggaacacagtggttggccagatggagtcaggtgcacattcctggagccaggactggagccaaccccacttgaaccatgaggactgggattgggatagagcagattccccaaaggaaaattcagaagctagtgccagaagaaggcaggtagctggtgtgcagtccagttagagagatgctcgtgacaccctcacatggcgctctctgaagcagctgctcaaactgtggaccagacttattcattcggcaggtgtttcctgagcacctactgtatgccaaaggagatccaacagcaaacaaactaaacagagcttacattctaatgcaagagttaacaagacacatcgaatctatagtacataaaagagcagaaagtgaggaggagaataaagccaggaggggaagccaggaggggcgatcaaccaggagaaaggtggagaaaagaatcgctgggattttctatagggtggtctcattgggaaggggaaatctgagcaaagaaggtaaggaaaccagtcaagggggatccctggggaagagcactccaggcagagggaacggtgtgtgctaaggccctgaggcagatgcggtctcagcaggctcagagccgcaaagaggccagagcagcgtgcacaagagcagcaggaagaatgaacggtaatagggaggtggtggttggatggaccgtgcaaggcatgagcctttgaatgggaggaagattttggctttctgagtgagatggacaccaatagaggacattgagcagaggaggacattgagcatctgatttgtgtcttcataggacccctctagaagaatagactgaataggtgtaatgagagcagggtgtccagtaaggagtctactgcaacagtccacgcatgagatgagcccaatgaggagtctattgcaatggtccaggcatgagatgatagcggttcagaccagagtgaggaaagtagtaagtgctggtcatatttcaaaggtagagctgatacaagtgctgatggaactgatgagggatggtaaagaagagttgagaatgactccaaggttgtggcctgaaaaactatgagaatggattttctgtgtacagagatggggaaaaccatggttagaagctgtgggccgggtgcggtggctcacacctgtgatcccagcgctttgggaggccaaggcacgcggatcaagaggtcaggagatcgagaccatcctggccaacatagtgaaaccccatctctactaaaaatacaaaaattagcggggcatggtggcacacgcctatagtcccagctactcgggaggctgaggcaggagatttggttgaacccaggaggcggaggttgcagtgagctgagatcgcgccactgcactccagcctggcgacagagcgagactctgtctcaatacatcaataaatcaataaataaagctcagttctggacctgggaagttgcaggtgcctgtgaaaagccaacaggaactgtccaataggcagccacatcagtcagacgttgaagagagaggcccaggcctgggtggacttagagtagggcacggtggggatcgtatacaaactgtgtgcttgtttgtgctttactgaatctgagaccctccccagatcctgaaagttgcaggaatacagcctggagaactgtccagtgggagaggcaggcttttgaaagaaagatgtagcagaggtctggccggcctcctgttttccactttccatctgtgaacacaaggaaaccacaccctgtgccacagcctgatatccaggagatcaattccaaatcgcaggctcaagtactctctgtaggggccagatggctggaagcccaggacaacatacccagattccagacaccagatcagtggtaacttccagctcagcctctctgagatcccacctcctggccttctagccgctgatcactagaggagaaaaaacatgtggatgcaggttatctcaggaagaagagaggctcattcggacccacactggtgttcagcttgccaagcacattcctgtaagatgattttttttcaattcagcaacatttgggagatcacttgagttctggaagttaagtgtatcaggattaggtttggctgcatgtaaaagaaaacataaaataacagtggcttaaacaagacagaattatacaaatgtctggaggtaggcagtctagggctggcttggtggcttcaaggttatcagggacccaagctccttctctgcctttctgttccatcatacttactgcgtagcttccatctgcaaagtcaccttgtggttagaacagctgctggagctccagctctcatagccacactctaggcagcaagaagaaggaagcagaggcagaagggcaggaaaaagaaaaaaaaaaaaaccacttcagaagtcacatgcaacacgaatagatcttatttacttagccacatgatctcagcgagaattataaagcacatgcaaatttgaatcattggaagacggtttaagtgttttttgctaaggtgtgagcaagtgcgaggaaaccactagggatagggcagtgccccaggctaattagcaacagtgggacaagaggttactggaacccagggacacagagggtcaccccacaagagctgtcaccctctgttggcaccacagagaggaaggtggaggaatctgtccaccaacctcactctcttctttctccgatctcctgccaggggcccttgtcagtcaaatccaacccaaagcccagagagcgaaggggcttgttgaaccagcacctccaggccagtgccctggggtggagaactggacagagagcagggctggaaggcggcaggcaggctcctggcacatctttggccataagggaatctgggaaatgtttcctagctgggtgcattgaaaataaagtcacagcctgatcagaggaagaaggagaaagagatatttgtgggcaactgagggtctcagcaacaccagagatcaggagcaagggtcccagtgagggcagctcccctagcagtgggaagtggggttgtgtggcctaacactggggagacctgtgtcatgaggagacattcatgtggaaacccgaggcaggagcactgcaggcagaagcacggcacgtgcaagagccctgtggcaggaacaggtttcccaggacgttggaggagggcagcaggacatgggaatgaaggggaggaggatggggaagagggcggcagagagcagacaggggagacctggtggtccccagcaggccatgcagcagggtctggatttgattgcatgcccgatggaaggtccccagaatgttctgagctggtcagctatgcgtgcatgttctcagaggcacaccccggctgtaggtgaagagggtggcccagggacaagagcggaagcagggagatcaggtggtgtttgcagcagtccaggtgggagatgctggtggtacggagcaggacggggcactgcagagcgagagaggtgggtggattccggtgctgcttggaaggtcggcagggtttgctttatggatcgtgagtgggtgggtgagggaagaggaatcggggatgactcctaggtttttggctgagccgttgggcagatggcagtgccatttacagagatgggaaggcgggggcaggaggaacagattgggagaggtggggaagggggggacattaggttgctttgcaaacatcacccaccaggcctgtggctgggcagcagctctgcgtagccccttctgaaaagtggggaaaacaccctggaagccctgccccattgaataaatatcccctcccagggatggtgattgtagcattttgagttagaggaatatttctgggtggagtttctcagagaggaaatgaccaatcattgcagagcctcgtcaattacacccaagccctgccctttcccacgtgtgctctgccacctctctgctatggttgacgatgaccatagcagaattttctcccaggaacttctgcaaccagaggcagcagaaagcaacggagaaaaaattaactgcatggtctctctgacaacccgatgcttattaatagaatctcagtcctgcctcctcgacatctgcctaattgattttgggtttaggaaccgatttggagccttggcttttcgtagctgaaaccagcaataacatttgtctttattttgtaatgtccaagagtcaggaatggttcacctttgcaccaacaaaagaaaaacaacaacctctgagcaacaggtctccagaatccagtgtaattattctggattgagttacaggcacagcaagagttgccaccagcagcagtgagcacatctatactaggtgaaaaataagagattccctttttatgtgtgtgtgtgtgtatatatatatatatatatatatatttttttttttttatttatttaagttctagggtacatgtgcacaacgtgcagttttgttacatatgtatatgtgtgccatgttggtgtgctgcacccgttaactcgtcatttacattaggtatatctcctaatgctatccctcccctctccccccaccccacaacaggccccagtgtgtgatgttccccttcctgtgtccaagtgttctcattgttcaattcccacctatgagtgagaacgtgcagtgtttggtcttttgtccttgtgataatttgctgagaatgatggtttcgagcttcatccatgtccctacaaaggacatgaactcatccttcttttgcccaagtgtggctcccgatttctgctgtttgtgccccaggcctttctctcccctctgctggagacagagctattctggggcagttggtcaggtctgatggagcccagcctgctgcagcccattagcaggtgttgccttggtcatggcagggagctcacaagctgatcctacagcactgcggacattccagggacatttgagggccaggagagggctgctgaatgagttccagcctgttaggtggacaccagtagccagaggtcagtgcaggacacaggttctttcccgcctgtggctcgacctcatagccctcttcatcccccacctgtccaggtcaagactctgttccaacctgtacctgaccccacagcctctcttccccactgaatgcctgttctctgcaggtctctgggccccagtagagcgttacctttgcagatttatttagctgctcccttcacttggaattgaatcagctaagggttgcaaactccatgcccacagggctaggcacgtgctggcaaggaggaagtcggcatggtaggggtggtggaagaccagaggaggaccttgtcaagtgggccttcgctactcaggtccagcccactgtgggcccatcaaagccaggtctttgcatttttcaagcaaagccagaaagctgaattgatgtgaaatctcgcaattaaagaaaaaggccattcaatttttaaaatcctttccttttgggcagacctaaatcaaacacacatgcagacaagatttagtctagagggactccgttttttaactccgcgtgagacgatacttgttgaaaagctgacatgtggccgggcacagtggctcactcctgtaatcccagcactttgggaggtcaaggcaggtggatcacttaaggccaggagttcaagaacagcctggctaacatggtgaaaccccatctctactaaaaataaaaaaaattagccgggaatgatagtgggagcctgtaatcccagctactcaggaggctgaggcaggagaatcacttgaacccaggaggcagaggttgcaatgaaccgagatggtgccattgcactccagcctgggtgacaagagagaaactctgtctcaaataagtaaataaataaataaaagctggcatgcattaagtgctttctgtatgtcaagcattgaactaaaaaagtgtgtgtgtatgtgtatatatatatatatatatatatatatatatatatatatatatatatttttttttttttttttttttttttttttccctcaaaactcagaacaaccctgagaaggaggcactgttattctcccgctttgcagatggggaaactgaggtgcagggtggctaaatcatttgcacaaggtacctggttaataggaagtggcagaaatcaagatttggaatcaggccttctgactgaaaacctttttcatcctattgagtatggtgacatagcgataggttctagaatctatcctagaatttcatagtcaaaccttatacctaaagttatttatgggctgtgtttttacagacagggaagctgaagctcaaagtcagtgatttacggcagttcacacctcattcttggcctctcaattcagtgctctttggcacccaaagtctacagatgaaaaaggacctggtgattcagtctaggactgaagtgtatatgtgcatctgtttgtgtgtgtgttatacacacacacacatattcatttgtagcagctgaacccttttaacatacaaaacaaaacaggtaagagaggaatcaggagaaggacgcggcctggagaggggtgtgtggtgcccccttcatcctcagcctgccccatgccaggtggactttaatgcccctctcctcaaggaaagaaagcacagcttgggggcccctgggagcagactggccccaggtagagtgtagcaggtgatatgtggccacaacagtggccacagtggataacagtgttatcccaacactgggaggccaaggcaggaggatcacttgagccctggagttcaagaccatctatagatttttcggtcatctatagaaagcccactgtgtgccctcttcccctaaatcccagggcctgcttcacataggggtagcacacagacaggcctgcagacccgtgcaggaatgccaagtgccaaatcctgccctctcccattgttctagaaacctgtggccctcttgctgcatttatttattttttatttattcaggagttcaagaccagcctggtcaacatggtgtaaccctgtctctactaaaaatacacaccaaaaaaaatagctgggcatggtggtacttgcctgtaatcccagctgctcgggaggctgaggcaggagaatcgcttgaacccaggaggtagaggttgcagtgagccgagatcgcgccgctgcactccagcctgaaagacagagggagactccatctcaaaacaatcaataaaattacacaagcaaaactttaaaatatccaagtaatgcaaagcagagatagcccttgactccccacccaccgtgtaccccactcaccccaaaggcacctgcatgtcccctaagaatctgtagcctgcatgtcccctaagaatgtttactcttcatttactcacacggaagcaccaggaagagcagcaaaaggcaagaaggaaggggagggcatgattctaatcagcacagtccagagaaagccttgctgagaaagtgatatttgcagaaacctgaaggcaatgagggactgagtctgggctgaggagtggcaggtgcaaaggtcctgaggcagaagcgtgcttggtgtgttcgaggaacaacaaggaggaggtcaatgtgactggagcagaggaagcttagagagagagcgcacagtaggagttgtagttggggcgagtgagcatccggatcactgaggaccttgtaggacagagggaggactttgatttttactctgagtgaggcgggcagtcactggaagacaaagagcaacgaatatgatgatttcactgactgttttaaaagaagtcctggccaggcaggcatggtggctcatgcctgttatcccaacactttgggaggccaaggaaggaggatcacttgagcccagcagttcaagaccagcccgggcaacgtggtgaagccccacctgtacaaaaaatacaaaaattagctgagtgtggtagtgtacacctgtaattccagctactcaggaggtggaggtgggaggatcacctgaacctggggaggtcgaggctgcagtgagccgtgatcacactactgcactccagcctgggtacagagtgagaccctgtctcaaaagaaaaagcctctggccaccaaacggagaatagaacagcttgggagcctactgcaatagtccaggcagagaaaacagtgattagagtgaatttaagtcaaggtcctgtgtttactgactccgcctttatttttctccctgccccattcttccttctgctgctttccctaggaggccctgccatcacagactctaataatatctataattttaagaaactagccataggaaggcatctcactagttatacatcaaaatcacccaagttgagggccgcagggatttgtctgggaggggtacagggttcccctgctcccagctgaagcaggcctccaacagataggagccacctaagcctcaggaatggcaaaaaaaaaaaaaaaaaaaaaaaaaaaaaatcatgttttgaatcctgaaactccctggcaccttgctaagtccccatagatagtgtttgctctgacttagacctttagaagagcaaattcattcagcatttcctatgacactggcaacgtcgtcatctgtggcaggtcagcaaaatattgattttatcaacgatggacttactggatggtgcatccaaaaatatatatatataactcacaccttaattctctaactcgacgtagttaacttggattgagattaaagggttttttcttaaatcacgttaaatacaaatatcaaacaaatcatagcacagtggtacacaggcccccaaaaagccaccgtgaatggggaggcagttcaggagtgtcatgggagaaactgcattctagcagttgggtggtttgggcccccaagtttaaatcccaacagatgggcctgggggtgaggcctctccagcccatcagagtcacagaggtgtcagagtgacctcaccctcaacccagtatggtgggaaggtttggtcatggaaagaaaccgggtctgtttttgtctgcatgtccccaggtttatgttggacgaaagaagttgaggttggctggcccagctgcattgaaaagcttgaaaactggccttttcatttctgtgtggccgtgtcgttcaggtccttccctcccgtcggagctgtccttctgcattagggctggggctgggcaaggggatgagatcatatgtttttgtgttacagaggtaggtttacacagcctcgtcgctatggcagttttaataaagcaggttactgtccccaaggggaggcttagcacatagcactgcccatgcacagatgctgctgtcattccggggcactgttgtcctttactcgtggattgacacagcgctcctccgccagctgatttgggaagggtgagtgctggccaagagcacctcacagctcgcttcctctggaatgaggaggaaggagatctaagcatttcgagaccctggatctgagcccattaaaaacaagaaatggttctggaggctgttcactgtttgccaaggcagcactgggggctgcggagtgcaggtgatttcatcaggtgacggcctgccctgcgttcccttccaggagaagggtctgaccagttaggtgggtggccagcttttgtcctttctgcagggtctggagaccgagagaggctgagctctcactaccagctgcttcgtcctttctccttcgtgtttgggactagggagcaaaggatcgattccacttggggtgccctggactcgtgcatttaagaaatatttatgagcacccactgcgtgccaggcactgttctaggctgagctgtggagccatcaaaagtcacagggaacagcaaacgggatcagtagataaaaacataaaagtatatcatgtgttagatgatgagtgcagggttgaaaatgtcaggcaaggaagggagtagaaaatattgggggccagggaagactccacggagaagggaacttttgagtaaagacaagaagggggtgagggcaccgctgcggggctccgggggagaggtcttccaggcagaaggaacagcagggcacaggttctgggatgggagcacgcctggtcagtctgtggacagagcaggggaccctgtggctgcagagagtgggcggagagggggatggggttagggaggggaggggattgggtcccaccacactctgtggatggccagaaagatttgggctcctctgagtgagcaggagccccggagagtgtcaggagaggagactctggctacaccgtggggaataagtgactggagtccaatcaggaagcaactggcctgatttcagggagagaggatgatcgcctgacccacgggggaggtggcaagggtacgatcgtgggtgtttacgttgaagagagggcaacaggctttgctgatggattggatgtgggaactgaaagatgggaggaaccgtagccaagatgattgcccaagtacccggaggaaaggggagtggcttcgggaggagcaggagggacggtgacatcagggcttggctgtgggtgtggcacctgaggtctaatcgacagccgaatgacatcaatggatgtcagggttgtaccaagccacacatcaagggatgtcaggtccgggttttaccaagccaatgattgccaaattctaatcattccctcacaattttcatcatatatctgtgtgccacttgtacgattatttactttttaaaaatcggctgcaattgtttgttgttgttgttgttttaagaggatttccaccaccctaaaggaaaagctaaggttacttgccctaagtagaaggaaaccaagccacgcaattaatctaaggcaatgccaccccctgcctggagctcccagtggcctttcacaccaccagcatccctggtgtttggtgatgtgaccctgggccacccccacccctggtgtgcctgatgaagtcaccactagaggacccccttctgggtcaccaagggaccattctgagcttaactgaagccaagagtggaccaagagcatggggacctctatgcacttcctcaggacactgttaccacctcccgtgtgactgtgacattttgtgaacgtgaaactcagcaccccgcctctgctaggcttgagtcttcactgccttcccagctgtgcagccttagccagtcattcagctccccaggttcagttccctcttctgtcaaatgggccattgggagaattaagtgatgaatgtcttcagcccagccataagcattcagccagtgatagtcgccactattaattataatgattattactggcatagaagactgccctcttccccaggaataagttggagtgctctcagttccttagctatatcagaaggttgcaacacccaagccttcaggggtcgggcaggtaatgagagtgggtgcaggtggtgtaagactgtagggagcacgggggagtgtggcaaactggagagcacatatcctgtgtgatgctatttaatgtcacatttttaaaacccactctacaagacaccaacacacaggtctgtggacaccaactggtttggattcctgagatatgaaaacccgagtgtaagatagtattttatatgttaatttagctggtctctgttgagcacattatgtgccaggcactgtgctaggcagtgaacaaagtaggctgagtctctgcccttgtggtgaaggcagcaacatacaaataagtgaaatcaaaatgacttatgtttgaggacagtaactgctgtggagagacacggagcggggaagcagagtggagagtgctatgggttgcgggaggtggtttcaatacaggccagggaaggcctctccaagaaggtggtgtctgatcaataacttgaaggagacagaggtagccctgtgattggaggagtgagagcatcccaggctgggggtacggctgaggcaggggccaggaggtgggagggcggccaatgtgcaatactgggacctcaggggcacgaccttggtgccttgattggtggtaaaaatttaaagtagaagcagctgattgctgagcagagggccttccccagatcccaggaggctgcagtgggtctgatgcttgttttcaggtttctagggggttgctaggtgattgggatcacagccttcacatgcctggtagaccctgttttggtttcccactgctgtcctaacagatcacaaactgggtggcttaaaacaacagaaatttactctctcaacagttctggaggccggaagtccaaaatcaaggtgttagcatggctgtgcttcctcagaaggctctaggggagagcccttccttgcctcttccagccctggggaccctaggagttccttgttccttggcttgtatgtgcatccctccagtctctgcttccctttgaatgtggccttcccctctgtgcctgtgcgtcttctccactttgtgtcctatgtggacacttgtcactggatttagggcccacctggggaatccagaacaaatctcatttcagtagcctcaatttaattacatctgcaaagacaccctgtattggtctgtcttcatgctgctgataaagatatacccgagactgggtaatttagaaagaaaaagaggtttaatggacttagttccatgtggctggggaggcctcaggatcatggcagaaggtgaaaggcacatcttacatggcggtaggcaagagagaatgagaaccaagcaagagggaaaacctttataaaaccatcaaatctcgtgagacttattcactaccaagagaacagtatgggggaaacaacccccatgattcaactgtctcccatcagatccctctcacaacacgtgggaaatatgggagccacaattcaagatgagatttgggtggggacacagccaaaccatatcaccctctttccaaatatggtcacattcacagcttccagaaattaggacatggtcttatctttaggggacgggggcaccgttcaacccactgcacaccttaagaactgcaaggaaaaggggaaaaaccaaggatggccatagaagaaggagagagggtttccatggaatatttccatcaaatcactaagggtctgggtaccaaccacagcatacaattgagcatgcactcgtcacacctatgttgagtacccactgtgtgtcacacacggcagcagtgctgaggattcagcgctgagcggagcacacagcctttgccctcctgggaccttggcctgcacgcagtagggctcccacacacgttcatttgcttccttccttccttcttgcctttcttcctaagtgtcttgctctgcttacagcttggttgagaaacaagagcaggcatggccaggcaaggtggttcatgactgtaatgacagcactttgggaggcagaggcaggcggatcacttgaggtcagaaattccagaccagcctggccaacatggcgaaacgtcatctctactaaaaatacagaaactagctgcgtataggggctacttgggaggctgaggcaggggaatcgcttgaacccgggaagcagagattgcagtgagtcaagatcacaccactgcactccagcctgggcaacagagcaagactctgtctcaaaaaaaaaaaaaaaaaaaaaaaaacaaagaaaagaaagaaacaagagcaggcatgaccgaaacctcgaagcctggggtatgatcagtactcaggacacatgctgcaagactgctcagagctctcaagcccagggtggtgccagaggctccctacgagagggtactaggccgatgggttggatttggggtgaggggtggtgggttccaggctcgaagaaaagtgtggacaagaggccagcagggtttgtggctgatggcagagcacctcagccagggaatactcagggagaaggtttgccaccaggttggcatgaccagatttcagtaagagcaaacaattattgggaaagttccaaagaaaagaaagtataatcttccctcaatttacatggtggttggtttccaaaagaaaaaacaaaacaatgtatattaataccctgcaaaaacaatgttgtgtttaaaatttgtaaaacagtttgattccagtctcaggtcatttataaacaggtttttacctgccttgcaggtagagatgcaattacagtaccggacagtgacagtacagtcacttacagtcactcacctccagcaccattgcaaaatcctccagactccagacctggacctcaggagtgtccaggtggactcgggacccagggtccttcctgattatgcaggacagtcccaccgtgcagcagtggcccctgccccgtctgccccgtaggtctgcagaatgtgcccactccagacctagggatgccacgtgctgagagccccctggtgccggtgccgcccgggtctcctgccctgcgccttacttccacccttgacttgcaggttccatgcaggtgatgaacaagacccggcgcatcatggagcagggcggggcgcacttcatcaacgccttcgtgaccacacccatgtgctgcccctcacgctcctccatcctcactggcaagtacgtccacaaccacaacacctacaccaacaatgagaactgctcctcgccctcctggcaggcacagcacgagagccgcacctttgccgtgtacctcaatagcactggctaccggacaggtgagcagggacgggggcaggtgcaggaagggagtgacagccagggcgggcgtccctaggtgtggtctgcacaccactgcggtacccaagttgattctggatagcccctagagcaactctcttataatttcagagttgtgcatttatttctgtgtgtattaaagaaatacagatttatttgcctacagtagtgatgtaaagtgaccttgtcaaaggaatttgagtcccccaaaaaagtgagtcttttcaaactatgaatcatagtgtggagaggccataaggtgcccatgcatgagtttgcatcctctgttaatagttattaagcccatcagggactgtttcgttgacttcaaaccattagcttggaagaaggttccaaaacataggggtgggggatgggaattcatggaggggaacagataatggggctgtgtggtcgctttctacgtggcagtaaccaaggtggtgcagaaactgacatggtggttgactgtccacactcacccgtgtcatcctgggtggagggcgacccagttcctgtttgcttatccttcaggaggtctttggtgggctctgaaggctcacctgccaggctggttgtctgaggtagagatgcaattacagtatagtcacttacctgtagcgccattgcaaaaccctccagactcaattcatttaacttgctttaattaaaaataaataaatactccccgccttgggtaagaagccgcggcggttgtgaaatcaagatattgtggctcagatgttgcaaccccaggaagttgcatccaagtgacaaggggtttgtttgggtgggagtgccgcaagggaaggatggactcctcctccagccctgtccgcagtgctggacctgcagccctcgaggctgggcagcttcctctcagatacacagtgtgggctggcagggatgctttggtgtggggagcaagccagtaaggtgtgtcttcttacagcctcatcccatagccagaatcacctagaaagtatgttctgctgagaactaggaaggcctcgttcctataccttgttcctgtgtattgtgcgtgccattatgcagaatcaaccacctgttggttcccctgagcctctgcagaaagccacatgtgtcagaagttaccatggccaccaccctagatgattggcgggggcctggatgttgctagcagaagcaggacaggcaggcccgcagcacagcagtgggcccttattgaagatgcacctgcaacttggctctagaaagtacagccatgcactcaagagtgaccagccttgaaatgttttaaagtctgaatatttcactgaaaatcttattttaaaatatgccggcacagcttattttttctttaatgtatactgggggccaaagaaaatatgtctgaggagtgagtgtgtggctcacagactctcttttcacaacctctgggtgaaaggtctgtacagaaacctttcgttttggatgctggaagatcagtaaagaccctagacctgttctcatcaatccccctcatttcacagccagggccactgcagcccaaaaaagagacctgcccagagtcaaagtgaggtgtttgtggcataatcaaaatggaatgcaagatcatgggaattcagagggggcatggaaatagtattcatcagactgaaaggaaactcatatattctgtgccattttgagggctcagggtgggagctaaaggctagtgtttcaaaatcttacaggcgacatgagaaaatcaatcatttcaagaataaacattctctaaagtggatttcccaaacttgtccttgaatgtatgcaaatcaccaaaaagctgtctccctaaataagtgcttttattcaactatgattcattattataccctcatgaagactgggagcgtaatgtcaagtgtaaagagccagataccgagaacatttacgtttttgtaaaactgccactgagaattttattcattatatttagaatgccactctgtacaaagaatcccattccagccttactttcagaactcaggaccctgaaaacacctgtttagtctgatgaactggtgtactccttgttattacataataagagccacataccctgtatagtttccctctttgccctggcagctaggaagctcaggtttgagttttatattgagttgttgtttaaagtggaaatgtttttaaagatccaactgcgtgatatgttatactgatcagtgttgactaagaaaaatgacaaaaatctataatgaattcaaaaccttttagattattttttccttttagattgatttgtacatacatattagaatatactgtaaatttttaatcccccaaggaccaaaagtaaattgttcctgctgagtcttcagccatgttaaaccctgtgttcacgtggccacctagcaaagttggttcagttggatttaagtttggctgtgtgtgtgagagagaccggggatgtcaaataaaattccaagttgttctggtggccctgctctatgaagtggtcagagactccgactccatttctccttatttcccattggtgagaaacaagtcatatggccatgcatggcagcaaaggggcctgggaaatgtagtcttattctaggtggacatttgcccagatgaaagttattttactgtgggagaagaagaaaacggatactgaaggacaagtgaagtctaggccaccctaacagttattagccatttgtgtttgtgatactcgtttgaatagaggagatcagcccaaactgaggaagactgaccccagaaaaatgctacttaagtggaccaacatttcataataaatagtgcttttaatgtatttagtaaggtatttgatcttgaaatgaaactacaatgtttcgagaataactctgttatgttacatctctttttttctttttctgagacagagtcttgctctgtcacccagactggagtgcagtggcacagtctcagctcactacaacctctgcctcctgggttcaagcgattctcctgtctcagcctcctgaatagctgagattacagacgcctgccactacgcctgactaatttttgtattttttgtagagatggggttttgccatgttggccaagctggtctcaaactcctggcctcaagtgatccacctgccttggccttccaaagtgctgggattacatgcatgagccaacgcacccggccctctgttaggttgcatctaatgatatttaacaaatattgggctctagttgcaactaatgagttgattcttcaagcaagtgaattgacgaagtgtagggaggaatataatgtgtttcacaaattgaaatggatggcacaagatgatatcctttacttcactagggacatttttgcaaaagtatttgaggatttgatcaattttttcaagggcctctcctaattctctgacatctgaatcttcccctgtgaagtgcatctcatacttcatcatccttctcaatagtctcttctccttcatgtagtatctttatagaccaggtaattattcgtcagtggatttgcatgtgttttttgagctatcttccagcgtcattttaattaattttacaaaccctgcatcttttaaaatatttgcaatttcattttgcagtgatcttgctttgcatggccccatgtttgcagtggagattgacaaaagacaaaatgagagaagctaagtttaagcaggataaatatcaatttgttcatgaatatttctctgtatggcttcttacaacttgagggacttggatctcagatatgaatacccttggaaggatcaattgcatcctcaggttttttgttttctttgtttttttgtttgtttttgagacagggtctcactctgttgcccacgctggagtgcagtggcgtaatctcagctcactgcaacctccacctcccgggttcaagcgattctcctgcctcagcctccccactaactaggattacaggtgcgtgccaccacgcccagctaattttttgtatttttaatagagacggggtttcaccatgttggccaggctgacctcgaactcctgacctcaagcgatccaccctcctcggcctcccaaagggctaggattacaggtgtgagccactgcacctcgccacatcctcagtttttacaaaggttttatagtcatcctttaacacagttcagcagttgaagtgctgttgccctgcctgtgatcacttatatatccacaagtcaaagttgtacagtgttcccagaatgagacacctcccagctctctgcagagtggttgagggcattagctttgcctgggtttgaatccagtctctgctgctttctgcctgcatgaacttggacaagttatttagcttctgtgtcttggcctcctcaaccacagttaataatgtcacttaactcatagagttttgtgaagattaaatacattagaacagtgtctggtacatggtcgtggtaggcacttgggaaatttagcaatgatggctgggtgcagtggctcacacctgtaattccaacattttggggggccaaagtggaaggatcacctgaggccaggggttcgagaccagcttgggcaaaatagtgagatcccttctcaatttttaaaaaacagtaataaaaaaaagttagcaatgacgatgacgatttgcacaatagcacaacatcacacagcccacctcaggccagtgttctgatgaatgtcatggtaagttgcactcatggatcaaaatgtggcagcatgtgctcagcctctggtaatcagcaaaatgcaaacgcagccaacagtgcattatcacatcccagccatgaccacagcaaatatgaagaggtcccatcgcaccaaatgttggtgagaatgtaggaaaacaggaaatcatatgcgccagcagcatgatggtaaattgttccctccactttgaagaacagtttgccaatttctggcaaagctgaaaatggacatctccttctactcagcaattttactctggctgtgtccccctcggttctgaggaggtgatgttgatgtgtgagttctgcttgagcaagggaacacacttcctggctgccctgtttgctcttgaagatgtgtgatgctcatggcaatagattccctttagatccaacggacaggaaccccgactgcagctggcttcaaaaacattgaattttttgctccctaaacaggccaggcacggtgactgaagcctgtgatcccagcactttgggaggcagggatgggcggatcacctgaggtcaggagttcaagaccagcctgaccaacatggtgaaaccccgtctctactaaaaatacaaaaattagccaggcatggtgatgtacacctgtaatcccagctacaggggaggctgagacaggagaattgcttgaacctgggaggcggaggttgcagtgagccgagatcgcaccactgcactctagcctgggtgacagagtaagactctgtctcaaaaaaaaaaaaaaaaaaaaaaagagaagatacaggtgagtagcaggcagagtcggatcttgtggtttacgagtatcatgatcatatcacgaggctggaggtctggacatggtggctggcactccagcagctgtgtgcctccttgtccacatctggcaggagcaagagagcatccttttccagaatgctcaaggcatgagatcccttctgattggaccaccctgagtcacatgccagcccctgagccaatcatcatataaagcacatggtttgtgccaacttgcccagcgtggatcacctgctctgcagcagctggctgagtccctttttccccagcacttggactgccaggtagaaatcaagggctgctggaaagaataaggaaaagcatactggagtgccgatcacaattttactacactgcctttggcaaacaaaaaacaaaaaaaaagtaacatcagctggccgggcacagtggctcacgcctgtaatcccagcactctgggaagccgaggagggtggatcacaaggtcaggagtttgagactagcctggccaacatagtgaaacccgtctctactaaaaatacaaaaattagctgagtgtggtggtgggcgcctgtaatcccagctactagggaggctgaggtatgagaatcacttgaacccaggaggcggaggttgcagtgagccgagattgcaccactgcactccagcctggtgacagaatgagactccatctcaaaaaaaaagtaacaacaacaaaaaggcaaccttttccagctctttctggtgaactagattggagtgccattttctccccattgggataatgcctttctccttccacacctgaatctggcagttctgaagttgtttcccagccccagcttctgccatccggtccagactttcgcagagatggtggcgggccctctgcccttctgcatcatgttctaaaatgcgtcaggggagcagggggtacatgctccttacaagaccaggccttgccagggctctcagttggagcctgttttggggtttggccctgagcgccccagttattttcactcttctcgcacaaagctgggtagagaggtcagctgaggaccagaacctggccatcagccttgggcagctaccctcaccagggtctggggggcctctgtgtcctgatgaccccaccccatctacactacactacacttggggcaccccatcgccctctcacacaggaggatggaaaggcgcccgctaggcattttggcatccccaacaaatgagacttgttttttccctaaagcggtttcattcaggaccgcaggggcaggagggctgctgcgtgggccgtcctcctctgcaatgctataaagtggcccaatgcccctctttccctgccactctctggatctacccttagccccttgccctgaaccccatccaccctggcccctctgcctcctggccatcgccccagagctctccccagcacatcaagcatgagtccagcatcacttcctggtcccccgcctccccggcgcctctcacaggcttctcctcggcacctccagttttccagttgctcaggccaaaaccttagcaccattcttgattttttttttcctattcctttcacactccacattcagttcatcagcaaaccctgtcagctctgccttcaaaatatgcccagagtcccctctgctgccaccagcccatccgcgccactgtcttccccgcctgccctgttccaggtttctcctgggatcccccagcttctgcgtttatgaccccttggtctgttttcaatgcagcagccagaggggtctggtcagaacctagttcagatgctctttctcctctgggcagagccctccttggctcccacctactcagggtagaggccccgacagccacctcagggtcccagtgatccttcccttctctctgaaccctctcagcctcctggtctcccctcagtcactgtcctccagccacagcttctcaagcagtcagccacacctgacatgcacccactcacagtgctttgcacttctttccttttctcaaaacttctacacgtctgcactttcctcgtgtctgtgttccaatgctgcctcctcaaagaagccttccttgactaccccatgcctcctgttcatcccagttttttcccaccagtgcccccatcaccactgaacaccactgactgtgtattctgcccatttgtctcattgattgtctcgtttctaaaatgccagctctcaggctgggcgtggtggctcacgccagtaattctaacactttgggaggctgaggcgggtggatcacttgaggtcaggagtttgagactagcctagccaacatggtgaaaccccatctctactaaaaatacaaaaattagctggatgtggtggcgcaagcctgtaatctcagctactcgggaggctgaggcaggagaaccactggaaccagggaggtggaggttgcagtgagccgagatcacaccactacactctgtcgcttgggtgacagaatgagactctatctcaaaaataaataaataaaatgccagctccctggaagcagcggcctctgttctgtgccctcgcgggttgccaggcctagagagtgcccaccccatcgtaggtgctcaggagaccttcccaggatgactggtgactaagtctccacattctgtccccgccagcagcccacccccatctcttccacactcctttctcctctcccgtttctctcctctccacccccactcccaccatctcagcctttcctcctctttcttctcagcctctctgcacacacagggaagagaagactgaaattattcccgggatgccgtccctgggcccctggtgcagctgtccctgccttcacaatggcagccttctctttgcttggctcttctcctgggtttgctccctgctctcttcctctctccttgagtgcacacaagtgtgcacgcacgcacgcacacacacagctcccttcttccctcggtccagctgcctctcatctgcccatcttccctccccctctccggcctgtggggggacagcagagcctctccattcaccccgtggagtgtatccactgctcacagcaggtagccttcctgtctctctgcagcgaacacccagccttccccactgtggggatccgagtatccacgggaattgcacagcccctcctgggacccaggctgacccagcgtgtcctcgagaggcacggatttgccgcctccgtgcacatcttcaagcgaaatttcttcctctaatttgatagtcacttcctttctctaagacctcagatttcaaaataagtgaagcacttgttttgagcaagagtctaaagaattagactccgccttaagcgcccttgtgaccttgagctgagacctcatcccctctgggcgtcagtctctccatctgtgcagcagtgttgtgacatctaagcactagtcacccagtgcctgtgataagacgccaccctgagtgatacgtgacctgtgcccacaaacccaggaggagaggttccctgcgccgtaagaggaagtggccacggggaaagaggaagctgatgtgaggccgatggggcagggtttccgattgtttccaggcgacaccctctctgtcccacccccttagcaggtgtatccacttccctagtggaccacagactgggtggcttagaacaaaaggcgattttcacagttccgggagccagaaccccaaaatcaagcatcatcagggccacgctttccctgcaggcttcaggggagggtcctttgcccttgagttcctgggggttgctgggaatcttggcaccccttggcttgtggccacatcactccagcctctgccttcatcttcatgcggcctcctccctgtgggtccctctcttcccgtggcctgctcctctctgaatcagtgtccaaatttccctcttctgtcaggacaccagtgattggactagagcccgctctgatccagcgtaacttcatcttacaacaccatgttacaaacacggtcaccctcacaggtacctgggcaaggacttgagcatatattttggggaacacattcatctcgtgacggctggtttctttcacacattaaaccccgcccccccccataaaggctgcagagccgatgtcaaactgagcaaacctgccgctcttcccctcttcactgccccagctgtggtcctgggtggggagcagtgtggccgccctgaagatcagctccatgcgtagccttcccttcccaaccatggtttctctcaaggaatctccacctgcagtgggcgttgaaacagctgcagggtcaaaagtgagggaagggtgactgtggtgacagacaggcacaccctgtctcctgggcctcaagaggcttccgggggtttcagagtgcatgagaccttttgtagtcctctcctaggtgctagctgtgactccctgaacattctggaatgagttaggctggagccaaatggcccagtaccgttgccactagccacagggagctatttaactttacgttaattacaattagcatttcagtttctcaggtgcactagccatggttcaggtattcagtaggcgcacatgggttctgtactggataatgcacatagagaatgtttccattggcacagaaaggactcttggacagcaggagaatagagcctatggctgggcctgtaatcccggcacttggaaaggtcgaggcaggaggatctcttgaggccaggagtttgagaccagcctgggcaacatagtaagacctgtatctttacaaaaaatttgaaaaaaaaaaaattagctggacatggtagtccatgcttgtagtcccagctacttgggaggctgaggcaggaggatcacttgagcctaggagtttgaggctgcagtaagccatgatcacaccactgtacttcggcctgggcaacagagtgagaccttgtctctaaaaaagaaagaagaataaagcctaatcaaacaaaatcttttgggagtggggagtgacacacagcactgagaaggggcaataaaaacgcagggggtggtggctgtcgaactttaggtgagtgctttccgtgattcctcatctgtaatccaatctcctcctcctcatccctgcactcacttccccttatgctcccagtaccttgatctgtcttcccaaaccttcctgggtctcgggtcagggtctcaggacaggttcctgttctccgagcagcagacaccatccatcccggggccagcaggttgtgccagcccacacagcgagtcctttgggaatccatccgtgtcgcaggggatttgagcaaatgaagggaaaccgagttcctacaccgaggccgggagcggggcttcctctgtcatccctgtgtgaacccgttctagcctgggggctccaaatgcatagagggctggcaggtagcccaaagcagagaggcaggctgggtggggagggggtgcccagatttcaactgtggactgttcactctactttttaagaatgagcaactgaaaacaccgggcaggcccacagcaaacacacctgagggatggattggtctgcaggccaccggcttgcaaacttctttctaagctggtggttctcaagggagcacaccgccccctaggggttaaactctgtgactgcattgccggtgatggtgaaggatttgactttgctggcttcctgggggcggagactaagaaggactttgatgtcctgctctgcacagcagagtccacgtggcccccacattgcattgtattccacatagcttctgagtttcctaccacatcactcatatgggtagattattttatgtttattgtcatctgagtcttgaacctacgtctattttatatgtaaatactggagggtttttgcatattcccaggaatgtacggaataagaaaatggaggcaatattatacttgagtgcaaaactttcccaagagtcattccttatttctgaaagtcccatccccgatgacagtgctacgccaaaggatttgaatggcaaatgtcgcccgcccacccagctgcccttgtaattgtcacattcccagtgaatctgtgtctaggtgcaggcgtctgcctgactactgtgttgtgccttcttgatggatgtgctgggggaatttcatattgaaatttatcttcattataaattgctttccttttattttccctgtagattgcagttagagcattatattgattttgtggaaatgacatgcataggtagcttttgttacctataaatttcctttcaagaaaacaagggcgctctacaaaatatttgtcatagaaatgggaggtcagtctgatggcgctgagaacagctctttgaaaggtgcaagtagtgtcagattcctccaaggcgataattaaatatccattgagtgacaggccttgttctgagggtctgttgtggattttctccccctcctctagtccatccctctgaacaaaaccacactttaaaaggcacaagacagatatttaagacacagcttgtcctcgtggtgactcagcaggcaataaaacctgtcactagagatggagccctccatacccagctaattgagtttccagggaatgaatgggcctcatcctcatttgcaggagctgcaagacccttctagggagcggatggctggagccagcatttaattaggcacaggcagcccgccctccatgccaccaacacccagagctccgcctggccctgctacaaccagtcagcagggccttggtgtcccccgcagcccagtcttcctcaatagccacagcctcactaaaaacaggcaggcggaagacaggaatgcatggagtggcaagacagaagcagctctcgcctctcgccctggcgatctgcttgtccctgtttgtccccagcaactggccattccttctccccacccacagccggaggacacttttaaaaattgtaaacctgaccacatcacttccggctgaaaacctcctacggctgcccactgctttttggataaactggcatctcctcgccagggctgccaagaccttgtttggcctgggtgtgctcacctctctgtccacatctcctatctgtcccttccttggtgacagcactcaggctgcctagcctctttgttcctcagaacttccaaggtccattcctgccccaggccctttgtatgtgcagttacctctgtctggagcactggcccacaaccattctggtacaagcaaccggtttcgtggaagacagtttttccacggactgggggtgagggatgttttgggatgattcaagcgcatttcatttagtgtgcactttatttctaatattatcacattataatatgtaatgaaataattatacatctcactataatgtagaatcagtgggagcccgagcttgttttcctgcaaccagatggtctcacccgggggcaatgggagacagtgacagatcatcaggcattagattgtcataaggagtgcacaacctagatcccccgcatgcacagttcacaacggggttcacgctcctatgataatctgctgctgatctgataggaggcagagctcaggcagtgatgcaagtgatgggaagcggctgtaaatacagatgaagtttgctcactcgcctgccactcacctcctgctatgcagcccagttcctaacaggccacagaccgctacctgtctacctgtctgcagcccaggggttggggatccctggtctagagcgttgttcacacactgcggagaacttcctccatccattctctcttccttcctgcccttcctgtgtcggttagtactcctcaaccctctcattctcgaccatgacacccggctttatgttcttcttaggacttctcgcccccttgaaattatcttgcatgtttgtgaacttttttttttttcttttttttgagatggactgtcactctgccacccaggctggagtacagtggcatgatcttgactcactgcaacctccaactcccaggttcaagcaattcccctgcctctgcttcccaagtagctggaactacaggcacccaccactacactcagctaattttcgttttttgttttggtttttttttgagacggagtcttgctctgtcgcccagcctggagtgctgtgccacgatcttggttcactgcagcctccacctcccaggttcaagcgattctcctgcctcagcctcccaagtagctggcattacagttgcatgccaccacaaccggctaattttttacatttttggtagagatggggtttcaccatgttggccaggctggtcttgaactcctgacctcaagtgatccacctgcctcagcctcccaaagtgctgggattacaggcatgagccaccgcacccagccaatttttgtactttagtagagacagggtttcaccatattggccaggctggtctcgaactcctgacctcaagtgatctgcctgcctcggcctcccaaagtgctgggattacaggcgtgagccactgcacctggcgagtgaacttgttttttacatgttttgtttgctgcccatccaaaaatagcaccaggcaggtattgggtactcagtaaagatttgaacaaggccaggcacggtggctcacacgtgtaatcccagcacttcgggaggctgtggtgggaggatcacttgagcccaggagttcaaaaccagcctgggcaacatagagagaccctgtctctacaaataattttaaaaactggccaggcatagtggcacacacctgtggtcccagctctttgagaggctaagatgggaggatcacttaagcccaggcctttaaggccgcagggagccatgatcgtgccactgcattacaacctgggcaagtgaaacctcaactcaaacgaataaaaaaaatgaacagatggagaactcttgggccttaggcttgaagtcagcaaaaaaataaaaacaaaatggaatttagattactatctcatttatccagcatgaagaaacataatcgaaattagttcaggcaaactttgccaggtcccagtgctcaaacgctgtcagaaccctgtctttctgcttcttgcgttttctgtcattgggttggctttattaggaaggttccctctttgtgatggcaagatggcccccacaggtccatctccccagtgtggtgaccccagctgaaagagaggcctctttccaagggctccagcaaaagttccagggaaagctctcattggctcatctagggtcttatgtctctttcacccaatcacagcagccaggcaaaaggagataccctgattgtccaggccaacctcatgggcctggtccaggattcagagctagaaagagcctcatcagaacatgtaaggctgagaaaggggaaagattggttccctccctctttggtgactgaaggcacaattatgaaaagacaggagaatggattctgggcagaaaaataaaacagatatccactatagaaacccacatgcaggccgggcgcagtagctcacgcctgtaatcccagcactttgggaggctgaggcgggtggatcagttgaggtcaggagttcgagaccagcctgaccaacgtggtgaaaccccgtctctactaaaaaaatacaaaattagccaggcgtggtagcgcatgcctgtagtcccaggtactggggaggttgaggtaggagaatctcttgaacccgggaggcagaggttgcagtgagccaagataatgccactgcactgcagtctgggtaacgagtgaaattctgtctcataaaaaaaaaaaaaaatagcttcttcttaaagggcaagtgggaggagagcatttctcccagcccccagctcgctctgcttccaacataagatgcctctttcgtgcggaatcatgaccccaccttcctcatttgttttcacacagctttcagttcagcaagatcccatctctggcatccagaacttttatagcattgatttatcacttcgtgcagtgatttgcatttggtattttttttttcaaaagcagaagaactcgactcaggctgtaaccttgcaaagcagcacaaagttaaaaggatccagttacagaatatcagaaataccccagccctgagagctgtggagctctgggtttatttaatgcatttcttgccagccctgcctcctcagccaatttgtctgccaaaaaaacaaagacttcagtcctgtggcatttcacatctaatatttatgctgttctagagtttgcaaaagggcttccttttcatttatcactgttcctcaggaacctccagctcccctgctaggttaatgggattgttctctgctgcccagaccgggagccccaggaagccaaatgacagatcatgaaagtggcccagtggaggactcttctactggtgtcaggggtaggatcaaaactcagcctgaaccagctcagtttctattttgtgaccctgggggccaaatatggatcttgcaaaatggcagctggcagcctgagtctacacttcaaccccaaatttctgtcagagttacaagatgctttttaaaatctggaaatttaaccaaaaatacccagattacaaacttctctttaaaaaaaaaaaaaaaaagattatgataggcctgtaatcccagcactttgggaggccaaggtgggtggatcacttgaggccaggagttcaagaccagcctggccaacatggtgaaaccctgtctctactaaaaatacaaaagaattagccgggcgtggtggtgtgcacctgtactcccaactactcaggaggctaaggtgggagaatcacttgaaccaggaggcagtggttgcagtgagccaagatcatgtcactgcactccagcctgggtggcaaagtgagaccctgtctcaaaaaaaataaaataaaataaaggccaggtgcagtggctcaagcctgtaattccagcactttcagaggccaaagcaggtgaatcatgaggtcaggagatcgagaccatcctggctaacaccgtgaaaccccgtctctaataaaaaatacaagaacaaaattagccggtcgtggtggcaggtgcctgcagtccgagctactcgggaggctgaggtgggagaatggcgtgaacctgggaggtggagcttgcagtgagtgcagtggcactccatcctgggcaacagagcaagactctgtctcaaaaaataaaacaaaaatttgaaaaagataataatgataatgatggtattgccattactggtaacattcctgcatggtggagattagtaaactgtggcctacaggagtctgctgccaggttttacaaagttttctggaacacagccacacccattagtgtatgtactgtctgtagctgctttggctctacggtggcagaattgaatcattgcaatagagaccttatggctgcatagctgaaaacacatagtctggccctttgcagaaatagtttgctgagccctcctaagtggcgccagcccactggatttgtgccacagatacccccaggatttattagaatataggtggagttgagggtacttcagtccctaattaacagcggattagagatgataggtgcttatttctctcccatttgacagtttgggcataaacagcctagagatgatgtggcaggcatggtgttggctcccaggctcctgatgggtgatggtcagatggcgttccatcatcctgggcgatcgtccttatctaaagcagcatcccatcctgtctgcatccaaccagcaggacacagaaactataagggaagctcacttcccttcctggaggggagtttccagaagtcacacaccacctggtgtacccctccagttcatagaaaatacagagaattacaaaggaagccagttatatgaaaacatatttatcaaaatattttataaactgtgatatgtatgcttctttacacataaaatggcacgatgaagcagttatttaatggacaatggataggtctgataacttccatgatttcgaagtagcgctggctcaaatgatattttaagaagtccatgttgactacaatgtgatatgaaaatatccgtaattcccattggtgacaaagtcccagggaccatcattcataattgaaggggatgctagttataggttaatgaaaataaacaaatacatacttttgccattcaatttcaggaaattatatcttgggacaacagattaagaacctcttcctcaggtgatctgattcgattccatggcattaagtgccatctaaatgcttacagctcctcagtttgtaattccgtagcttttctgtgaacctggtctgtttccacctgaatgtctaacctgagtctcgaggttaatgtgtctgatttctttatcaacccccatccccaactctgcccctcccagtgtccctttcctaaataagggcaaatctgtcctcctcattgcttggaccaaaaaccttgagttatccttgactctctttacttctttcgcatgccacatcagcaaatcccattggttccacctttaaaaatagcctggaaccaaccacccaagcccttcgcctgccacgattgtggtcatcacagtctgtctcctgaatgactgtgagagtctccaaacattccagttccctgcctcggactggccttaattctaggacagaagctccaggaagatgcaggttttttgctgctttaattttttctgttttgttcactggtatccccagtgcctagagccatcccagccacacaggagtcctcctttaatgtttactgattgaatgaatgaatatataacatcatgatcaataatattatgataaaaacagtaaccatttagaggcagttaacatattttctcattgaatctttcccagcaactttgtcatgtagggatattattattattcctattttgcagttgagaaaactgagctggaaggcagaggtagctgaacttaaatgcaagctgttggctccagagcccatgcccagccctcagacctgcctgcctcggaggataaaaatcatttctgaggccaggccaggtggctcacgcctgtaatcctagcactttgggaggccgaggcaggtggatcacgaggtcaggagatcaagaccatcctaaccaacaaggtgaaatcccatctctactaaaaatacaaaaaattagctgggcatggtggtggcgcatgcctgtaatcccagctactcgggaggctgaggcaggagaatcgcttgaacctggcaggcggaggtttgcagtgagccgagatcgcagcactgaactccagcctgggtgacagagcgagactccatctcaaaaaaaaaaaaaaaaaattatctctgaaaccctacacttctggaaagactgatctggataacgactatggctcctacctgtgtcccccacctatgcttcaagaaaggcaaagtgcccgggtcctgggaatgaccttccttcaaaagcccacggccggatgaattctgggaggatgcagcatgggaagataacctcagtgtggaaattccctttgcctggaattctggcagaaagcacttcggagatagtctgagccacatcggagaggaggagctctcggaggctgagtcccatttgtgtgtgtccccacctttagccatggggcagtccctctgctgttccctcttccctgcctctctgcgtccccgtggatgggaagagctccagtctgtggtcgctggagtcctgctgagaggctgaacagggtagtcaccaaaaggcaggtggagacagacaacctgggattgagcctcatttcagctctgacacttggcagttgtgggatgttcggtgaaaaggggactttgcctctctgtgcctcagtttctccatctgtaaaatagggaccaaaaaaaggatctacctcactgggatgttgtaggtcatcgtctaaaccagtggctctcaaagcgtggtcccaggatctctagactcaaaactattttcatgataataccaggacactgtttacctttttaccgtcattttccttctggtagacagtggagttttctagcaggtacatagcatatctagttatctaaaaaggattaaaatactcttcccttttccatctgcatacccattttattttattttttagaaatagggtctcgcttgtcacccaggctgaagtgcagtggcacaatcacagctcattgcagcctcgaactcctgggtccaagtgatcctgccacctcagcctctcgagtagctgggaatacaggcacacaccaccacgactggctatatttatatatatttattttttagtttttgtagagatgaggtctcactttgtcacgcaggctggtctcaaactttttgcttcaagcaatcctcctgccttggcctcccgaagtgctgggattacagacgtgagccactgtccctggcctgcatgtctgtgtgaggctggatttttcatgttaaacaaccaaaacaatatatctcagcagattgaatgccaaaacagatttaagaatcctgctgccttccagtaaacaagacattgaagagattggcaaaaatgtaaaacaatgcaactcttctcattaattgtattttgtttgggaaaaatatagttatttatctttttttctccccaagacagagtcttgctctgtcactcaggctggagtgcagtggtgcaatctcagcttactgcaacctccacctcctgggttcaagcagttctcctgcctcagcctcccaagtagctgggattacaggcgcccgccaccacacccggctaatttttgtatttttagtagagacagggtttcaccacattggccaggctggtcctgaactcctgaccacataagtcatcacgcccagcctctatttatcattttttaaatgtatgctaacaagtagtgagtttattatttaaatgagtgaacaaatatgttttaaatttctcagttttcatctctaatataataactatcactagatataaccaacatacacaggactctgggttccttaataaattttgaccatattgaaaagcactgctgttgccttacactgaccttgagtgcttttttggttttataaagcacatccacaaatggaagtcatgtcccgtgtgggccaaatagatccaagttcagccagccaaacaccatacaagcaaataggaagacaagaatttaacaattctacccactcctccactcacagagggtgtgcaccggatgataaaaaaacaaatctacgttctcagccaggcgcagtggctcacgcctgtaatcccagcactttgggaggccaaggcgggtggatcacttgaggtcagctcaagaccagcctggccaacatggtgaaaccctgtctctactaacaatacaaaaattagccaggcatggtggcgaacacctgtaatcccagccagtcgggaggctgaggcaagagaatcactggaacccgggaggcagaggttgcagtgagccgagatcgtgccattgcgccccagcctgggtgacagtgtgggactccatctcaaaaaaaaaaaaaaaaatcgacattccctcactcagctgtgtctcccacaggcctcccattacgaggtgttcgttggttcagttgtttacccatttattccacaaacgttcatcgaggtctcgtcactgaccaagctctgttctagatgtgaggacacaggggacaagggactcagaaagccgctgccctcatggggctggtactctggtgggagaagcacgtgataaaaactagaagacagataaatatgaccagtgaataaatatgtggagaagcaatgtcgggggaaaggggagagcctgggcggtgtggggagatgccatttgaataggagggttaggattgagccccagtaagttaacatttgaggctggacatggtgactcacacctgtaatcccagaactgagagaggccaaggtgggcagatcgcttgagcccaggcattgagaccagcctgggcaacataatgaaaccctgtctctacaaaaaaaaaaaaaaaaaaatacaaaagttatctgggcatggtggcttgtgcctgtggtcccagctacttggaaggctgaggtgggaggatagcttgagcctggggaggttgagggtacagtgagccacgaccgcaccactgcactccagcctgggtgacagagtgcgaccctgtattggaaaaaaattaaaagctttgagcaaatagctgggaaaggtgaggaagcagcccatgcaggtatctgaggaaggtgatttctttcaggtaacagcaagggcaaaggccctggggcaggtatgagctttggggttggggtgctggtaggatagagggagaccccaggacaggaggctggggggaaagtgggggcagatgcagtcacggagcaggacaggagacagttataggactttgtagggcatggcaaggactttggattttagttgaggtggatgtggagccactgaagggctttgcacagagtggggggcttgatcaaatttgtgatttaatgggatccttctggctgctgtggaagatgggctgaaggtggaggcaggaggaccagggacgaggttccagcaaggtccaggcagaggcagtggtggcttggaccaagatggtgacaggcggatgatgggaagtggtcagacctggatgtgtcctgagggtgaagctgctgggacatatgtgagggaggacagaggagctgaagtcccctccatggtgcgtagccttgacccactggcattgacggatgtatggatcacagggcgaaaatcaagaggccggtgtgaagtgctgatttgacaccaaatgaagtgatttgaaggaaattactaagtatgcagcggtccaaatgatacataaaaacggccaaacgtgtgtgagaggcacgcggacaactggaattgagatgatgccacgaagggcaaagaccccgttttgttttcgcagactccgtgcctgcgaaatggcgcgggtctgttttgggaaggacggactttccacaggcttctgcttcatctttcgccgacctctctgaattgctttggcaaacactgtttattgtcattggctcggctccgcgctccagcccatctctgctgatagatgtgtgtcatgctcagccgacttcactgtgcggcatgaacactcctccccaagctcattactggagtctcggaggggccttgccattttccaaaacggtgtcacatctggtttctaacaaccatttttatttctccagaggtccaagttttcatccccctccctgaaaacggaaagcagactgtattttgggaactcacagttcttttttgtttctgtttttttgttttttattattttttttttttcagagacagaatctcactccgttgcccaggctggagtgcagtggcacaatcatggctcactgcagacctaaactcctgggctcaagtgatcctcctactttggcctcccaaagtgcttggattacaggcatgagccaccacgcctggccctttttcagagttctttatgcacaatctcatttgttgctgcccccatttttatagaagaattcactgaggctcagacaggagcactcgcttgcccaaggagtcagagtcctctgactctgcaaaccaagctctttaaagccacactgcaaccctgtcgttaatggtacatttggacaactttttaaactgtgcactttacacagagtttcacaacctcggcactggtgacactttggggctggatcattctttacggggggaggagggccatcccatgcactggaagatggtcagcagcatccctggcctctgcccgatagatgcctgtagcacattcccccaccccgccaggtcatagcagtgaaaaatgtctccacacactgcccagtgtcccctgcagggcaaaatcacccctggttcagtgtattctgcacacagatgtgcttcaggttggcagccctgcctgctccgttgacccatttttttcagcatgtagcactgtgctgcagacactataatagaaatcccttcctttctttttctccccccacccctgccccccagacagggtctggctctgttacccaggctggagtgcagtggcaggatcttggtccactgcagcctccgcctccacttcctgggctcaagcgattctcccaccccagcctcccaagtagctggaacgacaggcgtgcagcaccacacctggctaattttttggttttttggtagagacagggcttctccgtgttgcccaggctggcctcaaactcctgagctcaagcaatctgcccatcttggcctcccaaagtgctgggattacaggcgtgagccaccacaccaggcctagaatccctttcagtaagacatgcagttgccacctctcctgcactcctgggcgaggggtgtgacgcttaacattagagggcgctgccccaccttgcacagctgtgtacctcaatcaggtgcacctacccagccctcctgtcggccactgctcaccgtgtgcacactctgggccaggtactgcgctggggctacagtgcagcacggctcctgccttacggaccccacaccctagttggggaaatgaggataaacaagaaaacaaatgcatctataggataatttcagagagtgcagagtgctgtagaggaaataaacagcccggtgactatagagggatgggtgaccagggacaacttctcatctgacctgaggtgccacggtgaggaggaggcaggcgtcccaggcagaaggaagagcaggtgccaatgctcggtggggtagagagcttggctcctagggagcgtgagacctagagaagttgaaacagagtgagctcagcagtgcgtccctgaagggagacggcctgatggctcttggactcagaagggccctctggccatttggggaagtctgggctctgggaaggctgcggaggcagaagtccagttggaagttggctgtgagaaggaaacaggtgaagaagcaagatgcatttctgtcttttttgggattttatatcctgtgtatatgtgtatgttgtgtattcgtgtatgtgtgtatatgtgcttttactgtattttcctgcatcgtgtatatgtacatatgtacctgtatattcatgcattgtgtatatgtgaatgttgtatatctatgcatgtgcgtatgtgtgccatatattaatgcatatgtgtatttttatatgtcatgtattcactcgtgtgtatatgtgtgttgtatattcatgtatgtatatgtagtgtatttgtgcttgtgtatatgtattcatgcatgtgtgtatatgtatgtgttgtatatttatgcaggtgcgtagatgtgtttgtgtgctggttccaaaatatgaggacaaattgccaaatcaaagtgaataaatatttaatgaaatggtgttgcatgattcagcgagtcagctctggaacatttggactcttagagagctgtttgtcgattacctttaatgtagtgtgtgggtggaaatggtgtgggatgaacatgtaccgaaagttgctgatgtccttaaagaagccctgttggtatttccagccagatggcccgtcgtgggggagagaaagtcctccgaaagcagcgggtgctttctgtcctgctggctgcctcttgggaggcccctaggacagatcaggtcctgtttcacccttcgcatgcctgtcagttcatccacgtgcatagcagtgggtgggggtgcactgtcgtttcattgccaacaaccacaggggacaaagtcctttgtggtcccacagctaggaggtggcagatccaggattcaaacccagacagtctgactgcagagacgctttgggcactctgccacattaccacctgtgttactgggaaaagggagaactgatgctgggaggaacagcgtgttcctacgccggcccggcatggcggggacatgtctgcagcagggagaggtggccgaggttcccagtggtttctggttgcaggagccctctgtctcccccattgtccgtggcttgcttagtatccccagtgatgccgtgtgtgcccctgtgccaggtttttcaccagctaatctcagtccctggtcgccacgagacacagctttcacagaccacaaatgcaattattacaaggcaatttcagttagatttggggctgggagagaaaacagaagggtctcctcctcccatcaggctccgaatcgttccccaggagcacttaactcagacaaatggggaagcagccgcgtggagcctccaccgtagagctgcctgcaggggaagtggccgacctgctgggccacgaagcagggtgcaggaaggatatggggagctagtgatcctctccaagggggcagggggactccattaaaccagatgttaacagcaagaagttggctataacaggggacgggcccattggtggataatgaaaatataacccttagtaggcacttgctatgtgccagttccaagcaatgtacagtcgtgtgtcacgtaacaatggggatacatgctgagaaacgtgtcgttaggtgattctgtcattgtgcgaacatcatggagtgcattacacgcctggatggcatagcctactacacacctaggctctgtggcgtgacctattactcctaggctacaaacccccctacagcatgtgaccatactgaatcctgtaggcggtggtaacacaatgggaagtatttgtgtatctaaacatacgtgaacatgttaatagagtacagtaaaaatatggtgggcatggtggctcatgcgtgtattcccagcaccttgggaggccaaggcgggaggatcacttgagcccaggagttccagaccagcgtgagcaacatagtgacaccccatctctactaaaaattaaaacattaggctgggcacggtggctcacgcctgtaattctggcactttgggaggctgaggcgggcagatcacctcaggtcaggagttcaaggccagcctggccaacatggtgaaacctggtctctactaaaaattaaaaaattagctgggcgtggtgttggacacctgtagtcccagctactcgagaggctgaggcgggagaatcgcttgaactcaggaggcagaggttgcagtgagctgagatcatgccactgcactccagcctgggagacagagtgagactccatctcaaaaaaaaaaaaaaaaagtggtttcaggtaagagtggatccccagggcctcaaaccagcatctctctatctctctatctcttgtatctctctatctcttctgtctctctgtctctatctttcccacctccgcatttttccatattgctttacacacacacacacagactcttccctcttggtggcaagatggctgccagcagcttcagttatgtatcccaccagttccaagccttgaggaagaagaccttctcttttctagtagctccctaaaaatcccagggctgactcgctgcagttggcccagcttgggtcacatgcctttgcctcaactaaccagtttgtgcatgatcaccaggggaatgcggtcctcatgggagtcaaggatttgcacacattcctggagtcaacagtcaaggtcagcccgtgcaacttaaataaggaagtgttggtgcccaaaggatgacagagccaggcaggtgaagcttccacctagtgctgggcacacaggaggcagtaagtgctctggcctttcagcagatgccagccctgctgcccaggggcagtcgccagccagctcattgtcaatggcctttcctggcctgccattaattcctcttaatctgcctgccaaattttcccacccccacgccagcccccagcttgcccctcctcttgtgctgtccttgcctcgaaagctcagcgaatccaagcttcccaggcaccagccacctgccacaatttgggctgggcttttaatcttggttttaattccagctcattctcttggctgtatctcccagcccaggagccccggggcccatgctaatttgcttctcccacctccactggtgccggaataaccatttttaaaagtgccttggggaaatataatcaaatgagagcaaaatctaatttggcactaaaagcctctgactgaagccctgttttctagggcctggtggagactgaataatacaccctttttgggtttttaagggttgggggttggagaaaggaaagagacgtgaaaggggagatgctagcagaggaaacagcttgcattaagctgacatccgtggcactgaaaagaatgggcaggaggaggacccccacccactccctatgaagaaattcatatcccagcagccaagccaagaagctaaactccagcattcatcagaaagaccttggcccaagtcttcaagaaccagtaggttcactggctggagatttggaagatgtgggagtgtagcgggaaacccagttccccagtggggagttcagtgaagcctttttctctgactttcagttcacttttctgcaaactgagggggtgaaaatctgtgcttcttaaatgacttgtgatctgggctcctttcagaatgtgtcaaaagctgtggacttgtttccaggaaaatgcacaaaaggcaaaatctggcatgcaatgttccaggagcggtacgaaccctgccactcctcatgacagtctccaggaccctatgggatctgtcccctcttccccgtgatgtcatttcctccctccctcactgtcccccttgggttctgcgatgcccccacgtttgtactggcttcagggactttgtacctgccaattccctctgcctggaacagttttcctcctatcccctctgactcttgctcttcagcccagcgaggcctctcacagcactgcgtggggccactctgtcctatcattctcctttattttcttcatcgcatttgtcatcattccccactagaacatcaactgcacgagggcagaagggatcctggtggtcttgttcactcctgtgattccagtgcctgggaagctccctgcataccgtaggtgtttaatcaacacttgccgaatggatacaggcatgcataccttccctagggcagtgggaccccaaattcagcaatttcgagtgccaccatcatgaggtgtaccatgcccaggtacactgattctgttaacattttaccctagattgtttcactctggacttcagttgtttcaaaaggaatcttttacatcactgacagtattgtttgccacgagtagaaagtgtcggggctctgtaggggtgtaacaaaaacgcaggtaataagagcgagatctggtataaagaaagtgattttttattccaaagctagcttaggggaagaagtacagtcttcctgccttaagggtactgctttgcttttaggagcagaaaggagttgctttttaaaagggggcctggcatgaatggcacacaggggaggaattgagtgctgggggggtccgcatatctcactcgagtacttcatctaccgggaagtcagctggcagccactggtgcctttgtgggtggaactaggttgtaagggtggccagaagctctccacctgggagggagtttcgcagcaggcatactttgggttgtagtggaccattgtctctcgaggcaacctcccagtgagtgagagttccgctccagagcctctaagcacgtgattagatgaacttgccctgaagagagtgtctggtgtaggggagataaaaggttataattgcatttctaaagggcgaagtggggcacggggaaaatggagaaaaaagaagaataaaaaataataaaactgccggacagggtggctcacacctgtaatcccagcactttgggaggctgagatgggtggatcacctgaggtcaggagttaaagaccaccttggccaacatggtgaaaccctatctctactaaaaatacaaaaattagccaggtgtggtggccatgcctgtaatcccagctactcaggaggctgaggcacaagaattacttgaacctgggaggcagaggttgcagtgagctgagattacaccactgccctccagactgggtgacaagagcaagactccatctcaaaaaataataataataataataaaactcatctttttcttagaaaaaatgggaataccgatttatgtgggggcttattaaattttaccctcttccttgttgaggtcctgagccgattaagaaatcagacccaagagtcagctgatgaaagtcaacactgcactctgatgaatctggtgaaggctgggtttgagggcatggcttccttctgagagcatttgggcttcctgactaaactccagagtgtgacagacttcccactgatgcaggtccacacctctcctccccgcgcagacaggacaagcctcctgaaaactagccctccccgggggcagctcagtccccagaggaaaagcaagggaagggattgggctatgcatgcccacttcggcccttcaaatccactaggcacatgctaggggtcagcaaaccacagccaatggacctaaccaggccctccatttgttttagtaaataaagttttattggaacatacccgcccacttgtttatgtcttgtctgtgacttcttttttttctttctaacaatagggtttagcagttgtcacagagaccctttgaccctctggcccacaaagcctaaaatactgactatctggcttttacaggaaaggtttggtgacctctgctgtatattgtccccctcggaggaggtacgggagagcatggagagaggccaggagtgttacagaagtggagcccccccgcatggagggcagcgttagaggtgggggtcaaggtcacaaggtttaggaaatcttgtttcctgaactacacttggtctccaggggccttcctggctctcacaatatggctccaaagacctgaggggtgagatgctggagggttggaccataggcaggtttatttaaataagatagggtttctcagcgacgtatggtggctcacatctgtagtcccagaactttgggaggccgaggcaggtggatcacttgaggtcaggagttcgagaccagcctggccaacatgatgaaacctcatctctactaaaaatacaaaaattagccgggcatcatggtgcacgcttgtagtcccagctactcgggatgctgaggcaggagaatcccttggacccaggaggcaaaggttgctgtgaggcgacatcacgccattgcactccagcctggaaaacagcgagaccctctctcaaaaaaaaaaaaaagaaaagaaaagaaaaggtttcttggattaggcgctgctgacattttgtcctggctcagtctttgtagcgtgggggctgtcacgtgcgtcggcgaatattgagcagcatccttggcctccacccaccagatatcaacagcacaccaagttgtgatgaaaccaaaaatgtctccagacattgccaagtgtctcctggggacagaaattaccccctttctggccaagagccactgctttgaggagctggatgcattgaggcatctccaacattccaggtcccagagaaagagaagtgcaggcctttagcttgcccgggaatctcatgctgcctccactccatcagttactccctgacacctagccagggacgcccagtcgctgtttaattaggcacccaccacctaattacatttcactctgtgaaaactggatatgactcagactcagagactgcagccggttccccgcctcctcctctgcagaacgccaggttcttcccgtttatttttgctccatcctcccacacaaagggaggttccatcccggaccttacccctgaggctgctgggggatcctcccttcctattttcacctcccctgtgtacccagacccttacaggaggtgtttcatcagctcctccctctggagcggtcacctcccggccctgcatgatgggcaagtcatttaatgaagtgctcccctttgccttgtattttgggggtttcagaatccagccgcttgggttcctaaggggttttcccactcctggaaagtgtcagccatctgccaggtcaccaggaaaaccgctgcagagggagccagctccatcacagctcccccagggccaggtggctctgtgctttctccaaggacactggtggataggttgtcctctcctctaggggcaccagagccccatcccacccactctcctccttcctctgggggttcacctccctggcctttctctcttcatcctggcttctcggccaagcactcacgtgcacaaggcccagcgctgagctgtctgttagcaagatctccttacatccctacaacctcctggaacgctcatattctgtgctctcagcaatactcgtcagaaatttcagaaccgcagtgtcctcatctagaaagagacgactagaataggattgctgtctctagactcaaattttcccatttcttaaatatggctttatagattataattattaaaaattatacatgcaagccagacacggtggctctcgcctgtcatctcagcaccttgggaggctgaggcaggcagatcgcttgagctcaggagttcaagaacagcctgtgcagcatggcgagaccccttctctacaaaaactacaaaaataagccaggcatggtggcatgcgcctgtagtcccagctactcgggaggatgaggtgggaggatcacttgagcctgggaggttgaggctgcagtgagccgtgatggtgccactacactccagcctgggtggcagagtgtgacgtgtctcaaagaaaaaaaaaatgtacatgcaaaataaaaacagaagaggatcatgaagaggtcttgtctgtctccttatcacagagcttttaggcacatccccttcctgatgaattagggtgattttctttaagctttgttgttgatgtaaagcgtgcatgtggaaaagtgcatggctcccaaatctccaggccaatgaggtgtcaccaactgaaccacctgctccagcaagaaatagaacaagatcatcacccgagaaactccccttgctgctcccagccaccctcccccagtctccaggatacccactgtttttattctaacatcatagattagtttggcctgttctcaaatttcacatagatgacgtcatatggcatgtattcttttgtatctggtttatctctcttaacattcttaggttgttgagatgcatccctgttcttgaatgtagcactaggtctttcgttcaagtttcaatgtagccttccgttctgtaaatatgcaacaatttctttacccatccttttgttgataaacatttcatttgtttctacctatttactattacaaatgtgctgtcatgtcttgtacctgagtttaggtgagtgtatgaatacttttctgttgggtaaatacccaagatttaaattgttgggtagaagttaccaatgcattcaaatttagcagacacagccaaagagttccccaccgtggttggaccggttggggcagccactcagtgtgtgagggctcaagttgtcccacatccccacccatactaggtgttgcccatttctttaatgttagccattctggttgctgtatagcagacagaatccaagggatccacaaacttcaatgggaaaaaaagtgacactctggttttcactaacctacagctgagacttagcatttgcttccaatatgagcataagccataaaccacagtatgttggcagaatctgtagctttgtcatctgtagaaatcaccagtatttaatatcccattgcagtttttgcagatactgcaaaatataatattttcactcataactattctgaaatgatcgctctctacaaggttttaaaagacacagtaggccaggtatggtggctcacgcctgtaatcccaacactttggtcaggagttcaagaccagcccggccaacatggtgaaaccctgtctctactaaaaatacaaaaaattagccaggcatggtggcagacgcctgtaatcccagctgaggattactcgggaggctgaggcaggagaattgcttgaaacctgggaggcagaggttgcaatgagccaagatcgtaccattgcactccagcctgggtaacagagcaagactccatctcaaaaataaaaaataaaagacacactgtatcgcaaatgtgtttagtattttgataaccgtatttccaaacaattgattttctctgtaatcctatatcttgtattcaatgcacgtaataacattggagaagggatccattgctctgtgtgccagagggctccatggcagagcaggtgtgcatgctcaggcctcggacacacaatagtttaataaacatcgtcaggcactttctcacgtggcctcctgatccatctccctccgcagctttcttcgggaagtatcttaatgaatacaacggctcctacgtgccacccggctggaaggagtgggtcggactccttaaaaactcccgcttttataactacacgctgtgtcggaacggggtgaaagagaagcacggctccgactactccaaggtaagctgcaacctttccagcctgggagtggctgtgtggcccagcagttagaggcccaactcaggagccagactacttgggttcagattgtgactcaggcacttaaaagtgtgaccttgagcattttacatacacctcctcctcagtttttcatctctcagccagggacagtggctcacgcctgtaatcccagcactttgggaggctaaggcaggtgaatcacttgagtccaggagttcaagaccagcctgggcaacatgacgagaccctgtctgtacgaaaaaaatacaaaacttagccgggtgtggtggcacatgcctgtggacccagctactagagaggctgaaatgggaggattgcttaagcccgggagtttgaggctgcagtgagccaggatcttcccactgctcttcggcctaggtgacggagcaagactctgtctttaaaaaagaaaagaaaaatgtattcatttctcaaaaaatagtgtctgtttccaagagtttggttttttaacattttgccgagacagaatattcttacagaaagtacatacacagagtgtaccattcaaaggcttgccgcacactgaacggacatgtgtaatgagcacccgggtaggccaagaagagaatgtcaccaccgcccgcagcagtcccctcacggaattcccccgactcgacacccctcccgcgaggataacgatgattcagactcttagcgttacagattcactctgcatctggcttctcctgcttagtattatgttgagttcattcttgctgcccagcattccatcatgcgcttataccacaatttgtttatttcttctacttttattgggcatttaggtatttccagtttggggttattacaaatagcgctgctgagcactgtctagaacctagctcctggtgagcatagaggctcatttctgttatacccgttcctcacagcagcgttgctgagcacagggcgtgtgcatgttcggagtgagtgggtgctgcctgagcacctgcagcagtggttgatcctcagtcgtagttttttctgtttttaacataagatgaattgacatgaggtaacatgcacagatcttaagtggaccgctggatgaattttcacatacgtgtgcatctgtttcaccgcgcatctcttccacatatgcgtgcatccatttcaccgcggctccgatcaagacatagagcacttccagaagactccctgagacccctctccagtcatgaccccccaccctggggatgacgtctactctgacttctgacagcgtggattatttttgcctattctagaacttcacctaaatggaatcgtatagtctgttctcttctgcatctgccttttttcacccagcgcaatgtctgtgagatctgtattatttattcattcaacaactcatggacattttggttgtctccagtttgggtctattataaactaagctgccgtgaacatctttgtccatggcttttagtggacatatgcacccatttcttttggttatacacccaaagaaggattgctgggacataggatgtgttaagatgttgcgcccggccaggcgcagtggctcacacctgtaatcccagtactttgggagactgaggcgggtggatcactttaggtcaggagttcgaggccagcctggccaacatggtgaaaccccgtctccactaagaatacaaaaattagccctgcgtggtggcgggcgcctgtaatcccagttactcgggaggctgaggcaggagaatggtgtgaacccgggaggcagaggttgcagtgagccgagatcacatcactgctctccagcctgggagacagagcgagactccatctcaaaaaagaaaaaaaaaaaaaaaaaaagatgttgcaccagtttacactccagccggaaatgggagttgccctgcatcccttatcagcacttggtgttgtcttttttgtcagggctgctttgttgggcatgtagcggtgtttcattatggttttaccacaaaggtttttgaggatcacgtgagttagtacatgtagaacattagaagcgccccttgcacgtagtaaatactcagtatgtagtagcttagatcagggcaacaaatattttctgtaaagggccagatactaaatattttaggctttacaaggcttacagtcctgttaccactgcagaagtctgccgttatagtgtgaaagcagccatagataatatacaaacaagcatggccatgctctaaggaagctttgtttacaaaaacaggcagtcgacctgcttggctgtagtttgctgacccctggcttagatgatgaggaggagaaggaggagaggctgacagtgatgtttcatccagatgtcccattttaaaagaaatatggaaatgaacaaatcttcctgccccatctgaatcctcagagtcagctctgacatccccccacagctggtacattctttccccagaccagctgccaaatccatccctctttctcttttcccatccccactgccaccagtcctgggccctgcctactgtgacttcccaggttaaagtcactagagaacaggcagtcactgaaagagggtagcaagccaggagtgtgtggacaatagggagtggtggagacggtggagaaggtgtctgtccaaaaggggcagatcaggcccaggtagaactgtgggcccagatggccacttttcctgatttttcaacagaagccacaaatttgtattttttacctatgaaatctcctgattggtaaatattggcaactaattcagacttttctaaaatcttgcatcaattgagcatgcctgacccatgggcctgcagcccttcagcccaccatgtcgttcttctgccagcaccctccggggactgtacggtgagtttcacatttggagtcagtgggatcaagttgagagccccaaccttgacacatattacgtgaccttggacatgctacgtactcctaagagcctcaactcccaaatctgaaaaacaagcatacccttgcatacttaatcatgtgtacttccatttactgagcacctactgtgtacccctgagcacctactatgtagtgctcaggggtacacagtagtacttctgataacatgtagtacttctgatattcacaacaatcatatgaggggagtggactagtcacatttggttccattattcattcaccacccccaacaagtattcattgagagcctgctgtgtaccaggtaccatgccaagtgctggctattccaaggtgaatgaaaacagatgacccaatcatggtcctcctggagctcacagtctggcacatgaagatatgatataaactgttaagtgatgtgcacacatcattaatgcacacacacacagtcacatcacacccgtctattttgtcatccccagtatgagccatttcaacctccaagcttgctagttattacagtcatctcagttttgttttgttttttgagacagagttttgtgcttgttgcccagactggagtgcaatggtatgatcttggcttaccacaacctctgtctcctgggttcatgtgattctcctgcctcagcctcctgagtagctgggattacaggcatgcaccaccacgcccagctaattttgtatttttagtagagatggggtttctccgtgttggtcaggctggtctcgaactcccaatctcaggtgatccacccacctcagcctcccaaagtgctgggattacaggtgtgagccatggcacccagccactatagggtaattttttttaatcagactaggctcttgaagttgtttgtgaacagaaatttaactcccagtggcttaatcaaagaggaaatatattcacctatttaactgaaaaccagctataggggtatcaggcatgggtggatccaggagttcaaatgaacccccaaggagttgatttctctctactgtcagctctgtttttgtctgctcgactgtattcacagaagctctctctcctcctggtagcagtgcggccttccttatatcctcccagcttcctggccagctgcaagcatgggagtctctttcccaggagtcccagagagtctcagtgcatctcattggctctggatcagtcccatgtctgtccctgagccaatcagagtggccaggaggatgcctggttccctggactataagtcacatgctccactcctgagccagacatgggggtagcaggagctctacgctggaacgttggctgggaatagagccccaaataagaatggagtttccaccaggagaaggctgactaggtgctcaacggccaaaaaacactctgtcccacttctgttctggaaaccccggcacacatggagatccctctgcctccgacaggtcatcctgggctccctgtaagtctgatgggtccaggcccaagtggcagaagccgcccccggcctgccctcaagtctcattctgcacatagtaggcctccagcctcccaagtgaattaattccaaagttctgatgaggcagtccggcatggactccttggaatataaattccagtcccagggctaagcacgctgtttccctcctcccagcctcagtgcaggcggattctctaaatatcctgaaaaatacattccctcctttttaaaattcttcaccacatccacgcctcatctcagagcagcccgataatcaagttatcccggggtgctcaggattcttttggggctaagcatggggacatagaacgtccgtccttttgccctgtttcctgcccacacacatctccccctgtgaatgagaacagccctgtgagggaggcgtgagaggattcctggccccccagttaccaggggcctgggaacagagatgctctaacagggacgtgggcagagggcggggcggtgaagtcagaactggctcaggtccagggttcaaatcctgagggtagcagtgggcagcaggagcccaagcgtcaagggaacaggggtgagcccggggtttccagccaaggcagagctcaggagccctgtgccctgggccctagatcaggcagtaagatgcctctggcaaggcagaatgtcactgctggcctcgggcgggccttgttgggaggcccaggcagggaggaagcggcaacccttcgtaagcccccctcagaaggcctctgaggactctgtcccaagtcactaatccacagatgggcacatgccaccaaaggggtccagatgtcaagggcagaaagagaggcagtggtgatgagaaaagagtgatacaggacaagcgctaatggcagaagagggttggagaggggaagacagttgttagtgggaagggaagtgagaatgacctagagttgagtccacccgaaaagaggcttccaggtagctggcaaaagtgggcctgggtgttgggtggctctgcagggaggtgatggcagtgcacggccagtgtgggggcgacctggcagattctatgaacttcatgtgccccgccccttgccgcagcgtgtacacttctctgtctatctggagaagcctcagtcataggcaggagacggcgtgatggagcagctggttgtagctctgtttattactgaaagaaattagcaaagtccaccaatacacgaaataactaaatgaccgtgaagcatccctcctctggaagatcctcggcaaaggatgaggccggtctgccttatgtcctgagcccatcaggcagagtgggaaaagcaagttccagaactcctgaggtccttattcaaatgtcacctcactttagccttcctggaccaccttgtataagggcacccccaccacactccttactgcaacaaatcaccatctggtgcattacaccctgtgtatattactgattcatttgttaagtatctgtctcttctcataagaatataagccccatgaaggcaggaatgctcatttgttttgttcactgctgtatttgtcagatagataaatgaatatgtacagtatgatgtgattaataatataaaaagatgcataaagtgatactataatgtacctaacaaaacactggaaaggttattcccagtaggggacagaagagccaaggttatgggggtgggggggtggtaaggagtaatctaatcaaatgagacttcactgtcctttgtactattttaattttcacaaagaaaatgtaggcatatggttcttgaggaataatgactaacactcatttagacataccatgtaccagatactgtttgaatcattttacacaaattaacccatgcatttctcatcatagtctgtgaggtatatactgtgtctattcccaactgtcagatgagaaaactgaggcccagagaggctaagtaatgtaaccgggccacatagcctagtaagtgataaagcagaattcgaacccaggccatctggcttcaaagtccatgcactaaaccacagcccgtgggcccagactggtggtttttgtatggcccctgagctaagaatggtttttacattttcaactaattgaagaaacaatcaaaagaagagcatttttcacatggtatatacaaaaatgaatgtcattcagcctttaaaaaggaaatccggccaggcgcagtggttcatgcctgtaatcccagcactttgggaggccaaaccaggcggatcacttgaggccaggagttcgagaccagcctggccaacatggggaaaccccatctctactaaaaatacaaaaattagctggacatggtggcacatgcctgtagtccagctacttgggaggctgaggcaggagaatcgcttgaacccaggaggcagaggctgcagtgagcccaggtagcaccactgcactccagcctggccgacagagcgagactctgtctcaaaataataaaataaggaaatcctatcatatgcagcaacatggatgaaccttgagaacattatgctaagtgaaataaaccagacacagaaggacaaatactgcatgattcccttacatgaggcatctaaattagtcagacaatagcagcaaaaaggagaatggtggttggcagggctgaggggagggggaactggggagttcctgttcaagatgtatgaggtttcagttatgcaagatgaaacagttccagagatctgctgtacaacatggtgcttagagttaacagtactctacttcacagataaaactttgttaaaaagcatacagctcattttttttttaccacaataaagcttttaagagtaattttcatgacatgtgaaaaatacatgaaattaaaactgcatccatacataaagctttactggagcacggacatgcccattcattttcctgatagctgctttcaagctgcaatggcagtaatgagtagttgcaacagagacagggggcctgcagagtctaaaatatttactgtctggccctttacaggaacggtttgtgcatacttgctctaaaccactatgtatgcttctcattaataatgttatctgtggcggggagaaaaagatggacctgacccaaaaatacaaaggccttggctccagctctggatgcatggcttatttgtttggggacctcacttccttatctgtaaaatgggtataatgtccacttgtcaaagttgctgtgacgatcagctgagctaaggtatttgataacatgaagagcctatgatcattcattacgagttgtctggagcctgtggagctgctgccacccacacgcactgccttggccttggagggaagcccggtgcggagtgcccactcgagggaaacacgcttttgcctagggctgaggctggcagtctccgcagacactagctactcagtcggtgaagcttgtggatgcctgcaggaatcacctgaggctcagagggtgcttgccagagggggccggttgcacctcggggtcccagctgtggcttctcagccctgtggagctgtgcaggccagcagcacctgggtagagcctgactcctgggcgccgggttctggaaaatgcacctgggcctgtggacctccacccatctcaccctcctgctcacaggtctgaatttcagagttcttcctcatggcttgacccgggcaccccaaacacagtttgcccatctctgaactcagcctttcccccggcccaggccttctctacccttccctcaactgcccaaaccagagaccaacaggggtgggggtcacccgcccctcccgcaccccacatccacccagtggctgtcctggctgcccctgagcatcgctggatgctgcccccgccaccctggcccaggcctcctgttctctccctcagagagaacagggcatggctgaagccctgtggccggagggatgggtggctcttgttggctggcctggcactaactgcccactggtggagcagggtggcagctttggaggcaggtgtgtcatgtggcattgcggagctagcagagatcggggaagacttagccgaggagtggccactgaggaggatggataaggaggggagctctcagacatggagaaatctgcccagccaccaagacagtcctgattcttagctgaatggtggcagagagctggctgtgcacaggacactatggcaagagcttcacatctattggtgctttaacctgcctgtcagcctcaagaggcaggtactgtaatcaccccccacacactttgaaacattagactgtgggagcccctgacccaccctcctgggtctcattcctgccccggcctgagccctcccctggaggtagccagtatcctggagcttctacccacacatacctttattctttcatcccataggtggatatctcaaacaatgtacgatgctgtgtttgtgtccttagactttttataaatgatatcatatcatacacatccttccacaacctgcttttctcacccgatataacattgtaagatttatccacgtttgatccgtgttcatccacgtagctctgttctttttcactgctttagaatcccattgtatatcttctcctaggaatggaggttaatggtagctttatttttaaaaaagtttaaccacggccaaacaggcatatagttctaagatgaagtagtgaagatgagtctgttatgaagagcaacggtggcttcccaccccaccccactggcgggtggcagcaagtgtccaccactggcggttccatctcattctcatgccatttcctgacttgaccccttcaggccctgactgttgatgtcagggtacagagctttgcaccatttttagatccattgtaaattacctttgtcattttaagaacttttctaatacctttatatcacgttccaaaactatagcagcagctctttgatttatataacatatattatttttatgtaataaattctgtagagcccccttataaaattgtttttactccccaaaattaatccataaataatattcaaggagcaatatataaagaagcaagtaactttctccgcttctctcctcttcccagtcttcaatcagcattttgatatccttccagatttttccttgatgctcaaaaatatatgaggttagagtttggtttctcctcttcaccttcccttccctctgcccccacaaaaaatagaatgtttctgagtttgactctgttgcttgctcttacccttaaccatgtatcttggacaactttacacatgcctttttaatgtctgcacagcattgcatagtatggaagcaatgccaccaggtgtgttggctcatgccttaatacctacactttgggaggctgaggcaggaggattgcttgagaccaggagttgaagatcagcctgggcggccacttgctagctgtatctacttgggctaaccactgttagatactcaagactctgtctgtagagaccctgtctctacaaaataagaataaaaatgaaaaattagctgggtgtggtggcacatgcctatagtcctagctacttagaaggctgaggcaggaggatcacttgagctgaggacctcagggttacactgagctatgattgtgccactgcaccccagcctgacagagcaagaccttgtctctaatatgtatgtgtgtgtataatatatatacatgcatactgttaaacatatatcctcctgctggtcactgcaatgtttttgttttataaacaatattgcagtggccattcttgtgcatatggatatagtggatgagtgtacctgaaagagtgtctgtagatatatgaatacatcatggtatgtatatatgttgtatacttcagggtggaagctgtagacacctcttcacctttttttcttgaaaataatcactttttgaaagtaattgttttgggcagagctgctttctagcagagggtatatttcaagaagtcattaccttgaagaaagattagcagctaaatatttactaaattcaggaagagttgtatgggtgctgtggctcacgcctgtaatcccagcactttgggaggccaaggtgggaggatcacttgagcctgggagatggaggctgcagtgagccatgatttcaccactgcactccagtctaggcaatggagcaagaccattgctccattttttgctccatgaccaaaaaaaaattaaagagtataggcaaacctcaacttcttagctgagcttttaaagcctccagttctggccatttacttttcctccaactcttctctcctcttgcccaatatgtaagtcagttccttattttcctggagacattactgcatccccatcccttttttgtgtgtgtgctgctccttatatcatttctgcattttaccctctgacattttatcctctttccaaggagccagttgccatctgccctctcttctatttttagagcacatggcaagcacattcctgcctcagaccccgttatctctgcctggaactctttcctggatcagtgattctcaatcctgagtacccattagaatcccctggggagttttttaaaagtctgatacctgggccaaaccgcaggccaatccaaccagaatctctgggggtgggcccaggtatcagtaagctctccaggggattctggcaaaatccagtgatacatatcttcctatgcccagctccttctcatcattcaggtctcaactcaaatgtcacctcctcagagaggacctccctgactgccccagctaaaatatgcccctcacctcagctcccagttactctttgttacatctctctgttttatgatatttccttcatctgtcataacttttaactaccttggttctttatttatacatgtgtctgctcctgccccagtgtaggcaccccagggacttagggatatacccaccctgcatgacagtgtccccagagccttgaaaaaacttcagacttaggagccaagactatgtagtgctgggtccaacatttactagctgtgtgccattgggcaatttacttagcttctctgtgccttaatttcctgttctggaaaataaggattatcatcatacgtactttctatagttatgtcagaattaagcgagcaaatacaggtaaacacagaacagtccttggcacatcgtaagcactcaatagtgttagctattattcttttaatatctttttttttttttttgagtcagagtcttgctttgtcacccaggctggagtgcaatcatgcagtcgtggctcactgcagcctccacctcctgtgttcaagcgattctcctgcctcagccttctgagtagctgggctacaggtgtttaccaccacgcctggctaatttttgtatttttagtagagatggtgtttcaccgtgttggccaggctggtctcaaactgacctcaggtgatctgctcacctcagcctcccaaagtgctgggatcacaggtgtgagccatcccacccagcctattttaatatctatctaaagtgatctattgcaattcctgccctgttctccctatccacttctctgctttatgtccaattagcttagcaccatttgcatcatttgtctggcatttcatttattttacttgcttatttcttgtctgtctgctccctagactgtcagctccagaagggcagaaattgttttgttcactattgtgtccccagtgcctagcagggtgcctggcacgtagtggacaccagtatgaatacctggctcctcacctgttctcctgtctctccccaccccccaggattacctcacagacctcatcaccaatgacagcgtgagcttcttccgcacgtccaagaagatgtacccgcacaggccagtcctcatggtcatcagccatgcagccccccacggccctgaggattcagccccacaatattcacgcctcttcccaaacgcatctcagcacatgtaagcctcagcactctgcctgccagaggcactgcttagcatgaagggggagggtcaggctttagcaacagtactgtcaccaccatgacttcactgtgcctcctctctaatcctcctggtttaaagaccccaagaacatactgcttgtccatggtgaaactgggatgcaactccagacagcctgggcaacagaccaaggcaggagaatttttaacttgggatacacggcctcccaccaagaggtgtgtggatggaactgcatagaataggtttccttttaatgccatgtgtattttatttaagacatctaaaaacattcttttgaggagggggtctatagttttaccagactaattatttgccaccatttattgagctgtgggctatgtagcaggtgctgtgctaagcccttggcattattgtccagtccctgaatattcacagtgacccttggtgtaccagttatctattgccatgtaacaaatcatcccagaatctagcaacttaaaacaacaaacacaaattatctcacggtgtctgtgagtcaggaatctgggagtggctgttctgagcttctggcccagggtctcctgaggttgcaatcaaggtgtcagctggggctgcagtcacctgaggcttgactggggctcagtcccatggctgggtcttgccacaggagcctctgtccatagggtgtttgagtgtcctcacagcatgatagctggcctcacccagagcaaatgatcagagagagagtaaggccaagaaggaagccacagtgtcttttacaacctaatctcggaagtggcaccatcactgtgccacattctattggtcacacagaccggtccttctacaatgtggagggtctacgcaggggtgtgaaggccaggaagtagagattatcaagggccatcttggaggctgcctgtcacacttggtattcccattttacagatgaagaaactgaggcacagagaggtaaggtaacttacctgaggtcacccagctctaagtggcagagccaggattcaagtccagccccccacttctgcttcccatgcctctgcccacccctgtagtactctatccagctggctgggaaacttcctggaaagttctcctgcttctctctgcctcagaccaccccctgcttagcagtgactcagcagcccttactgtgacattctggggctgcaaggatggggtggtttggaatctgcctgaatattcagggtgtttggcttcattacaatctgaatacattgccctcctcaagcccctcctgtaattactttttgacagacctcgaagcagctcagagagggtaccgaaggcactgttcaccttcccatcccctgatctctggggaggaggctttgacagaagacgatgagctgcgtcccaggggctgcagcattgctgctgtgcacatctgtctggctccccctccaaacccaagcccactcctctccacccaagaaggccagcctcccccagcagccggcaccccgccctaccgccacttagaactcatccctgcagcgggtggaggccactcagccctgtctaagggagaagccgtgggtgagggaagggacgctttgcttcggcagcatctctaaaagaggtgccggcttcaccccaaacagcagcgagcggtgccggaatttcatgatgaaattgtttggcattgcctgctggtttattttccctttgaaatgaaaattacagaaattgaaaatgagcagtgtctgctcttatgtggagaagccccctttgccttcttaggggcatgtttggaaggctgtctcatctctggagtataatcatttccgaaagaaaccaaaaaagagaaagtcctgcagctaggatgttaaatgatgacagtcaagaaggggtggagaggggacagagccggggcgcacggttagagcactggatctttctgttaggggtctcctatcccatctctcccctagaaagccggcacatgccctttcctggggcaggccttgtgtactctggcaaaagttggtagatggtggtaccatccaccccgcagaccccagggccctgcaccctccccatgcacccccccacacacacagtcacatacatacagacacacacaaagacatgcaaatacacacaggcacacaaagacataccacacaagcagatacacacaatgaaacacacacaagcctgggcaacttagtgagactctgtctctacagaaaatttaaaatcagccaggggtggtggtgcacacctgtagtcccagttactggaaaggctgaagcagaaggatcacttgggcccaagaggtcgaggctgcagtgagctatgattgcgccactacactccagcctgagtgacagagtgagaccctgtctcgaaaaaaaaaaacacacacatgcagacacacaaaaatacacagttacagacacacacaaagacatacacacacgcaaacaaagacataggcagagatacaaagatacacacaggcgtgcccacagacacagcccaccagccctcagagcttcccttcaaagggcgctgattgtggcttcaagggctttggggcgagggatgttggggctgctgctgatggccccagacacacagtggaggggctgtgaggacaccaccatcttcccgccatttccccagcagaagggaagggggatggtcttcttcacgcccttttgtgaacgcaccagatattcctcggatgctggaggaggtgaagttttcagatgtttgttgaacaggcagctgggcccatgggaagatgccgacatcctccctgggggagcctggcttgacacaggcaaccagcaagctggcgtcgaccccaagcaccacccggctctgctgccttctggcctcagtgtccttctccaaaagcgctctctccgagccggggctgcagaaatcatcatcctctgaacagtcacccctcactgttctcgagggccgatgtcagcctaacttctcatggattcagggatgattgctgaaaattgcatcctggaatccgggcccttgggcctgcgggaccaattttcccacacgctcgctgctctgagagcgtctctgtccgactgctgcccccagcagccccctttcagttcctcggtgggagagatctgagaggggagctgagcttgttcctgggaatgttctacatggcgggtcaggccctgagacagcagagccagcccacaggagagcctggccgttctgtaatgaaaggaagcatgggccctgatggattcagtggcatgaggctgcagatcagccaggggctgagaaagccgagtccaggggagccttggagacagtgactcacctcccgccttacatagcaacggtgtccacagctgccaagctaccccagcggcagcgtcacaatttctgccccggacgattgtgatatctgagacgctgctgaagtcccgacgtaccaggccagagggagacatgtctgtgcccctctgaccaggcttgtttttcctcctcttcttcgcgggagctccttgcccccagaacacccactgtgaaaagcagtggaaactcaccctttacttcagccttgactgggaagagaggccagatttgcagggaacctggccttcaagaaccatcaggcccagggcgaggaagcccacgttttgtgaggccttaaacagtgcctcctgtcaatggtgcaccccacccaggagactcccccatgctgcggttttcagtagctcggagccaggggcccggcataaactgaggtgacaaggaggtgctcttggtttgctcacaatgtttcctctggttttggtttaatctcccattgactaaccaggaaatagagaggatcagagaagtttggggacctgcccgctgtctcacggagtgagtgacagacccagtgtacctgacttctgccgtggagtcacccgtgattactaatgacaaagggacacaccaatgataacctctcccaagcagtcatcacgcactggccatggttagaagggttccccttacagcctctccctcagtgctcacaaccttcctgggaactggcactgtctgtattctccttgggtaggaaatgagggaactgatgccttgggaggggactaactggccaaagacagaactggggctcgaaccccagcagctggtatagtcaaccactgccatgatatcatcatagatacctgcttggggtccctccatccctcacatcacaggtgctcagacagaactttgcccaacacactcctgctgcacgattaagcagcatgccaggtgcagtggctcatgcttgtaatgccaaaactttgggaggccaaggtgggtggatcacctgaggtcaggagttcaagaccagcctggccaacatggcaaaaccccatctctactaaaactacaagaattagccaggtgtgttgacacaagcccgtagtcccagctactaaagaggctgaggcaggagaatcacttgaacccaggaggcaaaggctgcagtgagctgagatcccaccactgcactccagcctggaccacagcaagactccatctcaaaacaaagaggccaggtgcagtggctcatgcctgtaatcccaacactttgggaggccaaggtgggcagatgacgaggtcaggagatcgagaccatcctggctaacatggtgaaaccccatttctactaaaaatacaaaaaaattagccaggtgtggtggcacgcgcctgtagtcccagctacttgggaggctgaggcgggagaatcactcatactgggaggtggaggttgcagtgagctgagattgcgcccctgcactccagcctgagcgacagagcgagactgtctcaaaaaataaaaaagaatgtggcatgtcccaaatgtgcacattcaggtgccttcctcacaattctggccttacacataaaactatgacttatttcatttttaaatccatttctattatttcaaactaaaatctattgcaaaaggatattccgtggtcctaccttaaccacaataactgccacctgccattcaccaaaggtaactgccatctaccaataataggtacaaggcacacaaagcaatgctatggaatttgagttgggtactggttcccgatgaaggctctgaacttgactttcttcccttttttcaaaaggaagacgagcaaagtctagagaggtgttaaagaaacactagcaccaaacagactttgccctgagagagccgacaagggactggctgtctcactttgtcactcaaggtcactgaatgctgtgcctcttaggagcttcccaagtgcacacttcacacgtggagaaacgctgaaacagggtttggataagcccctgacatgccaatgtcccctttcccaccaggagatcacacctggccctgggctgcagacacagcacagggtggctgctcatccgggcgggtctggcgggggccaggcagggtccaggctgtccctgggtttgaccgatgtgtatgtccttgcccaccagcacgccgagctacaactacgcgcccaacccggacaaacactggatcatgcgctacacggggcccatgaagcccatccacatggaattcaccaacatgctccagcggaagcgcttgcagaccctcatgtcggtggacgactccatggagacggtaggcgcccgctgcatgcctcttggtgggcgtggctccgaacccccagccaggccagggccgagacctcctggcccttcagggttttcctggaggaatagaaatcaaaggcagaatgaagaggccccatgtgctagacctggggaacagcttggagcaatccagacaaaagcctcttccttcatgaaacattttctagatctgtgttgcccaatacggtaaccatatatgctagttatattttttcctgctatttacatttttgaacacatttattgggatgtaattcacataccatacaattcccccaattaaagtgtgcaattctgtggttttaatatgcccagagttgtataaccatcaccacatccatgttaggacatttttcttaccccaaagagaaacctcacagcccttagatggcccactaaatctccctcacccccagccccagacaactggtgatctctttctgtctctatagatttggtgttctgcacacttcctataaatggaatcgtacacgctgtggccttctgtgcccagcgcctttctttcacttagcgccacgtgttcaagcttcacccctggtgtcgcatgaatcagtccccctcattccctgttattgctgaataatatcgcattgtatgggtattgtcacattttatttagccatggctatttaaactgaatgcagtaacattataaagtcagttcttctgtcacacaagcctcatttcacatgctcagtaggttcgtgtggctggagccaatatgtgtccatatcggacagtgcagacattaacacggccaccaatgcagaaagttctgccacacggcgcccttccagatcgcaagatcctgccataggctgcagcccaagtttcactcattcattcattcacctgacagcattattgagtgccagtgtacgtgggatacagcaggcagggaacaaaatgacaaaagtgtctgccctaatggaggcagcatgccaaggcagggacacagatgatccacagataagtaaaagagatggatgccaagaagggccatgaagaaccgtggaggggagggcgggccaggggtgacaagaggcaggaaggtgcagtgacaaaggggacagcccctgggaaagttgagcaaagacctgaagcaggggagggacggggcctgagatctcaagcgcctgtcaccccgggtcggagacgggccaggcacccagtccccactgtcccttgcctcctcgcccgtgttgcagatttacaacatgctggttgagacgggcgagctggacaacacgtacatcgtatacaccgccgaccacggttaccacatcggccagtttggcctggtgaaagggaaatccatgccatatgagtttgacatcagggtcccgttctacgtgaggggccccaacgtggaagccggctgtctgtaagtgtgtcatcccccagggacccagggaggcccctgggcccagctcagggcttcaaccatgcagcccaaacccaagcccaccctgggtggcacacagttttcgcagatgtaccccagggccagcggaaagcaattatgtcatgcatgttatatccctctgctggggaaggagaggccgggagctgttagcacctgtggaaacaggtgtggtggggccgtatgccaggaaatccagggagctgggctgtatacgtgtgtgcgcgcacatgcatgtcaccagcgggtgggaatggtgcttggatttctgttctgggctgggcagtctttgagcctggaggttgtcagggaggaaccccggaccacagcacaggcagctggttgtcagctgggatcagctgagccaactctgggcagcagcacaaagggaaatgctcttccctcccatccttcctggaggaccacgtgggccgcagccctcagccagccattctcctcgggctaacctttgagttgacatgttctggcagcgaacatgctgcgtctggggcaggggagcggacaggccactgttcccggcagcagcttccttggatcggctgggatattatggaggctggctcaaatgaggtttttgaaaagcagatgtgttgctattaagactgtcatttggtctgccttctgctcatgcccagatgtgggaacacacacccagcactcacacagggctggctgcggaattcctcctgaaaaggcgttgacagtgcagtgtggaattccagactgacatgttcccactgccttggacattttgcgagaattccaggaggcaggctgcatgagttcaaggccagagaaagtgatgactgactgttgaccttatcagatcacgcccgtctttggctcttagcgtccccattggactaagagctgtaataacgacagtccacacgtatggagtgtctactcttcagggcctggtctaagaactacataataattcattgcaagccgggccctgtggctcatgcctgtaatcccagcactttgggaggcccaggtgggcagatcatttgaggtcaggagttcaagaccagcctggccaacatggtgaaaccctgcctctactaaaaatacaaagattagctggacatggtggcgtacacctgtaatcccagcactcaggaggctgaggcaggagaatcgcttgaacctgggaggtggaggttgcagtgagccgagatcatgccactgcactcgtctgggcgacacagtgagactccatctcaaaaacaattaataattcgtttcagcatcacaactgccctgtgacgtggatgctcatagtagccccattttacacccaaggccactgaggcacggagaggttaagttgcctgagtttacagcaagtaagggaaggggctggggcttgaaaccaggcagtctctattcccatctgccacgcctctcagaaacttcaaaccatccctgtgaacagaaagaatctgacccactgagggctctacaaacactgacattgggggtttggtcagcctcggaatctgtgatctgactcatagggcccaaaaccacatcccacatggtcaagaaaaagagagtgctcatgtcaggtttgggaccaaagacacacggtatctgtcagccaggactcctttggttgcaagcagaaatgacctttgaaccagataaggcatgtaagataaaaggaacacagtaactatagttactgaaaagtccatgcacagctccagcctcaggcatggctggatccagcagtcttacaatgccattggaaagctctcatttcttatctctcagtcccacttccgccgaattggcttcattctcaggtgggtttttctccttgtggcagggtcagcagctccagattttcagccatcctgtttaggaagccaaactgctttgaacagaagacctgaggctgactcccactggcctgacttaggtcacgtgtccttccctgaaccattcactgtagccagaggtgacagaaacccttgagtaaccaggctgagtacattgggcaggggactctgaatggggccaggtagttcctacagaattagaagctgtgacacagagcaaggcattggtgctggccaggaaaagcaaccactgtcctccttcccctgagcctgggggagcgggaccactggacaagctcagccccattagctgccggttgctgggttctgcagagcgcccgtcgctcagcagtcttcccagctccctcgcctctggattcagttgtagcgcctcacgctggccttcgagccccccatgacacagccccatcttcagcagctgcacacatgcttggcagcctgcccgacgttcacagggcactggactggggagagatgaggggttaaagatgacggaaaccctaggacccaggccctgccctggtccccagggaactagcggggaaggcactcagatgctctgacgggactgtccaccattcaacaggtcctgggtcctgtgctgggcacaccccttaagtcccttaccctacattgggaatgccatcagccagaaacaagagccaggagaggtggctcatgcctgtaatcccagcactttgggaggctgaggcggatgtatcacctgaggtcaggagttcaagagtagcctggccaacatggtgaaaccccacctctactaaaagtacaaaaattatgggtgtgatggcgcatgcctgtaatcccagctactcgggaggctgaggcatgagaatcgcttgaacccaggaggtggaggttgcagtgagccaggatcatgccaccacactgcatcctgggtgacagagcaagacacctctcaaaaaaagaaacaggagccaggaaaggtggcagatgtatgggaattcacttagccaatatttactgagtagctcctctgtgttctaagggtataagtcctggagatacagaagtgaccacctgagccagccttcctgcagcttagagtctaactgggcaatagacaataagccagagaaataagtaaattatatagcatatgagatggtgataagtcttcaggagaaagataaagcagggagggtggggagggggcgcagttccgaatagggtcctcaggaggggccttgtgttgggtatctgtgctgcagaacaaactgccacaaactcagcagcttaagacaacacacatgtacaaactcacagtgtctgagggtcagaagcctgggcctagccctgcagggtcgtctgcttaggctgaaatcaaggtgccggccagggctgtggtctcatccagaggcttgactggggagcatctgcgtccctgctcatggggcaggtcaagtgcaagcagaggacttgaacccatgcagtctgcctcccagactgctcacagtctagctgctgatttagagtggcttgcttcttcaaagccagcaaggggagaaagaaaccagagccagactgctagcaggatagtagttgactatctcataacacaaccacgggagtgacagcccatcaccttcacaacccactggttggcagcaggtgcaggttggtccacacccaaggtgagggggtcacattaaggtgtgatcaccagggacagggattctggggaccactgaggcctgtcacgggcctccttggtcatagagcaaagaactaaaggggtgagggacggtggcccctgatctccagggaaaggacattccaggcagagaggatggtaaagaagaaggccctgaggctgcactgtgcctgggctgtcaaggaacagcgaggagccagtgtctgccccagaggttcaggggaagggttcaggaagggccaggatttgggctggctgtaaagggggggtcgccttcactcaggaagtggggacaggaagggcaggagggggacagggtgaggctgtcagctcacggcatgagctgagacacagaaactaagggggggcgagcacagagtgggggttcagctgaatctgggccgcagaggggagctgctgaggttgaggtgccagactgcagcttccatacctgcagatgtcagcctcccacaaactgctgcccacctaccgctccccaccccccacgcgaggctgaggcaccaccacctgagtgactgagtccccgatctcctgcctcccccaggaatccccacatcgtcctcaacattgacctggcccccaccatcctggacattgcaggcctggacatacctgcggatatggacgggaaatccatcctcaagctgctggacacggagcggccggtgaatcggtgaggacggagcagggcaggtgttgagggggccgggacattgacctgcgggaactcagagcaaaaccctgtgggtctagaacgtggggtctccaagggtcgggagctggggttctcaggtcccgccatgccaaccacttacctgctgtgggagagaagcatggtcccctctccgagattctgtcttcccatctggaatgtggccaaggtgaccagttggggaccttctctgagctaaaattacccaaagcttgaaatgatagcagcagtgatggtaggagatggtgctaactgcacggcgcttgtgtgtgaggccctattctaagtactgtgcagggaaatctaggaatttgatcctcacagtaacccagcgaggtggacattatcatcatccccattttaccagtttggaatctgaatcccaaagcgattgagtgacgtgtcggaggtatcccagcaagtctggatgtagctctgggaattcagatgctgactcaccacgccccataactttaatgctggagggtgtgatgggaacatattcctaggtgtccagagaggcagaataggaaccgtgagggtgagcaagtcagacaggtgggaggtgggctgagtcagggcggggaggctggtgtggccgcagcgacatctggtggccagcgctcttaacagccaccaggttcctggcctccaggtgctacttcaactcctggcttgcacctctggcagcggagcccttcccctgtggcctcccagaggctccagccaggcgagcactgtgtgcccacatctggctgccctgtagggggaccgtgtccattgaggctcctcccctgactgtgaggccaggcaagctgtaatggtataaaatggacatgtttggggacactggcctgggagccaggacacctgggggtcaggggacagggtggaagcttcccctctcagcttcagagtccccatctaggaaatggaaatgaccaggtggcactggatgaaacatacaaattacatacatgcaactgcaaagcaccaaagaagaaaatactcccaaaacccaatgcaattaacctgacatcaaggcaaccactgcgcctgacactgagctcaagacagagctcaagacgccaaaccactgcgcctgatgctgaaccactgcgcctgacgctgaactcgagatagagctcgtctagtgccgggggagttgctgggcttcctgggaggggcttgagatgtgtgtgcgcgcacacacacacacacacacacacacacacagttacttgggtgggacttacagtgattttgacctgggtcatttctactgtgtgtgtctccagacccaagtctctggggaaggggtggctcaactcagaggagggtgggcaatgctctagtgcccagctgggcacactcaccacaattgctgtccaggctgaccgtaaaccaaggctgactcctggtgccgtccctgctcctgggggaacggggggtcgtgggaagccctcatgttgctgagaagcaggagccgtgcttttttccaggtttcacttgaaaaagaagatgagggtctggcgggactccttcttggtggagagagggtgagtgccgggtcctgggagggacacccctgcccacctccctccctctgcccaggaagcttctgtagccccaccgcatcatgctattcaggagctgcccatggctctgaagttggtccaaaggcccctaaacacaaagcccattcactgctcctatagacacagaattggggtctgaggtcacgtgtacgcttttggcatgctttgtccagcctctacaatgtcttcaatttatttaatttattgccaactcatgcaatttgggaagtttcttataaaattccaatgtcttaagtttcctaaacatcagaagacccgggcaggtggccctgcgccctccactgtgaggaaaagccggagccgagggggcacccctctaggtgggcacacatgcctccggggctcctccagagctgagaggccggccccgcggctcctgctctctgccccatagcaagctgctacacaagagagacaatgacaaggtggacgcccaggaggagaactttctgcccaagtaccagcgtgtgaaggacctgtgtcagcgtgctgagtaccagacggcgtgtgagcagctgggacaggtaagaaggctcccttccctcccaacggctccccctcctgactgcagccggccctgacctgcgaggctctgagagccgctgagccagcagggccagggcctcccaacgggtagtcctttgctgccgtgtggtgcccaagatgctgtttggtggtgcaggatgatgctcacaataagtgattcatttctcagcagcctttggaccctgaccgtgtcagaggccaagtgtcccgtgggtgtgtgtatgcccttagcgcctctctagcccttgccgatctctcttgcacgaaggccccagcaggagttaaattattttattttcaccatattcactttgacagtatcctctttgtgactggttttccttttataggagtaataagacatggctttttaaaataaatataggtaaggttttaaaaagtgaattgattgcaagagaaatattaaggaaattatggccaggaacagtccgtggctcatgcctgaggtcccagctactccagagctgaggcgggaggatggcttgagcccacgtgttggaggctgcagtgagctatgattgcgccactgcactccagcttgggtgacagaataagaccctgtctctaaaaacataagaaaaaagaaaattatctgggaagtatcagagatagccagaaactgacatgtttgggaaagcctgaaggaggcttttctgaggctggaaagccagggcaggcttggagaggagggtcgggggcggggcagggcagggaggggagtgggatggaaactctgccttggctggcccaaggggtgccggaggtgtgtccctgccctgcctgtcaaaggctgggactttgagctggggctggagctgtgtgcctgtttcacctatgagaaaaagcaaaaccagggccctggtattgaaggccaaggcctgaagtggatgcgtttctgatggactgcatttgaatgactccatcttaacactgcacacagaattagtacaggcccatacaggcctgactgtgcctccccacccagtgtgtgtttgtaaacccacagacccctcttagtcacacaattaacccgtatctgccaccgggcaggagctgtggatttcatccctccgttgtacagcatgaatgcgtccccccgcttgccaggcactgtcctaggcgcagggccacagcctcgaacatgctcaacagaagctcctgccctcccagagctgatgttctggagagagttcagccttgactttgtaccgagatcccagaagtggttctgattttagttctgggctaaaaggagtgaaatgaggaggccaggaagtctttgcccctcgacgagggaacgttgtcaagtcccccactggttctttctgatgtctcccctgacccagatcagggcttgggcagccagaatgacctctttgctggggccaagaaagaggaggtatcagcattttccaaacaatcagagcacaccactgaagccaaaggaagagagtgctgagggcggagtttggggcacttagcctaggccagctgggaggcagcaacccacggcccccgacccagccccggagctttggggacctcaggctcagacgtctgccccccatcccaggcaacggccctgctcacaagccggtactccccgagtgccgttgccatgtccctgcttgtgccgtgccttctggaatgccctgcccagtgtagaagctgtaccctgtggcccgaggacgtctcttaggggcctcacacccagccatagcattgtcttgggtaccttgtccgtgctaccccacgtggtagatgtttttttgtcatttgctgaacaaacgtgcccaggaaccgagctcatgtgcatctgtctgtctcccggtgacacggggacatcctaagggcagggcccggctagaattcatgtcatcattgccaaagcccagaccagggcccaggccgggcaggagtaaatgtgccctgggcacctcgtaatgatgatcatcacgggcaacacgtgagtgtaagctctacctccagccaccctatctggcaggtatgttctgtacacggggaaactgaggcccagggctcaggcaaactgcccacagcctcacagcttcaagtggtggaggcaggatttgaacccaggtagttgggctgcgggaccttcgttctcagcagctgtagggaccccaagtcaagccgacactggcccagccctgtggggctcaggcgccgcccccgccaggacagcctcgggacgggccatgtggacacggcttctacatgagtagttgcaggggcagcaaaccctttccgcacaagatcagacagtaaatagtttgggctttgcaggccacatatttgtttttgttcttgctttttacaactctgaaaacgtacaatgtaaaaaccgtccttggtttgcaggccatacaaaaacaggctgtgggctggagttgactagcaagagggctgctgtttgccgacccctcaagtcgtgccccagctgagtttgttgggttggagcggggagcaggcagtggggaaggagaattccaggcagagagagctaagtggacaggaggctgctcgccagcgcacacagctcagggcttcacgcagaactcagagccctggcttttcttgaaaaatcagacctgggcttctgggcctgtgctcccctctggcgacagtcagatgggtatagccggtcacagtgcccactttagcctccccaggtcccccaggcgcttctgggctggcctcattcagggccatgcctgctggcccatcagtctacttctgcactaaggaatccaggttgctggaagggcctgcatgcattgaaggggatgggagggtggcagggcgctgtgaatgcaattagattcagcctccaggtgagaacagatgggcgggacaggggcaagatgagcaggtgaaaggcaccagggccttcaacggcagcgggcgggggcagacggtgcagcagagggttgggggggatggtggcaccagactccacacttttccttacagctcttgcacctcccagttgtgtgacccaggacacatctctctacctccgtgtgcctcatcttgaatcggcacagtaatgacagcacctgcctcgtagggtagcgtgaggtgtagtaagcaagttaatatattaacacacagtgcttggcacatgctaagtgctggagagacacagggaacagatctgacccatggcctggaaaggtcactttggcacagaataggccctaaagagtcactgggtcaatgggctggagcagctgtggacagaagggaagagaatccagtttacaggtggttgcagaatcccgtgaggggatccaggaggctggaactggggaagagcagaaggatcaacacgagagatttggacagtgattctatctacattcagcgtctgaccacaggcctggagttgagtgcacacgtggagcctctgcacacactgcactgattgagtctgggaaggtggtcaggggagacctccttgcgctggagcagacgggaaggaagagaagcctccagcagcaggaagggctggagaaaaggcattctaggcagaaggaacagtgagcgccaagtccctggggcagcagcccacaggggatactggagagagggctgagggagaggaggaccgatgggtaggccagggccagattgcagaggatgttcaaagactagtatcaggagcttgggtcttgtcttaaagacagtgggagccattgaagggttttaagtaggagagtaatatgatccaacttgccctttaaaaagattcctctagctgccatgtgggtggattttaggagcagacagaagcaggtaaccgtgagagtggtggctgtcggaggcatctcgctgggggatgatggtagctctgcccaaggttcaagcagtggcagtggagagaagcggcattggagatagcagaggtggggctcggtaacagctggatgcaagcagggagagggatgtctccagggtggatgggggtggcaggggagaggcgggtttaggggagcagatgagcagctggccgaggccctggcatgtctttcagaagtggcagtgtgtggaggacgccacggggaagctgaagctgcataagtgcaagggccccatgcggctgggcggcagcagagccctctccaacctcgtgcccaagtactacgggcagggcagcgaggcctgcacctgtgacagcggggactacaagctcagcctggccggacgccggaaaaaactcttcaagaagagtaagtgtcacaacctggctgagtgggacaggaggagagagaccatgcctggggggccccattcattcactccgacagttccacagagactgtcactttgccaggtggtgatctaggggctggggacacagccacatctcctcacgagccacccattctagtggggagcagtagtaataaacagataaggccaggcgcaatggctcacgcctgtaatcccagtactttgggagtccgaggcaggcagatcacctgaggtcaggagctccagaccagcctggccaacatggtaaaaccccgtctaaaaatacaacaattagccagatgtggtggctcacgcttgtaatcccagctacttgggaggctgaggcatgagaatcgcttgaacccaggaggcagaggctgcagtgacccgagattgtgccactgcactccagcctgggcaacagagcgagatccatctcaaaaaaaaggaagaaacacacatacaaggttctgtattgattggctggtgaaaatgctaggaccagaggttcacaggaacccagctctgtgcttcccctaggagccatgtttcagcgttcaattagtcagtgtttgtggtgagtttatagaactaccctgggctgggcgcggtggctcacacctgtaatcccagcactttgagaggccgaggtggacagatcacttgaggtcaggagttcaagaccagcctggccaacatggtgaaaccccatctctactaaaaatacaaaaaattagttgggcgtgtggtgtggcagcagagtcgcttgaacccgggagcagaggttgcagatagctgagatcacgccattgtgctccagcctgggcgacagagtgagactcggtctcaaaaaaaataaaaaataaactaccctgaagaacaaaaatagactatagttgagtggggaaaagcctcactcagctgaagaagtgtctacaccttcacacctcattctcggcaagggccgaggagaggacagtcagacagaagccagggagcaggcgaagtggagagagggactcttctagacccagccagaaggctcagccgccaccctgggccatcgcttcaccattctgaggctcagctcccaccatcaaacaggaagaatggtccctgcatgactttaaaacaagaatgagcctgtgccctgaaaatgtgtggaggcgtcggggtccgccggctagaagtgtgccctccaaggctgggcagcttcccacgtagcccatttctctggcctaaggacagccaaagcctaatgagagattttaggtgttgtttttaaaaaaaattatggtgaaattcccataaaatttatcatcttaaccatttttaagtatccagtagtgtcaactatattcccactagtacgcaacctatctgctaaatgaactcttcatcttgcaaaactacaactgtccccattcaacgttatctccccattctcccaccccgctcccacccccaccccgttctcccaccccgctctcccaccctgctgtcaccccattctcccacccgttctcagcaaccactcttcttctctatgagcttgactgctttaggggcctcatgtaagtggaattgtacagtatttgtccttctgtggctggcttatttctcttcgcataatgttctccgggttcatccacatggtagcctgtgttggaatctccttcctgatcgggcacagtggctcacgcctgtaatcccagcatttcgggaggccaaggcaggcggattgcctgagctcagaagttcgagaccagtctggccaacaaggtgaaacccgtgtctactaaaaatacaaaaattagccaggcatggtggtgggcgcctgtagtccctgctactcaggaggctgaggcactagaatggcttgaacctgggagcgggaggttgcagtgaactgagatcatgccacttcactccagcctgggtgacagagcaagactgtctcaaaaaaaacaaaaagtctccattctttataagacggatgatattgtaccacagactagttagagattgaggtctctgacggcaggcgcagtgatctcctctggtccagccagccaggcagcaaatgtcttcatcgtggagcagataagtctctctccataacagcccagccactgcctgaaacaccgtttcccagctgatgaccctccgttacatttcctcaccagctgattaggaactactacattaacttttctagctgaacagaatgattggtttccagattggattacacagccagcatctccttgcttcaatatgtggcacagtcgataatctttaaataatacaagatctggcagggagaaattcagctcttttccccttattaatgcttagaggaaagaaaaatacctaaaagtagctgagagtcagctcagccctggtcagaatcctcatgtgagtgtaatgtcagagccgggacctgcacctctcaacagccctgtgagcagggcaggggtgatcatcaggggatgatggacaggaaagactgggtcacgtggctgatttggggactccagccccatctcctgcctggcattcttccccctgctagagtctccgacaagacactctgtccctcttttctgagcagtcagcctagagcaggctgaactgggggctttctgtcccccaggggacacttggcaatgtttggagacagttttggctgtcacaattgtgtgtgatggaggggtgctgctggcgtctagtgagcagaggctatggatgcggcaaaacatcttgcaacgcacaggacggcccccaccacagagtttgatctgaccccaaagtgtccgcagtggtaaggttgggaagccctggcccaccttgatccacggggatcctggctgtggcgtggggaggttaggcagagccagccagctcacagcagaagggggacccaggaacaggagaaggggacgaggactcgggggatgggcccagctgactggggttcattcatttcttgaactttgtgcaagacactgagattagagttgacctggagagacacggacttggacctcatggatgaaacaagatgtgaacaagtgaacaaagggccacttccgctggtgaaaaacgcatgaaggagacgcagcggtggcgggactagcagagaggggtggcggctccagaatggcgctcaatggacatttaatgagaacaaagtacagaaaggagcaggtcttgtgaccagccagagagcaagtgttctgaggaggaggaagatggagtacaaagaccctgtgctcagaatcagggcggtgagtcccagtcacagagaggtgaccggtgtggccgagggtggtgagaagcaccatgggcatgggcagccacatcacacaggcggtcaccggcgtggagaggcagggagtgggcccagggttgtcaccttaggtgaggacgtcagctgcaggcagagtccccaccccctgcagtagctggtccacaccagctcatcaggcatgaatgcttcactagttccgtttcgtgccatcctccaaggagcctttgtagggtaggcaccatcctgagaagttacccaaatcgccggggccacacatgtgctcaggggtttgcacctgagccatctgattgcagagtcaaagctcttggccgccgggttatgaagtcctgtcccattccctgttggtgtggcaggaagggtacctccaggactctggacatgaacacagagtgatggggagagcaggtagtgtggcttcagtccaggaaaggattcacacagggctggcataccgcttctgtgaagagccagagagtaaaggtcttgggctttgcaactcagccctgcgactgcagaggtataagggaatgcgagcagctgtacccagtgaaactgtattcacaaagacagatggaggctggcctgggcccttaggccatggtttagggacccctgaatctagagctgggagatggagggtggaaagaggcaaagcagctcacttatgagccgactgagacaaaaggagtggagaggacacgctgggtctatttcctgagcctctcggggcaggacctgcttggcacagggaccatcctcggcaatttgtgtacttgcatcgggagactaaaccgagggagagaagtgcccaggagaaggctgccctgtgtcagaaaaggcccaaggctctgctggagaggggaggcctttcccggcccctcaggatccttcggcccttgtgactctgatgcaaggtgtctgagaactgaaagatacaaaacatcccccaagagtgggggtggcacccgggccacgtgagaagggagccctttcctccctccttccactgccttccgccaccacctgcctccagctggtcctctttggtcaccatctcggggtcacttgggatccaacaaaacctgggtcactaactggctccaggcccttctctttaaatgaggcacatctggagaaggatgacaactgcagtgcgtgcctgctggggccagacatgtgtcaggtgggcagaggttttaaaacaggaaggagtggcgggggctgtggccaacagggaagacagtgggcagccaaaggggccgcccatccccggcccgtcctgaccatatggaactgtgggcccgtgagacatctgtttcctttctggaagctggaaatctggatccctacatcaccgccaccacctcccctttttctttaatgttaccaactcagatttgtttttgagacatagaagatacaggctacctggggtgtcacttcagcctgcacccctgagttttcagcgtcagggcgtatgcaaaagcccccctcagccttgttgccggcccacctgggtgtagcacctgcctaccacctggtgggcagcctccagctctctgggactcaaagaagctaagtggcttccccagtccccgtccatttctacccagagacaggcactgcagggcccctttttcccagtttaaatcaacatttttacatccatgatactttttttcctttttaattgaggtgaagttcagataacatcaaactcaccatttttacaattatatacaatgcagaggcatttaataggttcacagtgttgcacacctctacctagttccaaaacatttcatcaccccaaaagggaaccccgtacccacaaagcagtcactcctcactaccctctcccccagcccctggcaatcaccaatcttctttctgccgctatagatttacctattctgggtagttcctataaatagaatgtaacaatacgagcccgctttgtgtctggctggtttcactccgcctgcttttgacattcatccacgctctagcgtgaatcagaacctcgctcctggttctggtcgcatattccgttgtacagatgatgtaccgccatttgtttacccgcaagcagctctcgcttgaaatcctcttgagtcagtggcttcttggctccaggacttccgtcttgccggtgtgatcacctcgaggccctcccctgcggtccaggatctgcgagcaggcgggtagattccacgacccctcgagtcgcaggcaaagctgagcctcatgcttggaagcccggccctatcttgatgaaggacccactgccctgggagcctggccagcctttcctgcctccctaactctgccactcctctaatgcccacagagtacaaggccagctatgtccgcagtcgctccatccgctcagtggccatcgaggtggacggcagggtgtaccacgtaggcctgggtgatgccgcccagccccgaaacctcaccaagcggcactggccaggggcccctgaggaccaagatgacaaggatggtggggacttcagtggcactggaggccttcccgactactcagccgccaaccccattaaagtgacacatcggtgagtgtccaggtggaagtcgagggtgaaggggacaggacagacctcggcaaagggcttcccacacctcttgggcccctgaggaccaagatgacaaggatggtggggacttcagtggcactggaggccttcccgactattcagccgccaaccccattaaagtgacacatcggtgagtgtccaggtggaagtcgagggtgaaggggacaggacagacctcggcaagggcttcccacacctcttgggcacctgggctgctccccctccaccacctccgagccacacgtgatcccttctctcaagcaggtgctacatcctagagaacgacacagtccagtgtgacctggacctgtacaagtccctgcaggcctggaaagaccacaagctgcacatcgaccacgaggtgagtggagagcgggagaggagcatgctctcggccaccacgggcctggcaggacccccggttcacagtgggagggcagtgaggccagacccagggaagaggctggagaggtgaagtgaggtccccacagattcctcaacgcggggataggtgtcagtcccagcatgagacagatagcttcctgcccaggccgtctgagggacgatggcttagccacgttgtcccccttttgacttacaagaagtctacgctacaggaggcctttcatcaaacccaggggagacactggaggcctcagtgggctcagcgggttcctgcgcaggccaggccggaaaaatgactcggttcccttgcaagggctggctggaggagaaggcgggcttccttcaggcagaacaagtacctcctccccacccagacatgccggtgcttgccctggggcccggggagtgcaggctgccgctgctgagcacagacacggcagcgtgggggcagtcaccaggccaagtctttgttgtccagccttgaaggtttcaaggcctcctcttctgcccctccctcagattgaaaccctgcagaacaaaattaagaacctgagggaagtccgaggtcacctgaagaaaaagcggccagaagaatgtgactgtcacaaaatcaggtgaggcagtagcaaagggacctccctaagaccccactctcctacaggacagttcagttcatcccctctcgtgattgacccctttcattttttatttttatctttatcttctcccctcatggcattaaaaaaatccgtaatttacctccctgttgtcagccagtgtggcacacggacctgctcctcagccaggctggcgcccagattccagtactgctagcaagagacccgtgctggctgcgcagagccggctccaggccggaaaagtgcctctgccgattgccctttcagaaatcccccatgtggtttgaggtccatgttcccggcttaggggtcccctggcccaaaggactgaactctagaacagctctaatagaacattctgtgctgacggaaatgggctatatctgcactacaccacacgtggctggtgcatacttaaaattttggctagtgtcactaaggagccaaattttttattttgcttaattcaaattgaagtagccacctgtggccagtggctaccatactggacagcacagctgtagaagccctgctgtctttccagaaagtgttgcaaaacacaggcttccctgtgttgaccccgaccaagtgtgagtaggcagggtggtgagggaaccaacctcaagatgctgaggctttgacatgtaaaattaaccatcaaaaaagaaaggaaaaaggatgctgaggctgatgcacctaaagccaggcccagcttctagtcgtggctaaattacaattaacccaacctgctaaagtctagcaaaagtccaggcagagtcctggctcatgcttggagaaagaagccactcaggcaggcacctgctgccctgaggatagggtcatgccctacccaccaccaccccagaaggagggacaggggtggggcagcagcaacacatgggagtcccagaaatcacagcttgcacctgccagcggagccctctgagccactcctgaagcctggggctgggggggtctgttacagctaccacacccagcacaaaggccgcctcaagcacagaggctccagtctgcatcctttcaggtaagagcagcttgaggtcctggggaagagatgcagaggcctgcatgaggaggtggccctcccttaagctaaaactcagaagaaaaggaaagaagtccaggcccttccctgggaagtccacggtagccctcgaagaggccttacttcccaatcaacactgagcgggcctccgacgcccccttgtggctaaatggggttaccgcaactccaccaagcagggcaggacacaggaaggaggggaaaggggtgtcaacaggagtcccagtagctgcctggttctgtccccagcttgtgcccccttgggagttaaagtagaatgacaagacccaggttctggtcccggctctgccttggagcagcactgggacttgggaccctgaattgctatgcccatggctctctgttggagaagcctcagcgaagcccttaggtggacaggaagagcagagacatggggtcactgatccctcagaggcccaaggtgtgtgtggccctctgcgcccataggaagggcctgcaagagaaggacaaggtgtggctgttgcgggagcagaagcgcaagaagaaactccgcaagctgctcaagcgcctgcagaacaacgacacgtgcagcatgccaggcctcacgtgcttcacccacgacaaccagcactggcagacggcgcctttctggacacgtgagcaagcccagggcaggggtggacaggctgaggcccaggggttcaagaaacttctccacttagtgacccagacctctctcagaaagggggtccccaacaccaggggtccacggtgctcgggacagcctcttggcatttgacgaactggttttaggggctgtccctgacaggaatcactgttggcagatggggcctcctcccgcaggcactcaggacatgctctctcttccttggcagtggggcctttctgtgcctgcaccagcgccaacaataacacgtactggtgcatgaggaccatcaatgagactcacaatttcctcttctgtgaatttgcaactggcttcctagagtactttgatctcaacacagacccctaccaggtacaggcaacccgagctagagggatgggggtgtggggtacaccagtgctgccaggtaggccccccccaacctcagggaagtgatgacaaattgtccaagtcccactgagtccctgagccggtgggagtaagttgtgaagctgctgagattgggggttctgtgttcaatcagccttttttgcctccatcaccctgctttttgcctccatcaccctgcgtgtgtaatatatatggcttcttccctctaacttaacatgcagcatgcaaccaggttttgccggaacttgtgaagactcctaacactgtcaggctgtaggatcaagccaaatatcacccactgcagggcctacacggaccgcgcagctaatataacagtaacacactgcaccaagcactctgctaagtgcttccgtacagtaagccatctaaacacacatgcgactgaagtggcccaggaccacacaagaccaaaaggagcagtggcatgtctggtcatcggaacatgtgggcccttgtacagggacagtcactactgagctccagcactagagctttcctgtactgtggccttggtattgcccaggctttgacctttcaagaaaagcctgaaataatttaaatgaaatctgatgtttaaatgtcagcagcacaaatgctttaattactatataggtgtgcagtctttctccttagataggttcaccctcatactttaccaaaggggtaggttaagtccctcaccggtagctcccagactacacaagaacccaggccacttacccgtcctttcatcaaatggctgctttgcaatcaggaggagctgagggcccctgaatgaaggctgctgataaaaccaagacttggaaggctttctttccaagcttgggaagtttcctgaccagtggctgcagaactccaacgttaaatacacagacgtggtttttattctcctgagttttcactctcatgaagagtgaacctggtgggacttgaagccaaaaagtcacctaactcttccaaacgctggctcttgcagaagttggagtaaacaggtcaccagcccctagcaccttccacccgccacctgcctgaaatatgtcccctggttggtagaagggcagggcgagagtccctgtacttaccttgttgacagactaccttttttgcaaccagctgatgaatgcagtgaacacactggacagggatgtcctcaaccagctacacgtacagctcatggagctgaggagctgcaagggttacaagcagtgtaacccccggactcgaaacatggacctgggtgagtaggcaccccaacgtggggcccttggacagcagggtaaccaaaggaagggactcaggaggtggtgtctaccccaagaatgagcctgaaatcaccaggctttgggaggtgatacagttccagacgagtcatgggagcccctgtccatagcaggcagatgacctttaacaagctgtgattcctgagagaggaacacctgcaccaactgcccaggaaacacacggaattccgtctcatttcattgtcctcccttttgtccactcatgcattcaacaaacacttcctgagaacttacacctgaaaccatgttgactaaagatgaccccatcctcgctgacttgtgtggagccagtgttgtcctaagaagagcagtccacagcaggaggcctcttgcttgtatggaaagggtaaaactggatggtagaatccagtgtgactggggaagggcactgctaaataaaaccagggtcagacctctgaactgagtcctgaaaagtaggatgcaatcgaccactgagaaaacgtggagggctggcgctccaggaagcttaaagtgtgaggagcagaaagcagctcagggggtgcagccaacacaactgaggccagtggagagtggcgggagggcatcgggccaccctgtgtggggcttcctaggccacggtagagtttagatttcatttgtggtgtatcaggaagccaatggagggttttaacctgggcaccgacatttgctaggtggagaatgggactttatgggagaaaacagcgaagatggcccagttatccagggagaaatggtggtggcttggactagaggtgggagcagtaaagatgatggatttcagattcaggtggtgaagcccccagacaacatggtgatgggaggtgcgggattaggagtcccaggtaaatcctgagttttgtttgggacaggacaaaatctgcagttttaagtttagaatgccaaccagatagatattttaagatgaaaaaagctaaacaggcatggttgctcatgcctatgattccagggctttggaaggctgaggtgggaggagacttgagcccaggagttcaaggttacagtgagctatgatagcaccactgcactccagcctgggagacagagctgtcgccccatctctaaaaataaaaaaaatatattaaaaaaagaaaacaaagctaaaagaaaaatgaagttcacttactagtgagagagagtggcctaaaaaaaacctttggtatttaaggtcccttggggaagggactgtgtctaggaggatgcctagagttcatgtcaggaaaatggctacacagcttaggaggaattcagacgctaccgtcggctctagttatgaagagggaagagctaatgtgtttacacaagatgttgcactaatacttctggtcaggagcctgatatgatcagaattttcactagtagcttcctaatctctgccactcaagtgctgctactcttgtgatcaaagtgcaatgacatattagtcactgtgtgccaggctctgtgctgagcattttacatgtgttagctgataagctttgaggtgaatcttatcctcattttatggaggagtaaggtgaacaaggtgggctgaccccggagcccacgcacttgatcctgccacatcctcgggaaaacttccccagagcccaaaggggaactccctcctgcacttggtcagggctcttggctttctgtcctctggagcacagatgttcatgcctgcatctacctccctcaccataactaaggtcagcgctgaatgaagccatcagggtcctgaaactgatcatggtgacactggattttaggcaatctacaaggctatctaggagacttagggcaggttcccctcataattcagtctacccctcataattcagtctactctgagtagggaacactatcagcatcatgggattgtgacaaaaaagcataagatggttttctggtgtgttggggttgttttgcctaaactatctgctcctgttttgtttttcatttctccttcatttaggacttaaagatggaggaagctatgagcaatacaggtatttcgttttattattaaagcctaaacaaagttctcctatcttggcccatccttcagtctcatctctgtgagtctgcacctgttatcttgagaaactgcccttccctctggtctgcccgagaccaggatcacccaccaaagataggtgtcacctaggagaccttctttgtatagttctttggggactttttctttcttggtgatggttaacattcattctcctttgacacttgaaaacttaggcagtttcagcgtcgaaagtggccagaaatgaagagaccttcttccaaatcactgtgagttgaggaaccagcttacaaatagaaatctggttctgaccgcttcattttgccaatgctattctatttgcatgccatttcttacataccaccctttgtttgttctcatgatgagggtgggggggaagtactaatgcacatctttccctaagaaaacacttgaatccatttcatgttttagattaatgccttgtccagtacactgctgttctcgctataatctgtgcttggtaaacttgagctattacttagaggttgagaagcatttaaatattacaaattgctaggcatcttgaaggctgtggctacaaaagtgctaactgatatacaacatcagtagtaggatggcctcattaaatggtttccaaaaagcccatgctacaaactctcactccagtgccattggaggctgacagggactaagagactggcaacctgtaaagttcacctctattctaaagggagcaggccagtttgctccctgcaggaatgggctgaggttcgccagattttctcattcgtctaccaaatccaaaaatgcaagtatgtgtgagaattctttatcattatcatctaatttgacattaagttaaccatgtgggcaaattatcgcccttggtgaactgccacttgcaacctctggtctactcatttcttcctttatatgcatataaacctgtgtggctttaataggacattagtaacaggtcacctaagcctttcttcggtgcttctagaattaaggtacagaatctttacatatcacaatctccttagccactattctgtccagatccttaaatgccatccttgccaggcattgggtgtataagtaaacaaaaaattgaggtgactaggtggtggcaatcccgttctaagtaacctagaaatattcattctcagcagccttgaagcaaagcttcctcagctataggaccgattaggaagtcatgataaagaccatgatagctaagtgctaagatgagtttgttttgttctttaggggacaactgtgggaaggctgggaaggttaagaaacaacagaggtggacctccaaaaacatagaggcatcacctgactgcacaggcaatgaaaaaccatgtgggtgatttccagcagacctgtggtattggccaggaggcctgagaaagcaagcacgcactctcagtcaacatgacagattctggaggataaccagcaggagcagagataacttcaggaagtccatttttgcccctgcttttgctttggattatacctcaccagctgcacaaaatgcattttttcgtatcaaaaagtcaccactaaccctcccccagaagctcacaaaggaaaacggagagagcgagcgagagagatttccttggaaatttctcccaagggcgaaagtcattggaatttttaaatcataggggaaaagcagtcctgttctaaatcctcttattcttttggtttgtcacaaagaaggaactaagaagcaggacagaggcaacgtggagaggctgaaaacagtgcagagacgtttgacaatgagtcagtagcacaaaagagatgacatttacctagcactataaaccctggttgcctctgaagaaactgccttcattgtatatatgtgactatttacatgtaatcaacatgggaacttttaggggaacctaataagaaatcccaattttcaggagtggtggtgtcaataaacgctctgtggccagtgtaaaagaaaatccctcgcagttgtggacatttctgttcctgtccagataccatttctcctagtatttctttgttatgtcccagaactgatgttttttttttaaggtactgaaaagaaatgaagttgatgtatgtcccaagttttgatgaaactgtatttgtaaaaaaaattttgtagtttaagtattgtcatacagtgttcaaaaccccagccaatgaccagcagttggtatgaagaacctttgacattttgtaaaaggccatttcttgggagttttttggtgtgtctgtttttttaaagtattcaagatactaccagtcaacatctttttggaagaaaatgccttgggtttagaagattttcttaaaaggggagtagatggttgtagattgactaaaaagtctaccatacttcaagggactacaggtaagtctcatagtataccagctttggtacttcattttttaaaaaagtattaatcaattgcaaagaaattcgccttggccaacccttctttgtgtatcaggtagtctaacctgatacaagtagttgacagatttcaactatcaatcaccagtccaacccatttctcatttaacagatgacggagataatccctaaaagcacccacatttgtttcaatgccccaaacaggccaaggctccctagcaactccctagtggcgttttttaacttctcagaaactgttaccattatttgaaataggcttccttaacctcctttacccttaacccaacagggattt

SEQ ID NO: 15830 - DNA, 82971 bp, Homo sapiens
ggggatgcagcagcggcagcggcggcggcggcggcggcagcggcagcggcggcgcggagtcccctgcgcccagcggcccggccgggctgcggcagaggcggcggcggcgccccgctccgggtgaggttgccggggccgtgcgcgctggtgagtggggcgtggggggcaggtgggtggctgggggacgcggggctcgggcgggggctcgcggcggccggagccttccccggcgtgagcccggccgcgagcgccgcccaggtgagccggggctggtccggaccgcccggctccagccccagcgctgcttgcggaggtgggtccgggcgggcgggagggaggctccggcgccggccgtccgcagagggatgacctgtttgaccccgctggctggcgggcgggcgaggacttcccgccgcgcccctgacccgcggacacggcacaccgagcacaggcggccccgggtaggggagcgcgcctgggccggccatccgcaggggcatggccttgttgacccttagggtttagacccaagggaccggtagatgccagcccacgtggggcttgtccgggcaggactcggggaagcagtgggccggatcttcagagtggttggaaactcgcagacaccgaaaggacaaacaggatcgaaaaggcagacttcctcccaggccagggcagaacgagtttccatcgcctggcggagggatgctcccctccccggctcctcggggtttcagaagtctagcggtgaattctaggagtgcacttttccaaacattccttatagtagttcgttcattcgttctacaagcatttctggagcaccccctcgtgccgggcaccgcgttctgttccagggaaacgcggctgaacaggatctggctcctgcgcgccagaagctgccggttcactgggagggcagcagggtagagagatgccgtctcggggtggaagatggaaagggaagcctgcaatcctagtttgcacactggcctcggtccgcaactcccccacctgcacgcagtaggcccagcacacagtaggaagagcaagccagacctgcctgtgacgaccctctcctcctcctcctcccccttgaaagctttgattcattccctgcccccctttctggaaagtcttcctgcagcttgttttaatcactttttgagttaaaagtcaatatttaattaaccaagtaattacattcagcttacgtttcaatctgggtatttgctcatctgtgcgtgttgggacacccgccctctcgcccctccatctgtcccctgcctgtttcccaccgggtccacccccacttttggggcagagaaggggaggctgcgctggagcaggttctcagggggagacagggagcaggagagacgggctttctctggaggacacccccggatctgcgcgctctccaaatttcagcttgtagtgaatagtgaaggtgatttcttgacagcctctgcctcccattacagaaccaccagagggttctaattaaattagagccaatcgttaagtataggaacggggtagggaggacagaacgaagggggccccttccctgtaagagatgttctccccagcttcgtctctcccacatcatagagaagagaaaactcatccagacagcctgtcggatgtgtaatttagcgttctaataagcagcttgaaaggcgaaggtggtgggcttggcagatggcatgttggacctttgtacatgaaggcctcttccttccccagctaaatttatatacataaaggccgtgatgttggcatcactgctgcagctgagggtcaatgtgggtttggggtttgggctttgtgtgtacttcttgggttttttatttgaatttatggctttttctgaaaccctaataacatgttaaattttcaaacttgagagtagagtgatgagttgactgtaaaagtctggtcttggaggaggacagcatagcagtgtgtgtgcatgcacgtgcatgtcccccagttcagctgctgtccaaagaacccagttgatatgcagtttcacacctgatttggacctgatttgggagataacatttccttctcactttttctggcactggttagtttatctgcttggacctgcctcaagagggcagctgggttaaccaggcagaatatcacccaactctgtcaagctttggccattatctgaccttagactttagtcctgcagaaggagtccagaagccctgtcctacagaaaaatatcagcatttctgaccagcttgtagttaaaagaaaaggtttagtccagacttaagataattggtaacacttaagtagttttgtatgggcctgatctgaggcattgatctaagcccttataccttactcattaaatccacacaaataccctgttaagtaagtactgccattgttgccatattaaagatgaggaaacaggcacagagaggattgtgacttgcctacagctggtcacaggtagagctgggattcaagaggccctcaagctccggggtccacttggaaccactggactctcctccatgaccttggcctttgtcccagatgtagaagaaacacatatgcaggggaagaaaacaccttcagacagtcaaactttgcaaagtaaaaggcccttaactttccataaacccccactgttccgacagagagtccgggtttgtatttgaggttttttgccccaaggaaaacatgtgtctgcctggtgctttttcttctgcttatgagcagacacactgtcccctcccccagtcaaaatgcaaagggaaacatcaaatgcagctgatggaaaagccaggtgaaccatggtgaagatttcagcccactcagagcacagtggccagagagcaaaagctctcctagaggtgagaccttcctgtggttggtgatggagtctcgatggcctggccctgggggtggtgccagggtgctctgtgtcaggcctgggcggatgtggaagatgggggcctctctcaatgctgatctgcaggtgagggggccctccctgaaacctgctttctctgggcctccttggaatgggccttggtggagatctacagacagccctggcccagccggattgaaggcactgtctaattgggagggcattaagatcgttataattaattggcatcccgataaatggcatggttgcctaattggggtggttgctagggaacgaggcctcacttggagcctaaaggggaagaagcgctgggctggccacagttgggtgtcagggtacagatccagcagtgaatggaccggaagggagagcagtccatccgtatctgctggtgtttactgagcagctgctgtgtgcaagttgcaaatggagtatcagttaggggtacttgcctagaagaactgtaaagtaatcaggttcctttctcttgcaagcaacggaaaaagagaagaaaaaaactcaagccagcttaaggagaaaagaagtggacttactggttttcataaccaaaagtcttaaggtgactaactctagcttcagacacagctggacccacagctcagattttgtaatgagaatccattcctatccaccgctcctctgccttccatgaggctgatgtctctccagctctggggcgggcagtccctggcagctgtgggcaccgtggctaggagagccagactgcctggctccctgcccagcagtgggatctggggcatgctacttaacctttctgtgccttgatgttcacatccaacaaatgatgatgatcatagcacctgtctcctgcttgtggtaagcatgaaatgagatgatcaatgtcaagtgcttagcagggcgtctgacccaggtgagccttcagtaggcattgactgttaccataacttaggtgtcaggacagatgtcatggagcagaggggtctcatcccctctggtttaagcccaaaaggaaagaacaagcctctgatctggcaatgcacacctgagccccatggttccctctgattggactgttttttgtccaaaccagtcactggctaaggaaatgagttgccaacaattggcttaagccaggctcacaggcctctccctggagctggatggaggctgactgctgagaccccaaagcctggaataaaacagcacggggagtccccagtgaaagggaagcccggttgctggagaggcagatggccagtgcctgcgatgatgggccactaatgtgagcaatgctggccagatggacccatcttcattttggccaaggtggagactggggaaacacgctgcctgggcaatgcctctcccttccaccagggccaggaggcatcaaaggcctgacttttctgccttactgtctgaaggatggggcctggccttgatcctgtgctttcggggggccaggggcagtgtttgtctaacctcccaccatgagaatcatctggctgtatttgtttaaaaaggcaaagaccagatcctgttgaatcaaacttctagggagggtcctggatgctggggggcatgaccaatatgtcatgtgtatattctatatcagcaggagggtttggcgaagagagctctggagcgtgggcctctttgtcttcctgcctaatgcaggggctgtcagaaggcggggaaaatgctctaggcctggcgtgctggctcatgcctataatcccagcactttgagaggccgaggtgggaggatcccttgaggtcaggagtttgagaccagcctggccaacatggcaaaaccctctctctactaaaaatacaaaaattagccaggtgtgatggtgcttgcctgtaattccagctacacaggaggctgaggcaccagaatcgcttgaacccaggagtcggaggttgcagtgagctgagatcgcactactgcactccagcctgggcaacaaagtgagactcagtctcaaaaaaaaatttaaaagaaaaatgactgcatgatgtgatggggtgggaggcaactttaggcaggctgtcagggaggcctctgtgaggatgtgacctttgaactgtgacctagattttaggaaggagtccgccttggaaagatctgggggaagagcatgccaggtagaaggaacagctagtgcaaaggcccagaggcggtgggaggggcctgtccaagacacctgccccaaacacaaatagaagtcaagtggggtaggccaggcgtggtggctcacgcctgaaatctcagcactttgggaggctgaggcagttagatcactggaggtcaggagttcaagaccagcctgaccaacacggtgaaacctcatctctgctaaaaatacaaacattagccaggtgtggtggcacgtgcctgtagtcccagctatttgggaggctgagacaggagaatcacttgaacccgggaggcaggggttgctgtgagccgggatcacacttctgcattccagcctgggcaacagagtcagactctgtctcaaaaaaaaaaaaaaaaaaagtcaactagggtagagggtcaggagtaagtgggggagggcacgtcagagatgagaaatacaggccatgctaagaaattttagactttattttaaataaaatggataactgtctggacgcggtggcttatgcctgtaatcgcaacactttgggaggccaaggcgggtggatcacctgaggtcaggagttcaagactagcctggccaacatggtgaaaccccatctctactaaaaatacaaaaattagccaggcacggtggcgcacacctgtaatcccagttactcgggaggctgcagcaggagaatcgtttgaacccaggaggtggaggttgcagtgagctgagattgtgccattgcactctagcctgagtgacagagcaagactccatctcaaaaataaattaaaaaataaaatggagaaccattggagggttttaagtcagagaatgatatgatttgtgtttcaagaagatcctgctggctcctgtgagaggcgtgctgtgcagatggaagtggtatcaccgggactgttaggcaacagagagggcccgagagtggcttggaccgtggtggtatcaatggagatggagtgaaatggggattggagatgtattttggaggtagggcccacaggacttcctagtggattggattacagagtgagggaaagggctttgattctcaaccgagggtgattttgacacccagaaaacattttaacactatccggagacagtataggttgtcccaactggggaagggttgctactggcatctagagggtagaggccagggatgctgcttaacctgcaatgtacgggatgaccccacagtgaaaaatgattcagcccaaatattcatgatgtatcctgccaaggagtcaaaggtgactaggcagcctggtgcgtggtgattgctaaatagggaagataggagagaaggttttggggaggaggagtgatctggaattccgacgtggaaatgttgggtttgagatgaaccccacctggatgtctgaaagctcagtgggtggtgaacgtggatgtctgcagccggtcggggctggcaacctaagtttgggagttatcggcatattgatgttattttaagctgtgggactggacacaattatccagagagaatgtgttttgttttctagtgtggttttctccccccagcctccccctagtgcctgtcatgaatctatttgatgaatatttttagcatatcccacatgctcacctctctgacatttccaagaagttcctgaaggctcgggctgagcctccccttcttcatcgcctggtttctcagtgattaacagacagagctaaatattcattgctctgccacagatgcccttgggaaattgcttaaggtcatgtgggatctcgggccttgtaggcagcacgatgccttctgggtggaacagctgttggcatggccttcagagcttctcctccagcccaggccagggcttcttggaattctctgtaaccagaatgttttgaattccccacgttctcttaatgtgattccaaagcacacgttgcccagtggccctggcctctgccatggagcgtcatcttacagaaggcctggcccactgctctgcacacctgggcccagcttgaatcttagataaattctatcccaaactcagagttgttatggccaggtcttgtgtgtgtaagttggtggacagggccatccccagggaccacaaatagtaccaaagatgtgtttggccatgtggaagccagatgtgttaggggaagaatgtggccaatagcttttcttattggctcatggtcaggaccccagcgggtgacttgacccaccccagtagccagagaagaggagcttttttgtttttgagacagggtcttgcactgtcatccaggctggagtgcagtggcacagtctcagttcactaccacctcaacctcccaagctcaagtgattctcccacctcagcctcccaagtaggtgggactataggcacaggccaccatacccagctaattttttttttttttttttggtagagatgagatcttgctatgttgcccaagctggtctcaaactcctgggctcaagtgaccctccaaaagtgctgggattacaggcgtgagccaccctgcctggcctggaactttttgaaaagagattgaaaaaactgttagctcacagaagccttggagatgttcctgcttggtgaaaatcagaccatctgaaagccacatttctggtctgctctcgagacagatactatccatagacttctgattgcaggccacttatctggatatttcagagaccaggaaagcctactataattcttagtagcttagagtcctgatcattttaatgtgaattgaaatggtttcattatgaggaatcacatttctgactgacagtggcttatgcaatagaaacatttaattctcacataacaccaagtccaaagcaggggagtccaggcgctggtttttcagtacaacagtgtcatccaaggtcccaggatctttcaagcctcttcttctgtcctcatcatgtctttggccttgttgcctcatagtctcaatatggctgccacagctccagacgtcgcatcaccctacaaagtgggactataggacaggactccttgctgtctctcttttaatcagagagtaaaatccttgccagaacactcccaccctagcagactttgctttctgtttcattggtccggagttgggttttgcactcacctctaaatcaaacactgggaaaggacctggctccttcctatgcttcggatctcagctgaaatgtcacctccctagaatgctggaaggacaacctgttttatgttttataacacttatcactctctggaattagcctggtttgcttatttgtcctttgtcttctctctcctcactaaaaagcaagctctgtgcttgtagggacattgtctgtcttgttcatcgctgtatccccagcactgagaaccagggtggcactctttggatactcagtaaatttttttttgaatgaaggaagcaagaaaagaaagaggcttggagagctacaggcacatctggctagcatgtttgctcgaaggtgactgctcagggcaaggatgtcaaaacctgttagtcatttgcaaaaagctaagcaggtggctgggaggattggtttcatacacactcacttgctccccagtgccagagctggggttttgtgctagcattgcttgcagaggaaggatcgtcccctttatgccacggcagggacctcacggccttgcagaagggctggtggaaccctccacttctgatgactctggggccaagctagtcttccaggtcagtggtgtgacattctaatgagggctcttgggttaaatatttctgcatgtgcccttgaaaagacaactcccttccctaaattgtcccttcctgaaagaacagcggtcacagcccaggagagcagcctctttaacctccactccccaacctaccctcctgaaagctcacatttaccgagcactttgtacaggctagtggtggtttaagtgcgcgctcctgtgaatgtggaataactcagcgatgtggggatcttccaaccccgttttacaaaggaggaaagagacacaacgaagtctctccttgctctgccatgctggtagaataggacatcacaggccacctaaccaggggctctgttcagctcgcagaaatgttttgtttgaaccttctaaaaagctgtcagatttgtaacaactacgagatttcacattttaaaaatctggattttcagcttctcctgaaaaatggggagatgtggtccccaccatcccctatagcctgacattgtgaaccaattcatttggcttttcattgcactttcccttctgtttttctcattgtggagcaatatttctctgttccatctctaccaaaagtggccagatgagagctggagaggaagtggggtgtggagttttcttatgcgtccacttcacccgtttacattatctgcctggcccacgtaggcatttgagtttgtctcccgttgtgacactttgtacccaatggctacacttccagggacattgcaagtgtccctggacacttacattgtgcattgcaagtgtgtagtaataataatgtctaatatctattgattactttttgcccagcatttcatcatcacagcaagcctttgaagcagggactaatatcatcttcactttatcagtaaggaaactgaggcactgtgtgtgatgccctcactagaacaggaggtcctgaagcttgttcatctttgtaccatctgtgctaggcttactggctgtttgaatgaatgactaaaggaatgaatgaatgatgttctcctccaagtgttcattagccgaagaggctgaaagtcttaacctcatagtcatttgtgacatttctgttgggggaatgggctctgatcagtgtcactgaggattcttgggttgtgtttctgctgtataacaaaccactccaaactcagtggtttaaggtaacaacattttattttggacgattctgtggtttgaccaggtggttcttcagcttcatgtgatatcagctggcaggtctaaaacaaccccattcaaatggctggcagctcttgctggtcaccagatgggagctcagttattctccatgtgggctctgccctatggctacttgggcttcctcgcagtatggcaggttcagggtagcctgacttctaagagtgcaaaaatgaaagctgccacggtctcttaaggcttaaccgcaaaaccggcacagcatcacttctgccaccttctcttggtcaaaacaggtcccaaagccagcccggtttcatgaggtggggcccacacaagggtttgaataccaggcagtgtggctttttggagtccaccaaagtacccattcatcacagactgcaagtagcagagcccaacacttactacctcaagctggaacaggatttactggggggctcaggaaaggacaggtcaggaactgaggaaattctggggaccttggcgcaggagttactagcagcctcctgaaggagagtttccatcccaatgcgacaaatgcacccctgctttttctttctgcccttgacactttatttgacagttggggacatggtaagaaagtctgattgaccttggtcacatgatcaccccttggcagagaggatgggggcatcttggcagaggggagggagtcctcaaaaggaagctggggtgctgtcaaaagaaggggaccagatggacaaaaattgttagaaatctctgcaccgcccctgcataggtgactccacccctggcagagcaatgaacattttaaaacgagtgaatggactttgaaagtccagtataagtagaatgcccaaacctgtgtggcagcttctccagctccagggccccatagctcaggtgctgctgggggtctggaagcttctctccactttacggggcaaagtcaactcctagaacccctgccatgcctcaatatccccctccagaagataggggcagtttgcttctggctcctgaaaggagagcatgcgcggtaatgagggacctgggctcaatgcctgcactccctcctcccagaccccgcctcaccagtgacactgccttccaccccaacacctggtgacacccagtgagtccccgcagcaggggaggctgctagtaggaaaaactgatccagactaatctcagctcgcagagcctctgacccgggctttcctcccacttgccggtctatttccggctgctaattagattgcacagcaagccacattgggaagccgacctgtcgttccaaaggcactccactcgcatctccaaatgtagcaggtgatttggtaaaagttgattctgactccttcccccagcttctaaaataattgtaagtgtcgggctgtttccaaggtgaactaatgaacagctcatctgctaatagcaggggcaagctggctgaggacggcacgctcgcctgtggattgggtgaaaaggaaagaagtaattggattattaataccaagccgtcaaaataccttttattccttttatattcttctggaaggaaacgacaatctctggaaacataaatacatgttctgtgggggtaagcagggctaagaaaatgtggggctgaaaaggaggagggggttaaaaaggtggaattgtcagtccccactgtggcagtctacactgagaaccagcccacagttaggcgtgaataatgactctgttcaagtcggactttattgcttttggccaaaggccttttgcagaaataactttgtaactccctgccagggaagcttttgtccacagctgagacaaaggaacaaagaacagaggtgggaatttctgtatctgatttctacttcctctaaacagccagaaaggacagcgggtgtggcctgcccagaaggcatgggctggggcaaaggggtgtccagcctcctgtgggccacactgccgtgctcggctgcaccatgttggtttcattgtgcacattcccaccccagggcctttgcacttacttcctccgttcatagaaagcattttgcccacaactggcttctcgcccgcctctgctctcagctcagatgccatttccttatgccacctcctcatgccagagaggcctttcccaatttactgtccatcctatcacctgacagcttcctccaaagctcttaagacaatcttcattcattcattttctcctccaccaaggtatcacagctccatgaggacagaggcctggcctgccttgtggccactgctgtttcttagcatgtggcacatagtaggtgctcaggaaagattggatagcttggaagagtcgcacatagctcccaggccaagctccagcggggctttatggagcccgctcagtgcttaaaataggttgaaagtttttactttggaaatggtgtttccggtgtagtccaggcgccaccccatctctatcctaaatctaggccactttactcactcaggtctcctgcccgacccttggatgcatttgcatatttgtccctgctttagacaaaggccactgcaaacatatctctctccaaaggtcaccagacaacatccagacttcttgcattgccaagtcttgtgccagaccggtggcctccaccaaccaggtcccattgactggatcaaggtgtagtcttcatcttagccgtccacgcacagggcgtaagtggcgttgatctcatcataagcaggtcatggcaggaggagggtcgggcaggagacctgagtgagtgaagtggcctagattcaggataagagacggggtagggcctggactacattggaaatgccatttccaacgtaaaaacctttaacttttcctttttccccttttccttttctgctctcctccaagcctctgggtcatcaaggagggaatcgcgtgaactcctcctttatggtcttcaaggagacctactcccaatgtaaggggaagcgcagaggccttggcaagcaagaatgtaaccacaatgtcattgcctttatactgttgccatctaagtatggcaggggttctcacctaggggcagttttgccccctagggggacatttggcagtgtctggagatatttttgattgtcacaactggggtaggtgctacttgcatctcatggacagaggcctgtgaacaccctgtgatacacagcacagtcccccatcgaagaatgatcctgcccacgcggcagtaatgccaaggttgagagacccaggtttatggcaatgggtgctggttcctccaagatagacttttctttctaaataaatttattgaaataagaaagggaatgaatgaatgaatttaggcccagatttgggtattctacttataccagacttttaaaaattcatttatttattctgagacgctggcatatgggatggagcacagaggttaacgatcagccctgtcatccctttcggagcagatcaggctgtaccatttgcctcaaatcaggagcccctgccctggaagctgccatcttgccagaaacttcctggggagctgcctgtaaaaaactctagcagcagttgattctggcccaggtggaaaagctgtgttatcccaggcggagttccggcaggttgggagatgtttccaggtctcctgcccagccaggcatgatgagcatccttccaagcttggccccggagccctggcccagcacccccatttgaagcctgcagagcctcatcatcactgcccccgcccccgccccatcctgccactgacaagccaatacctgcctgatgagaggggctcccagggacagcagccttccctcctggactccagggcaacctccatgttgttgggcggctttgagcacagggctcaagggcagaggctgagttggaaaatttcttgcctctgcagaagggaagagctgggggaggttggggcctttttccccaaacgaggtcttattcttctgtggggttttctgggtttgttaggtggcttcctttctacttaaaaataagctgggagtggttaaaaaatgggaagaaatcaatgtttctggcgtacatagaactgagcagatgtgttatctagaataaggaggagaggttgttgtgactctagctcctggtacgagcccttcagttcaccctcctgccctgctcagaaccccctggacctgacatcgtggctttaacacccttgggtcatgtgagaaggaagagtgcccacccaggactttccgaggctcacagattctttgaaatggacgtgagcacaaacgcccagccccgacagccagggatcagatcgggtttcacttcctaggagggaggatgtactgcaggggaggcccacgtggctgccccaggcctggccagcctctgtgacccagcaggactgactgttttacgggatggccacacggtaccctgcaggctcatccatggtgggaccttgatgctcctttgttgagatgtgggtctgtgtcccctccccttgaatctggccagacgtgcgtagccctggtggaaggaacaccatgggacagcagaaaagatgagccagctccccctggatcactgggaccctcgctgttgtgtaagaaatcagaccccactgcaaggccgccatgctgtgaggaagcccaagccacactgaggccacatggaggtgcccactccgcagcccctcccaagctcccaaccgactgccagcaacaactgccagacaagccaaggccctgctgagccttctcagcagtggcctcagacgttacaaagcagagaccagcccttcctgccatgtcctgcgcaagttcctgatcaggagcctctgagaataaaagaaagattttaattcaccactaagttttgcggtaaattgttacacagtattagtaactggagcattcagccaattccagtcttcccaccgtgcagttattcattcattcactgaacaatattcagaaaccgtccacctcttgccccttctttgctcccacctagtcatctcagtggcctccctgtgcctaccctcatgccctgcagtctgttcccctcacatagtcagaaggattctgttaaaacttacatcagggctgggcatggtggctcatgcttgtaatcccagctctttgggaggctgaggtgagaggattgtttgagtccaggagttcaacaccagcctgggcaacatagcaagacctcatctctaccaaaaatttaaaaagtaatcgggcatggttgtcctcacctgcagtcccagctgcttgggaggctgaggtgggaggattgcctgagcctgggaaatggaggttgcagtgagctatgttcgtgccgctgcactccagcctgggcgacagagcaggactctgtctcaaaaaaaaaaaaaaaaaaaaaaaaactacaccagatcacatcacccgcaagctagaaccccccagcccccttcactcagctccgtgccgccatgcgtgccccctttccggccctccctcaggcatcttcctacctcaggacagttgcgctttctgttccctgtgcctaggatgctcttcccctaaatatccacaaggcatgttccctcccctcctgcagggatccacccaactgtcatctctcaggccttcgctacccaacctatttaaagttacaccccctcactccctagcactccaacctccctccttaggacttgatctccttgggacacgttgcctcatatgttgtgtaatttattttggtgtctgatccatgaaggattgtttttcctgattcccagcactgaagaatagggccgggaacatagtaggtgctcaggaaatctcggctgcctatctggaagaattagcacctcggctctgccaggagctggggccgtggcgtcaggcaaccaagagacagcccctgcccatgcgagcttctggtggagggatgcccctctacaaaataaaaacccaggccaggtgcagcggttcacgcctgtaatcccagcacattgggaggccaaggtgggcagatcacttgaggtcaggagtttgagaccagcctggccaacatggtgaaaccctgtctctactaaaaaaaaaaaaaaaaaatacaaaaattaggcaggtgtggccgggcgcggtggctcacgcctgtagtcccagcactttgggaagccgaggcgggtggatcacaaggtcaggaaattgagaccattctggctaacacagtgaaagcccgtctctactaaaaatacaaaaaaattagcgggcgtggtggtgggcacctgtagttccagctactcaggaggcggaggcaggagaatcacttgaacccaggaggtggaggtatgcagtgagctgagatcacgctactgcactccagcctgggcgacagagtgaaactccgtctcaaaaaaaaaatgaggcaggcatggtggcgggtgcctgtaatcccagctactcaggaggctgaggcaggagaatcacttgaacctgggaggtggaggttgcagtgagccaaggtcatgccactgtactccagcctggatgtcagaggagactccatctcaaaaaaaaaaaaaaaaacacgcacacaaacacaaactcaggccagagagtaaatagaggaatcacaagttatgataagtgctctgaagagagcagtgctgggactgggggtgggggtgaccgagcagggcctgcttcagggacagagggccagggaaggcccaagtcacagccagggtggccgagtcaggtccagaatttgtgattcccacacccacgttccttccgcttttccacactaccttctcttatcagttgtcaaagaaggatgggcgagttggccctcagtaaggcggagagttgggcacaggccaaggaggcctagcgtgggctggtaggccgtgccctgaggcctctgttcacacaggcacgaggtggccaggaagccacgggagtcagccctctgcctccagcccgccccccaatttgggttcatttggttgcaagtgagagagcaactaggaatgacctaattgaaaaaagggaatttcacttctgatcttgaagagtcaaaagtatggggaaactgacctacaaagaaaacagaaactagttaaagaggaatttattgggcctgaaacaaagaacccaacccaaatcttcctctttcaggctgggctggatcccaggtgtccagtgctgttaagtcccaagtatggtgcatttcacagcactgctgtgttcggtgtgttggcttcattcccgaccccactcaagacaaagtggcgtcgctgtcttccctggtcctcacattggaaccacatggagtgagttagccagttgtaaagactggatgcctcttcctgaccagtcaggccaaagggcctggattactctggcccgtcactgaggcaaggggtggggaggctctgattggcccaggtctaggatcccacgatctagcattgtagctccagaactggagcctaatttgaactttgtggaccaagggtggggagaaaaggatcccccaatattttttttttttttttgagacagagtcttgctctgtcgcctaggctggagtgcagtggcgtgatctcagctcaattctcctgccttggcctcccgagtaactgagattacaggcacatgtcaccacacctggctaatttttgttgtttttgagacacggtcttgctctgtcacccaggctggagtgcagtagcgcaatctcggctcactgcaagctctgcctcctgggttcacgccattctcctgcctcagccttccaagtagctaggactacaggcatgtgccaccacacccagctaattttttatttttagtagagatggggtttcaccgcattaaccaggatggtctcgatctgacctcatgatccacctgccgcagcctcccaaagtgctgggataacaggcgtgagccactgtgcccagcctaatttttgtagttttagtagagatggggtttcaccatgttggctaagctgatctcaaactctggacctcaaatgatccacctgccttggcctcccaaagtgctgggattacaggtgtaagccgccacacccggcctcagactcccaagaaaattgggagctgttatagaaaggagataatcctgggtggcccaaacctagcagagaacacaagccagcatttattgggcacttgctgcatacagatctgttgaaagtctccgtgcatgttaaaccatccactctgtaggcaagtgcttgtaggtgtcctcactttccagatgaagtcactgagaagacaagaggttcagacacttgcccaacctctagtaagtgacggagctgagatccaaacccaggcaggctagctctagatcctaccctcctcctactcagcgtgttccctgtggcattttcccccaagtaagtatcaggctgtttgcttacctctgtccgctgtttgtcagctctctgagaatcgagagttttgtctgttctttttttttttttctactgatcatgaaacagtacaaagcaagtggcagatgctcaggtatttgagggtgtgaattatatggcctgtcaaacatctacccacttgacatacaaaacattttggtgctcagcttcctaagacttgaatacattgtttctaaatttcctttgtgctctaactttaatccatggccactctgttctcacagcttgccggtggtttgccattatttccagtcctcttttctgatcattctcacatgtagctggaatctttcaactccagcttttcctatgttgacttagagtatcacttccaggagggcagggagctttcttttcactgctttatccacagtgccaagaactgtgcctggcacacacgagccttcaggaatgtcttgttacatcaatagttaggcaggtaactgggttcctaagccctgcatttttgccctacaatctttatgccctaatttcctttccagatcctgagcctttgtcttgaaacctgatctttccctcctccctctgaatgacccttctattgtctcctgccctgttcttgagagccggcttggttctctgcctccatttggaattccaagaacaggcaaggagagccacaagatggcctgggctaggtaggggagacagggagaagctgtggcccataggttacaggagcttctgtcctttctttgacggccccaaagaggaggagagaaggctggagaaagcctgtagccaggaagaaagggagacacaggggagtgtaaagtttaacagatgtgcgtgtgtcatcccctgtctagacagcttctgggcttgtgaggtttgggaccacactttcccatccctccaggggcctctctctgtttcctctgcctgctctttgcccaaactgtttctcctgcctgaagcatcctgtcctccaccctcctcttcactggccatccaaatcctttggattcttcagaactttgctcctgttaggctgctcagtttatgctaagtactcctccaggaagccctccctgactgctcccaggccagcagtttcccctttcctcttgctgtttatacaacacacttaacctcagtcccttgtatcacttgttgctttccaagtcagcataagtgtcaaaagagtaggctctggggtcagaatgtctgtgtgcaaatagccatgctggcttgcttgttttgtctgtcacttggaggtggcacatccaagtgaacctcccaggggacagggaagagtggattactgttgtaatcgggcaggattctcctatcactgaacactgcctcacatatagcaggcccttaataaatatttgtaaagtaaatgaaggaagagagaaatgatcaggctccctggaccacctgaggaggccctcaggtctgttgctgggctctggccccagcccgtgggacatatctgcacacccacaatttcctttcttccctcctctcatgagtgtttcccgtctgaccaatgccgccttctgcctctggccccttcttcctctcccaccacctcaactgcctaattattaccaaacttctctctcctgtttttttttttttgttttgttttgtttttttttaaggcagtgtcgctctgtcacccaggctggagtacagtggctcgatctcggctcactgcaggctccacctctgagttcacgctattctcctgcctcagcctcccaagtagctgggactacaggcgcccgccaccacgcccagctaatttttttgtattttttttagtagagacggggtttcaccgtgttacccaggatggtctcgatctcctgacctcgtgatccgcccgccttggcctcccaaagtgctgggattacagacgtgagctgccgcgcccagccctctctcctcctcttgttggatttggaggtggagagaagatgggaagggaggaccaaagggacagtattcagcacccatgctgcacgacactgggcaggttctggaacctgtccgtgccttatcttccttgtctgtaaatggagcatcccaactcacaaggtggttgtaagggtggcgtgaggtcacacactaaaagtgcttagaattgtgcagggcccctgatgttagctatcattcattattgttcttctagggtgtttcctgtgttggtctgggtgctccctgttgcaaatgacagccctaattcggactctcttaagcagcaaagggcacttttttgagtctgtacctggctacaagatgcaacttggtccaccccattgtcaccagcatcctctctctcgggctccatccaatgggcggccaccatcagcaccatattcatgcctcctggcacccagcacagtctcctccagcctccaggactccctctcgcttattggccagacttgggtcacatgtctgccccaggaccaatcgctgaagctagagctggaattgctgattggctccacctggctcacatgcgctgccctgcagtcaaaccatatataagggggggtgggaaataagagcacttgtggcctcaaagcactaacaggggctgttaccaggagacaggagataattctttgttaagccagtaaatattttgaatgcctgctatgccgcaagcattgttttaattgttgaggatatagatctgaacaaaaatgacaaaaacctgtaccttcagggggctgatattctgctggaggacatccgcaaagaaataaaggagctagctgtgagaggtggtaagtgctactggggagggcagagatttcggttttaacctgccaaggtgaaatttgagcaaagacctgaggagggggaagaagggatggtgaagataacctgaatgaaggctccaggcagagggagcagcaagttcaagggccctggggtgggctgtgctagcatgtgcaaggaacagtacagagaccgtgtggctggaaccaggtgtgcaagggagagaggggaaggcaataaggtcggagaggtgatggagcaggttgggtgggttcttgtagcccctttggagggtttttgcgttttactctgcgtgggatggaagttattgaaggccgttcagtggaggaaggcaggcccttgcttttgttttaacaggatctgtctggctgcttgatggaagggacgaggtagaagcagggaaaccagttaggaggctgttggaatccaggcaggattctcctatcactgaacactgtgcctcataggaggtccttcatacgtatttgtaaagtgaaagaaggaagagagagaaatgatcaggttctctggaccacctggggaggccgctaggtctgttgcggggctctggccccagcccgtgggacgtatctgcacacccacagtttgctttcttcccgcctttcatggacatttaccatctgaccagtgcctccttctgcctctggccccttcttcctctcccaccacctcagctgcctgattgttcccaaacttctctctcctcctcttgttggatttggagatcctcagaggaaaacagcccatctgggtctttctaaacaggtctggatgaggtcccaggtgtttgttcaccgctgtggtttgtggcattgggaaggtgagggcatcagtcactcagacccgttcctcttggcagatcggcagagaaattgagaactaaaaatgatgtttctaaatgctcaggacgttagctgtttccagagatgtctcctgggctggcgagcctttgccaaggtcctggagaagactcaggatggagaggaggagccagagagacctggaaaggaactggtgggaaggagaggtgttgtccacagcagggatggagtggcaggcggctggtgctgcgtgagttcactgggtgctctctcggttcagccactttgaatattttaccaagaaaaaggaaaaaaaacaaggcagaatcccttgtgtcatctttaattgatttcttcagcatccggagagaaactggcatgaggccacgagaagtctgagccaggggaattcatcagaaatcgacccactgatgacttgatctgatgaaataattagctcctgttattctctggcttctggtgccggagctttgacttccatccagaggagagcgggtgatagccgcccaggagtggggggtgctctgaaaccaacatgggagccaggaacgaagtccagctgactgtgccccgggctccatctttacccagcccagggctcccaatgaagactgcccttcccagcccccctgtaccctggcatcacaggcccagggccaaaaaggccctcagagggcacctggccacctggcaaatgaggaaactgaggctgggagactcttaggaacttgttcaaagatctgcttctagggggtcctggttgagctgcccaaatcgggccagactaggtttgaaccccttctctgccacttacccatatgatcgggggaaagtgattttaactctctgtgcctcagcttcttcatccataaaatgggtgaaatattgatgggtgggtgtgcatattaattgggttgacacctgcaaacagctcagagcagagactggagtgtgctgcaagctttcagaaaggttttcctgtgattggtttctggtttcagagagttgctatttgtagggcaccccatcggaattctcccaatattagcactccacgtctgtctctctgaaggaacgtgaatgtgcatcttagaacgctggctgctgcaatcgtagtttcaagtgcaaagcatcccgtagtgtttcccgatggagggacatgggccactgataatgtattagtctgttttcacgctgctgataaagacatacccgagactgggtaatttaaaagaaaaagatttaatggactcattgttccatgtggctggggaggccttacaatcatggtggaaggtgaaaggcacgtcttatgtgatggcagacaaaagaagatgagaaccaagcaaaaggggaaaccctttataaaaccgtcagatctcatgagacttattcactaccatgagaacagtatgggggaaccacccccatgattcaattatctcccaccaggtccctcccacaacacgtgggaattatgggcgctacaagtcaagatgagatttgggtgaggacacagccaaaccatatcagatacacaacatagtttgaggattactctgatttggggtggttcagggactgattcgatggctagagtttgtctccttttcagctgtctggcagcctccagttacctccagcagaaagtctcagatggtgctaatgtgctttgactcctttcaacacctgctaatctcacttcaaaagagagtgcgagcgcgagggcacgcgaagcctgggaagctatttgcatcaagttccactgattcagctttctttgacttttatttgtacaattagctctacagggaagcgatgtccactttccatttatctttgggtaggaagttttcttttcccaaaacatgtgtttgtgtttttattttaaaatgaggccatttaaagaagcacgttaagcaaataatcactgaagggctctgcagattcagcagaaatcagggccgtggtccttgaacggaaagagttgggaaatccgagtttcgtgatgagaagcccacattgaacggtgagggagggcagaattcacatcccatccctgccatcttctgtctgggtggccttaggacagtaatgaaacctcagttttctctggggctaataatagtacttgcaggagggagccttggtggaggttgaaggagatttcagagtgcctgacgcaggacagctgcagcggtaggatcactctaataatggtttacattgtggaatatgtatcccagttagtactatggccaggctctagtcccagcacactgtatcaacacatttaatcctgcacacccatttcacagatgaggaaactgaggcacaaaggtgttaagttactagctcagggtctttcagcaagtaactccaaagtccacatccttaaccatcacaccacgtggcataaagcaggtgcccagcaggcagttgccgcagtggctctggctgtcatgaggtgtatgtttctgcagacgagagattgagaaggaaggtgttgttcaccctctggtcccatgaaactcacagttctcatgtcagacgactgcatcgagtgtgtccccagctcccctgaaattgtgactctcagagccacctgggaaggaggcattgagcggagcctgcttcctgctcccaggggaggtgctagaagggagacttgctgtcctggccagcctgacataggatacaggtccctgaatgaagtaaattagggtgcgcatcagggcagctgggagagttgattgaaagcactgttttcagaggcaggtgggcaaagggagcaaagaaatgatgctgcaccgaggaaccggtagcaacaggagcccttactttcccgagacttgatggggcaagaggagggagaggtgaactcagaactggggagacgctagagccaggaggggccccaggcaggagctgcatccacacacacagacacgaaggctactgcctggggagctactgcgtgcgggaggagaataaatgcacggacttcccaccacctcccatgctgcagcctcccagccggaagccagagagcagggacgtgccgaccgtgccatctgtagagctcagcctcccagggtgccaagcagagctgggggagaaatggagcaggagtgacccttcctggggtttttcaaccatagcgctgcccagagaacacagtggccagctcctcgttggtgtccatggagggtggctggggcaaggcatcagtgatggacgcctctgagccatgtagacccaagctatggcacggccctgccaagtccagcttccctcactctgcagaactcaaaggaccttagcagaacctccgttcctttatttatctatttctttgtgccaaggcctggagacagccatgaataacataagcctgtctctgtcctcagggagctgaccccctagtggggaagaattggacaataaataagaaattgcaggctgcagtagtgattacaagagaaataaaaccggttataaaatgcagagtgcctgggttgggggcccccgctttaaatagggtggccagggcaggcctctctgaggtgatgacgtttgttcttttgacagaaagagccaggagtacaaagcaggagtttgttgttgttgttgttgtttttgagacggagtctcactctgtcacccaggctggagtgcaatgacatgatctcggctcactgcaacctccatttcccaggttcaagcgattctcctgcctcagcctcccgagtagctgggattacaggcatgtgccaccatgcccagctaatttgcgtatttttagtagagatggggtttcaccatgttgatcaggctggtctcgaactcctgacctcaggtgatccacctgcctcagcctgccaaagtgctggaattacagatgtgagccactgcgcacagctgcgggagttatttttaaaagagcaggtgcaaagaccctggggcaaagagaagcttgacttgtccattcgacagaaagaagccagtagggctggaaaggagaggtcgaggagaagtgggcaggggccagatctcacgggccagggcagccctggcaagaagtttgcatcttatcctgtgagccatgagcagccagggaaggtgcggcaggtgagcacaggactggcactaaggtgaggcgagtgcctggcacttgtgcagcctgggagcgagcacccccttcagtctgtacctgcacgaggcactgtgccctcccctgcccagtgctgtgatctgatctgtattttaggaagattcctccggctgccctgggaaaatggaggatgggggcagggaagagggaggcgggagacccctcaggccaccttgcagtccccaggagagatgaagcaggcagcacatccccctgctgaacccggagaccttgctgagcctctgagtcatgactttgagctgatggctggggttccccatgaagggcaaggacaaacagaccctttcaaggtcacagcaacacagccacccccacagcacttggcttcctcccggcacatctgcaggctgtggctctctcgctcatgctctcttgttttaaataaatgataccaaaagtctatatctggacaggacttgaaggctcatttcctcaagaagtgaaaaaatgaccacggagagcaaagagcagggcgagattagagacctgcttgagccagagtcgcgtccccacctccccgcacccaccttcgctggtgacctagtctgacctggggccaggggggtgactgagggcacagtggcctgtggcaggtcttccccctccaccttttagcgctcaattttctctattgtcatttcatttattctgcaacttaaaactaataggctgggcacagtggctcacacctataaccccagcactttgggaggccagggcaggtggatcacctgagttcaggagttcaagaccagcctggccaacatggtgaaaccccatctctaccaaaaatacaaaaaattagccgggcgtggtggcaggcgcctgtaatcccagcttctctagaggctgaggcaggagaatcgcttgaacaccaggaggcagaggtcgcagtgagcccagatggcgtcattgcactccagcctgagcaacaagagcaaaactctgtctgggaaaaaaaaaaaaaaaaaaaaaggaatacttttttgcccaactacaagatcccttaacaaggggctttcacacgcatccccagcagactgaaatcttacaacagccctgtctactcattttgttcatggggaaaccgaggttccaaacgggcttgctcacgggaaaactgagccagtgagtggaagatctgccactcacacatgccagttgtccagcccaaaacatccagctccaggctctcgtttaaacccctgattgaatcccccgctgctggggagctggaacttcatctccctcacctctgtaccccacggtgcgggcagatgcaagaggacggcaaatattcaccccttgagaccagcccgctgctgttcctctccctggggacgatttgtctgtggagttgggtggattattcagagacggctgttatctgactcgggtcttgggctgccaccgacacatcagaggctcactggatccagggaagaaattgtttctgcagaagtggccacagaaggcttttctgccagtctgttgaccaagcaaactgtaaagactttgctaacttcagcggagttcggttttcactctgccatagccacccctgttcaaagaaactcccattgttcatgccagccgccatacaaatcattatgcaagaatgagcagccggcagccttgacataaatattgacctgattcttcctcctcctctagatctgcgagtgaagagggacgagggaaaagaaacaaagccacagacgcaacttgagactcccgcatcccaaaagaagcaccagatcagcaaaaaaagaagatgggccccccgagcctcgtgctgtgcttgctgtccgcaactgtgttctccctgctgggtggaagctcggccttcctgtcgcaccaccgcctgaaaggcaggtttcagagggaccgcaggaacatccgccccaacatcatcctggtgctgacggacgaccaggatgtggagctgggtaagcctcggggccccagggtggcacctcggcccctcggagcagggtccctgggttaggctgaggctcctgaggcaaggcggtggtgttgatgcgtcgtgctcacttttgagtacattgaaaccaagacacgggccacccacacgtgtttggggtcacaactgggtcctcaaggttaggggtctctacccttctccagttgcacaaccgttcctggatttctccaaagagttaaagagaacaggctgggcgctatggctcatgcttgtaatcccagcacgttgggaggccgaggcaggtggatcacctgaagtcaggggttcgagaccagcctggccaacgtggtgaaaccccgtctttactaaaactacagaaatgagccaggcatgatggcgcacacctgtaaccccagctactgaggagactggggcacaagaatcacttgaatccaggagaaggaggttgcagtgagtggaggtcatgccactacactccagcctgggtgacagagtgagactctgtctcaaaaaaaaaaaaaaaagatgagacatgagcctggagccaaattttggaggctcttgtgggttgtggcaaagactgtcaatcattgatcccgtgaagggtgatccctcagcctctgtccactcttaaaggataacagcgtgttgttggtggcaacaaatgtgaaggttgactaggttagccttgacaacctgaatttgtcttttagctaccaggaaaaggcaatttacataaaaccaagttgttccttgcaatgctttgtattaatgatcacaagtatagtttttttcctccgggagcttctcagtgcagaaagaatttgtagccaggaagcaatcagagcccagagcttttattgacaatttgacacataggatacctatctcctggcagcatttagaatgaggcgcatttgataactatggggagtctgcagactgtggccagagaggtgtgtttcgtttcttgaagaattttgcagaggggtcttgcaggcagcacctggacctcagagcttcttggtctcacattgtgtagccccgacgctgtttcggctatagtcatgcttagaatttccgatgccctgcacgtttgttcattcatccagcagatgtttattacgcatttgttgcattcagtgcactgtgtcaggagccagagaactaagggaggctcattccaggtgaggagaacaggaaattcaaagatactgagatagaaatgggctcggtggtttggagcaaaaaaaaaaagtgccagggagccggagtggagggagctggggccgtgatggagagagatgaagctgaggagctgacttggcccgggttgcaccaggccttgtggccatggtgggggctttgagtttgattcttagtaaaatagacatggatgagggggccttaagaagaggaaggccgtgacctcacttaggttctaacaggatcccccagctcttttgatgaaattaaatcgcaggggtaagggcagaaacaggacactcattcagaggccgatggggtgatagggcagtgatgatggaagctcagacccgggtgctgagatgcggtcccacctgatgtatatttgggaaataaactgatcaatgggttaggtatgtgggttatggaaaagatacgtttcaagggcagccgctagatttggggcccgaatcaacaggtgagtggctgaatacccactcttaggaacaacacatttttgcaacatgatccagctaagtctcatgtctgaatctgactgaattttgcatctgtgacttgtgaataaaaccaacagtgtatgcagataaaaagaaagcaaaggcatatgcagatataaggaaaccaacagcgtatgcagatacaaggaaaccaatagcaggtatgaagtagacacaggagagaggggaacaaagaaagccgtggctgacttaaaatacagagatttcttctctccatttgacagatggaaaaactgaggcagagagaagtcacttgtccaagtttgcacagctagaatgtgattaaacatgatttgagctgggtgcagtggctcacgcctgtaatcccagcattttgggagcctgaggatcacttgaggccaggagttcgagaccagcctgggcaacatagtgagaccccccccgtcttaacaaaaaatgtaaaaatcagccaaggatggtggcacacacctgtagtagcagctaatgggaggctgaggtggaggatcacttgagcccaagaggtcaaggctgcagtgagcctaggtcacaccactgttctctagcctgggcaatagaacaaaaccccatcttagaaaaaaagagaaaaacaagatttgaacccagaacgcgtgatcttagccactgctctatttagccagattcctgggatggatattgagttgttttcagattggtagcgtgtgcgtttgttagtttttcactgttacggatattgttgctggaaatttaaacaggcatcgttgcacagacaagggagtgcttctgaaggataaattctaggaggtggatgcggtgggtttagagcccctggtgttcagtggcctgtgtcagctcttgcccaatagcactacacagcatagattagggcctacaagtcttgccctctataaacaagccagacctcttccaccagcagcactgggttttgaaggaggcaagggatgggaaggtggttgtgggaggggcatgataggctttttataaaccactagacagacccagatcaataatgcatgtcccaaaaaagcccaatacattatctcacagtctctgctacaactggcatgcagcgggtggtcctaaaaaatttatcatttgctattttctgcccatccgtgcagcagttctgacagccctctgggctggagacttcttgactgagataatcccaggattctttccagtcccaggacagagaacagacgtccatcctcattagggtccggttgggaggactggtgccagatacacaagacgaggggcttgttctgtttcctaattgcaaggttggggggttcggggctgtaccacgtatattcaattttcctttccctgcacgcatttgactccctaagctgtcatttggaattatcaaatgcccaggggaactgcttccagggccatactagttcgtaagtggcctaaattatcattacatgtttaaagtagttggggacatccctgtgtctcaatggccctctgagaccaacggacttttgctggacttccgctccaaaagaataagagggaagcacatggaggtaaaggtctcgtttgcagacgtcctttgttcagggaggcagtagaatctttgggctctgccagggtttactgatttaatttgatctaaacctctggggagcctctggggctccagcaggctctgagacagcaagaggattaagacatggttctggcctggagcaagagaatttttgcagcatcccagttctgatctatgacttgagaatttctttaactggacttatttttgaagcttaaatattattttaaaaggaacctccaaattctgactgtaaaggaaaaaaccaatacccattgccttcggcaaaggatcactgtaaaaccaaacacagtgaaaaccaagtcgtgtttttaaatttcagcaagatgctgcctcccagaaagccagtgtgtctctactgtaatgagggtgacgggcagtttcagaagcggcattaaaggtgaagtagcacctgccaagactttcttcttggcctcatcagcaggatagagactagaaaagagaagaactttctcaagcttttgatgtgggggtcccacttacatggggaccacttggtggtggctcttgtatcagagggttaaggacacagccagactccaaaccccagaatatcagagcggattccccagtgctcattttcctgagtgttcacaccaggcagagatgggtgccttttcgaggcccctcagattgtcggatttgaagtgtgccccacgagactgcatccagtgtttgcatttcttttcttttctttctttttttttttttttttttttgagagagtctcactctgtcacccaggctggagtacagtggcgcaatctcggctcactgcaacctctgcctcctgggttcacgtgattctcctgcctcagcctcccaagtagctggaattacaggtgcccgctaccacacccagctaatttttgtatttttagtagattcagggtttcgccatgttggccaggttggcctcgaactcctgacctcaagcagtccgccgcctcggcctcccaaaatgctgggatcgcaggcgtgagccaccacacctggcctgatgtttgcatttcaaaagaattctttgcctctcagaacatctttatttttatttgtttatattttttgagacggggtctcgctctgtcacccaggatggaatgcagtggtgtgatcactactcactgcagcctcgacctcctgagcttaagcaatcctcttaccccagcccccgaagtagctgggactacaggtgcgcaccatcacactcagctaattttgggagtttttggggttttttttttttttttttagagatgggcttttgccatgttgctcaggctggttgcaaactcctgagctcaaacaatccgccccccattggcctcccaaagtgctggaattgcaggtgcgagccgctgcacccagcctatcagaacatctttaaatgaaaatactccgagtaaagttgcaagggtaagagctgtctcattagccaccaggttcaaatcctcactctaccattgaccatgtgtccttgggaaagatttgccctctctgtgcctcagtttactcatctataaagtggagatgatgatctgtttccctggcattcttgtgaggaatacctggcacctgtcatatgtgtgacagtttgctctcacttgggttgttaaagccatcctctgttagagcaccctgggccaatgccacagtgttgtttgtctacagcaagctttgcatatcaaaacgacattaaaatctaaatgtctcatggcactgaacagcaacattagagtctcctcccagctgacacagtggggtgagtgctgtccacgctcatgcaggtgagctggcacccactctgccaggtatgtgagcctggcatggttacataccccataatttgagtgacacttgtcaatcaagtttggcatgggttcttctgccattactgcctctgctgatgaacagagttgcaccatcatggctgttgaaaagcaactgagtggtggttttggggcctgcaaaagtgccatgggaaccagccttccactgggtgttaaaaacgcgtgtgtcacaaccactctctgtcagcctggattctctcagttacgagtgatgtaaacccaactcgagcaggattgaggaatcaaaaaggggactttattggactcatatgaataagtccaagtatacattgagcttcaggtgcggctggatctaggagctttgtctctgggtggcctctgtccctccatctccctgacctcagctttcctccaagttggctttactctcaggccagctctccaggcagcattcctggcatcactagacccacatgaacaccatacaggtgcaagccatccctgtggaaagagagcttctctcacctagaagagagtacccaaattgagtctttttggtctgacactgtctgggacttctggtcaaccagattcaggggaatggaacacagtggttggccagatggagtcaggtgcacattcctggagccaggactggagccaaccccacttgaaccatgaggactgggattgggatagagcagattccccaaaggaaaattcagaagctagtgccagaagaaggcaggtagctggtgtgcagtccagttagagagatgctcgtgacaccctcacatggcgctctctgaagcagctgctcaaactgtggaccagacttattcattcggcaggtgtttcctgagcacctactgtatgccaaaggagatccaacagcaaacaaactaaacagagcttacattctaatgcaagagttaacaagacacatcgaatctatagtacataaaagagcagaaagtgaggaggagaataaagccaggaggggaagccaggaggggcgatcaaccaggagaaaggtggagaaaagaatcgctgggattttctatagggtggtctcattgggaaggggaaatctgagcaaagaaggtaaggaaaccagtcaagggggatccctggggaagagcactccaggcagagggaacggtgtgtgctaaggccctgaggcagatgcggtctcagcaggctcagagccgcaaagaggccagagcagcgtgcacaagagcagcaggaagaatgaacggtaatagggaggtggtggttggatggaccgtgcaaggcatgagcctttgaatgggaggaagattttggctttctgagtgagatggacaccaatagaggacattgagcagaggaggacattgagcatctgatttgtgtcttcataggacccctctagaagaatagactgaataggtgtaatgagagcagggtgtccagtaaggagtctactgcaacagtccacgcatgagatgagcccaatgaggagtctattgcaatggtccaggcatgagatgatagcggttcagaccagagtgaggaaagtagtaagtgctggtcatatttcaaaggtagagctgatacaagtgctgatggaactgatgagggatggtaaagaagagttgagaatgactccaaggttgtggcctgaaaaactatgagaatggattttctgtgtacagagatggggaaaaccatggttagaagctgtgggccgggtgcggtggctcacacctgtgatcccagcgctttgggaggccaaggcacgcggatcaagaggtcaggagatcgagaccatcctggccaacatagtgaaaccccatctctactaaaaatacaaaaattagcggggcatggtggcacacgcctatagtcccagctactcgggaggctgaggcaggagatttggttgaacccaggaggcggaggttgcagtgagctgagatcgcgccactgcactccagcctggcgacagagcgagactctgtctcaatacatcaataaatcaataaataaagctcagttctggacctgggaagttgcaggtgcctgtgaaaagccaacaggaactgtccaataggcagccacatcagtcagacgttgaagagagaggcccaggcctgggtggacttagagtagggcacggtggggatcgtatacaaactgtgtgcttgtttgtgctttactgaatctgagaccctccccagatcctgaaagttgcaggaatacagcctggagaactgtccagtgggagaggcaggcttttgaaagaaagatgtagcagaggtctggccggcctcctgttttccactttccatctgtgaacacaaggaaaccacaccctgtgccacagcctgatatccaggagatcaattccaaatcgcaggctcaagtactctctgtaggggccagatggctggaagcccaggacaacatacccagattccagacaccagatcagtggtaacttccagctcagcctctctgagatcccacctcctggccttctagccgctgatcactagaggagaaaaaacatgtggatgcaggttatctcaggaagaagagaggctcattcggacccacactggtgttcagcttgccaagcacattcctgtaagatgattttttttcaattcagcaacatttgggagatcacttgagttctggaagttaagtgtatcaggattaggtttggctgcatgtaaaagaaaacataaaataacagtggcttaaacaagacagaattatacaaatgtctggaggtaggcagtctagggctggcttggtggcttcaaggttatcagggacccaagctccttctctgcctttctgttccatcatacttactgcgtagcttccatctgcaaagtcaccttgtggttagaacagctgctggagctccagctctcatagccacactctaggcagcaagaagaaggaagcagaggcagaagggcaggaaaaagaaaaaaaaaaaaaccacttcagaagtcacatgcaacacgaatagatcttatttacttagccacatgatctcagcgagaattataaagcacatgcaaatttgaatcattggaagacggtttaagtgttttttgctaaggtgtgagcaagtgcgaggaaaccactagggatagggcagtgccccaggctaattagcaacagtgggacaagaggttactggaacccagggacacagagggtcaccccacaagagctgtcaccctctgttggcaccacagagaggaaggtggaggaatctgtccaccaacctcactctcttctttctccgatctcctgccaggggcccttgtcagtcaaatccaacccaaagcccagagagcgaaggggcttgttgaaccagcacctccaggccagtgccctggggtggagaactggacagagagcagggctggaaggcggcaggcaggctcctggcacatctttggccataagggaatctgggaaatgtttcctagctgggtgcattgaaaataaagtcacagcctgatcagaggaagaaggagaaagagatatttgtgggcaactgagggtctcagcaacaccagagatcaggagcaagggtcccagtgagggcagctcccctagcagtgggaagtggggttgtgtggcctaacactggggagacctgtgtcatgaggagacattcatgtggaaacccgaggcaggagcactgcaggcagaagcacggcacgtgcaagagccctgtggcaggaacaggtttcccaggacgttggaggagggcagcaggacatgggaatgaaggggaggaggatggggaagagggcggcagagagcagacaggggagacctggtggtccccagcaggccatgcagcagggtctggatttgattgcatgcccgatggaaggtccccagaatgttctgagctggtcagctatgcgtgcatgttctcagaggcacaccccggctgtaggtgaagagggtggcccagggacaagagcggaagcagggagatcaggtggtgtttgcagcagtccaggtgggagatgctggtggtacggagcaggacggggcactgcagagcgagagaggtgggtggattccggtgctgcttggaaggtcggcagggtttgctttatggatcgtgagtgggtgggtgagggaagaggaatcggggatgactcctaggtttttggctgagccgttgggcagatggcagtgccatttacagagatgggaaggcgggggcaggaggaacagattgggagaggtggggaagggggggacattaggttgctttgcaaacatcacccaccaggcctgtggctgggcagcagctctgcgtagccccttctgaaaagtggggaaaacaccctggaagccctgccccattgaataaatatcccctcccagggatggtgattgtagcattttgagttagaggaatatttctgggtggagtttctcagagaggaaatgaccaatcattgcagagcctcgtcaattacacccaagccctgccctttcccacgtgtgctctgccacctctctgctatggttgacgatgaccatagcagaattttctcccaggaacttctgcaaccagaggcagcagaaagcaacggagaaaaaattaactgcatggtctctctgacaacccgatgcttattaatagaatctcagtcctgcctcctcgacatctgcctaattgattttgggtttaggaaccgatttggagccttggcttttcgtagctgaaaccagcaataacatttgtctttattttgtaatgtccaagagtcaggaatggttcacctttgcaccaacaaaagaaaaacaacaacctctgagcaacaggtctccagaatccagtgtaattattctggattgagttacaggcacagcaagagttgccaccagcagcagtgagcacatctatactaggtgaaaaataagagattccctttttatgtgtgtgtgtgtgtatatatatatatatatatatatatttttttttttttatttatttaagttctagggtacatgtgcacaacgtgcagttttgttacatatgtatatgtgtgccatgttggtgtgctgcacccgttaactcgtcatttacattaggtatatctcctaatgctatccctcccctctccccccaccccacaacaggccccagtgtgtgatgttccccttcctgtgtccaagtgttctcattgttcaattcccacctatgagtgagaacgtgcagtgtttggtcttttgtccttgtgataatttgctgagaatgatggtttcgagcttcatccatgtccctacaaaggacatgaactcatccttcttttgcccaagtgtggctcccgatttctgctgtttgtgccccaggcctttctctcccctctgctggagacagagctattctggggcagttggtcaggtctgatggagcccagcctgctgcagcccattagcaggtgttgccttggtcatggcagggagctcacaagctgatcctacagcactgcggacattccagggacatttgagggccaggagagggctgctgaatgagttccagcctgttaggtggacaccagtagccagaggtcagtgcaggacacaggttctttcccgcctgtggctcgacctcatagccctcttcatcccccacctgtccaggtcaagactctgttccaacctgtacctgaccccacagcctctcttccccactgaatgcctgttctctgcaggtctctgggccccagtagagcgttacctttgcagatttatttagctgctcccttcacttggaattgaatcagctaagggttgcaaactccatgcccacagggctaggcacgtgctggcaaggaggaagtcggcatggtaggggtggtggaagaccagaggaggaccttgtcaagtgggccttcgctactcaggtccagcccactgtgggcccatcaaagccaggtctttgcatttttcaagcaaagccagaaagctgaattgatgtgaaatctcgcaattaaagaaaaaggccattcaatttttaaaatcctttccttttgggcagacctaaatcaaacacacatgcagacaagatttagtctagagggactccgttttttaactccgcgtgagacgatacttgttgaaaagctgacatgtggccgggcacagtggctcactcctgtaatcccagcactttgggaggtcaaggcaggtggatcacttaaggccaggagttcaagaacagcctggctaacatggtgaaaccccatctctactaaaaataaaaaaaattagccgggaatgatagtgggagcctgtaatcccagctactcaggaggctgaggcaggagaatcacttgaacccaggaggcagaggttgcaatgaaccgagatggtgccattgcactccagcctgggtgacaagagagaaactctgtctcaaataagtaaataaataaataaaagctggcatgcattaagtgctttctgtatgtcaagcattgaactaaaaaagtgtgtgtgtatgtgtatatatatatatatatatatatatatatatatatatatatatatatttttttttttttttttttttttttttttccctcaaaactcagaacaaccctgagaaggaggcactgttattctcccgctttgcagatggggaaactgaggtgcagggtggctaaatcatttgcacaaggtacctggttaataggaagtggcagaaatcaagatttggaatcaggccttctgactgaaaacctttttcatcctattgagtatggtgacatagcgataggttctagaatctatcctagaatttcatagtcaaaccttatacctaaagttatttatgggctgtgtttttacagacagggaagctgaagctcaaagtcagtgatttacggcagttcacacctcattcttggcctctcaattcagtgctctttggcacccaaagtctacagatgaaaaaggacctggtgattcagtctaggactgaagtgtatatgtgcatctgtttgtgtgtgtgttatacacacacacacatattcatttgtagcagctgaacccttttaacatacaaaacaaaacaggtaagagaggaatcaggagaaggacgcggcctggagaggggtgtgtggtgcccccttcatcctcagcctgccccatgccaggtggactttaatgcccctctcctcaaggaaagaaagcacagcttgggggcccctgggagcagactggccccaggtagagtgtagcaggtgatatgtggccacaacagtggccacagtggataacagtgttatcccaacactgggaggccaaggcaggaggatcacttgagccctggagttcaagaccatctatagatttttcggtcatctatagaaagcccactgtgtgccctcttcccctaaatcccagggcctgcttcacataggggtagcacacagacaggcctgcagacccgtgcaggaatgccaagtgccaaatcctgccctctcccattgttctagaaacctgtggccctcttgctgcatttatttattttttatttattcaggagttcaagaccagcctggtcaacatggtgtaaccctgtctctactaaaaatacacaccaaaaaaaatagctgggcatggtggtacttgcctgtaatcccagctgctcgggaggctgaggcaggagaatcgcttgaacccaggaggtagaggttgcagtgagccgagatcgcgccgctgcactccagcctgaaagacagagggagactccatctcaaaacaatcaataaaattacacaagcaaaactttaaaatatccaagtaatgcaaagcagagatagcccttgactccccacccaccgtgtaccccactcaccccaaaggcacctgcatgtcccctaagaatctgtagcctgcatgtcccctaagaatgtttactcttcatttactcacacggaagcaccaggaagagcagcaaaaggcaagaaggaaggggagggcatgattctaatcagcacagtccagagaaagccttgctgagaaagtgatatttgcagaaacctgaaggcaatgagggactgagtctgggctgaggagtggcaggtgcaaaggtcctgaggcagaagcgtgcttggtgtgttcgaggaacaacaaggaggaggtcaatgtgactggagcagaggaagcttagagagagagcgcacagtaggagttgtagttggggcgagtgagcatccggatcactgaggaccttgtaggacagagggaggactttgatttttactctgagtgaggcgggcagtcactggaagacaaagagcaacgaatatgatgatttcactgactgttttaaaagaagtcctggccaggcaggcatggtggctcatgcctgttatcccaacactttgggaggccaaggaaggaggatcacttgagcccagcagttcaagaccagcccgggcaacgtggtgaagccccacctgtacaaaaaatacaaaaattagctgagtgtggtagtgtacacctgtaattccagctactcaggaggtggaggtgggaggatcacctgaacctggggaggtcgaggctgcagtgagccgtgatcacactactgcactccagcctgggtacagagtgagaccctgtctcaaaagaaaaagcctctggccaccaaacggagaatagaacagcttgggagcctactgcaatagtccaggcagagaaaacagtgattagagtgaatttaagtcaaggtcctgtgtttactgactccgcctttatttttctccctgccccattcttccttctgctgctttccctaggaggccctgccatcacagactctaataatatctataattttaagaaactagccataggaaggcatctcactagttatacatcaaaatcacccaagttgagggccgcagggatttgtctgggaggggtacagggttcccctgctcccagctgaagcaggcctccaacagataggagccacctaagcctcaggaatggcaaaaaaaaaaaaaaaaaaaaaaaaaaaaaatcatgttttgaatcctgaaactccctggcaccttgctaagtccccatagatagtgtttgctctgacttagacctttagaagagcaaattcattcagcatttcctatgacactggcaacgtcgtcatctgtggcaggtcagcaaaatattgattttatcaacgatggacttactggatggtgcatccaaaaatatatatatataactcacaccttaattctctaactcgacgtagttaacttggattgagattaaagggttttttcttaaatcacgttaaatacaaatatcaaacaaatcatagcacagtggtacacaggcccccaaaaagccaccgtgaatggggaggcagttcaggagtgtcatgggagaaactgcattctagcagttgggtggtttgggcccccaagtttaaatcccaacagatgggcctgggggtgaggcctctccagcccatcagagtcacagaggtgtcagagtgacctcaccctcaacccagtatggtgggaaggtttggtcatggaaagaaaccgggtctgtttttgtctgcatgtccccaggtttatgttggacgaaagaagttgaggttggctggcccagctgcattgaaaagcttgaaaactggccttttcatttctgtgtggccgtgtcgttcaggtccttccctcccgtcggagctgtccttctgcattagggctggggctgggcaaggggatgagatcatatgtttttgtgttacagaggtaggtttacacagcctcgtcgctatggcagttttaataaagcaggttactgtccccaaggggaggcttagcacatagcactgcccatgcacagatgctgctgtcattccggggcactgttgtcctttactcgtggattgacacagcgctcctccgccagctgatttgggaagggtgagtgctggccaagagcacctcacagctcgcttcctctggaatgaggaggaaggagatctaagcatttcgagaccctggatctgagcccattaaaaacaagaaatggttctggaggctgttcactgtttgccaaggcagcactgggggctgcggagtgcaggtgatttcatcaggtgacggcctgccctgcgttcccttccaggagaagggtctgaccagttaggtgggtggccagcttttgtcctttctgcagggtctggagaccgagagaggctgagctctcactaccagctgcttcgtcctttctccttcgtgtttgggactagggagcaaaggatcgattccacttggggtgccctggactcgtgcatttaagaaatatttatgagcacccactgcgtgccaggcactgttctaggctgagctgtggagccatcaaaagtcacagggaacagcaaacgggatcagtagataaaaacataaaagtatatcatgtgttagatgatgagtgcagggttgaaaatgtcaggcaaggaagggagtagaaaatattgggggccagggaagactccacggagaagggaacttttgagtaaagacaagaagggggtgagggcaccgctgcggggctccgggggagaggtcttccaggcagaaggaacagcagggcacaggttctgggatgggagcacgcctggtcagtctgtggacagagcaggggaccctgtggctgcagagagtgggcggagagggggatggggttagggaggggaggggattgggtcccaccacactctgtggatggccagaaagatttgggctcctctgagtgagcaggagccccggagagtgtcaggagaggagactctggctacaccgtggggaataagtgactggagtccaatcaggaagcaactggcctgatttcagggagagaggatgatcgcctgacccacgggggaggtggcaagggtacgatcgtgggtgtttacgttgaagagagggcaacaggctttgctgatggattggatgtgggaactgaaagatgggaggaaccgtagccaagatgattgcccaagtacccggaggaaaggggagtggcttcgggaggagcaggagggacggtgacatcagggcttggctgtgggtgtggcacctgaggtctaatcgacagccgaatgacatcaatggatgtcagggttgtaccaagccacacatcaagggatgtcaggtccgggttttaccaagccaatgattgccaaattctaatcattccctcacaattttcatcatatatctgtgtgccacttgtacgattatttactttttaaaaatcggctgcaattgtttgttgttgttgttgttttaagaggatttccaccaccctaaaggaaaagctaaggttacttgccctaagtagaaggaaaccaagccacgcaattaatctaaggcaatgccaccccctgcctggagctcccagtggcctttcacaccaccagcatccctggtgtttggtgatgtgaccctgggccacccccacccctggtgtgcctgatgaagtcaccactagaggacccccttctgggtcaccaagggaccattctgagcttaactgaagccaagagtggaccaagagcatggggacctctatgcacttcctcaggacactgttaccacctcccgtgtgactgtgacattttgtgaacgtgaaactcagcaccccgcctctgctaggcttgagtcttcactgccttcccagctgtgcagccttagccagtcattcagctccccaggttcagttccctcttctgtcaaatgggccattgggagaattaagtgatgaatgtcttcagcccagccataagcattcagccagtgatagtcgccactattaattataatgattattactggcatagaagactgccctcttccccaggaataagttggagtgctctcagttccttagctatatcagaaggttgcaacacccaagccttcaggggtcgggcaggtaatgagagtgggtgcaggtggtgtaagactgtagggagcacgggggagtgtggcaaactggagagcacatatcctgtgtgatgctatttaatgtcacatttttaaaacccactctacaagacaccaacacacaggtctgtggacaccaactggtttggattcctgagatatgaaaacccgagtgtaagatagtattttatatgttaatttagctggtctctgttgagcacattatgtgccaggcactgtgctaggcagtgaacaaagtaggctgagtctctgcccttgtggtgaaggcagcaacatacaaataagtgaaatcaaaatgacttatgtttgaggacagtaactgctgtggagagacacggagcggggaagcagagtggagagtgctatgggttgcgggaggtggtttcaatacaggccagggaaggcctctccaagaaggtggtgtctgatcaataacttgaaggagacagaggtagccctgtgattggaggagtgagagcatcccaggctgggggtacggctgaggcaggggccaggaggtgggagggcggccaatgtgcaatactgggacctcaggggcacgaccttggtgccttgattggtggtaaaaatttaaagtagaagcagctgattgctgagcagagggccttccccagatcccaggaggctgcagtgggtctgatgcttgttttcaggtttctagggggttgctaggtgattgggatcacagccttcacatgcctggtagaccctgttttggtttcccactgctgtcctaacagatcacaaactgggtggcttaaaacaacagaaatttactctctcaacagttctggaggccggaagtccaaaatcaaggtgttagcatggctgtgcttcctcagaaggctctaggggagagcccttccttgcctcttccagccctggggaccctaggagttccttgttccttggcttgtatgtgcatccctccagtctctgcttccctttgaatgtggccttcccctctgtgcctgtgcgtcttctccactttgtgtcctatgtggacacttgtcactggatttagggcccacctggggaatccagaacaaatctcatttcagtagcctcaatttaattacatctgcaaagacaccctgtattggtctgtcttcatgctgctgataaagatatacccgagactgggtaatttagaaagaaaaagaggtttaatggacttagttccatgtggctggggaggcctcaggatcatggcagaaggtgaaaggcacatcttacatggcggtaggcaagagagaatgagaaccaagcaagagggaaaacctttataaaaccatcaaatctcgtgagacttattcactaccaagagaacagtatgggggaaacaacccccatgattcaactgtctcccatcagatccctctcacaacacgtgggaaatatgggagccacaattcaagatgagatttgggtggggacacagccaaaccatatcaccctctttccaaatatggtcacattcacagcttccagaaattaggacatggtcttatctttaggggacgggggcaccgttcaacccactgcacaccttaagaactgcaaggaaaaggggaaaaaccaaggatggccatagaagaaggagagagggtttccatggaatatttccatcaaatcactaagggtctgggtaccaaccacagcatacaattgagcatgcactcgtcacacctatgttgagtacccactgtgtgtcacacacggcagcagtgctgaggattcagcgctgagcggagcacacagcctttgccctcctgggaccttggcctgcacgcagtagggctcccacacacgttcatttgcttccttccttccttcttgcctttcttcctaagtgtcttgctctgcttacagcttggttgagaaacaagagcaggcatggccaggcaaggtggttcatgactgtaatgacagcactttgggaggcagaggcaggcggatcacttgaggtcagaaattccagaccagcctggccaacatggcgaaacgtcatctctactaaaaatacagaaactagctgcgtataggggctacttgggaggctgaggcaggggaatcgcttgaacccgggaagcagagattgcagtgagtcaagatcacaccactgcactccagcctgggcaacagagcaagactctgtctcaaaaaaaaaaaaaaaaaaaaaaaaacaaagaaaagaaagaaacaagagcaggcatgaccgaaacctcgaagcctggggtatgatcagtactcaggacacatgctgcaagactgctcagagctctcaagcccagggtggtgccagaggctccctacgagagggtactaggccgatgggttggatttggggtgaggggtggtgggttccaggctcgaagaaaagtgtggacaagaggccagcagggtttgtggctgatggcagagcacctcagccagggaatactcagggagaaggtttgccaccaggttggcatgaccagatttcagtaagagcaaacaattattgggaaagttccaaagaaaagaaagtataatcttccctcaatttacatggtggttggtttccaaaagaaaaaacaaaacaatgtatattaataccctgcaaaaacaatgttgtgtttaaaatttgtaaaacagtttgattccagtctcaggtcatttataaacaggtttttacctgccttgcaggtagagatgcaattacagtaccggacagtgacagtacagtcacttacagtcactcacctccagcaccattgcaaaatcctccagactccagacctggacctcaggagtgtccaggtggactcgggacccagggtccttcctgattatgcaggacagtcccaccgtgcagcagtggcccctgccccgtctgccccgtaggtctgcagaatgtgcccactccagacctagggatgccacgtgctgagagccccctggtgccggtgccgcccgggtctcctgccctgcgccttacttccacccttgacttgcaggttccatgcaggtgatgaacaagacccggcgcatcatggagcagggcggggcgcacttcatcaacgccttcgtgaccacacccatgtgctgcccctcacgctcctccatcctcactggcaagtacgtccacaaccacaacacctacaccaacaatgagaactgctcctcgccctcctggcaggcacagcacgagagccgcacctttgccgtgtacctcaatagcactggctaccggacaggtgagcagggacgggggcaggtgcaggaagggagtgacagccagggcgggcgtccctaggtgtggtctgcacaccactgcggtacccaagttgattctggatagcccctagagcaactctcttataatttcagagttgtgcatttatttctgtgtgtattaaagaaatacagatttatttgcctacagtagtgatgtaaagtgaccttgtcaaaggaatttgagtcccccaaaaaagtgagtcttttcaaactatgaatcatagtgtggagaggccataaggtgcccatgcatgagtttgcatcctctgttaatagttattaagcccatcagggactgtttcgttgacttcaaaccattagcttggaagaaggttccaaaacataggggtgggggatgggaattcatggaggggaacagataatggggctgtgtggtcgctttctacgtggcagtaaccaaggtggtgcagaaactgacatggtggttgactgtccacactcacccgtgtcatcctgggtggagggcgacccagttcctgtttgcttatccttcaggaggtctttggtgggctctgaaggctcacctgccaggctggttgtctgaggtagagatgcaattacagtatagtcacttacctgtagcgccattgcaaaaccctccagactcaattcatttaacttgctttaattaaaaataaataaatactccccgccttgggtaagaagccgcggcggttgtgaaatcaagatattgtggctcagatgttgcaaccccaggaagttgcatccaagtgacaaggggtttgtttgggtgggagtgccgcaagggaaggatggactcctcctccagccctgtccgcagtgctggacctgcagccctcgaggctgggcagcttcctctcagatacacagtgtgggctggcagggatgctttggtgtggggagcaagccagtaaggtgtgtcttcttacagcctcatcccatagccagaatcacctagaaagtatgttctgctgagaactaggaaggcctcgttcctataccttgttcctgtgtattgtgcgtgccattatgcagaatcaaccacctgttggttcccctgagcctctgcagaaagccacatgtgtcagaagttaccatggccaccaccctagatgattggcgggggcctggatgttgctagcagaagcaggacaggcaggcccgcagcacagcagtgggcccttattgaagatgcacctgcaacttggctctagaaagtacagccatgcactcaagagtgaccagccttgaaatgttttaaagtctgaatatttcactgaaaatcttattttaaaatatgccggcacagcttattttttctttaatgtatactgggggccaaagaaaatatgtctgaggagtgagtgtgtggctcacagactctcttttcacaacctctgggtgaaaggtctgtacagaaacctttcgttttggatgctggaagatcagtaaagaccctagacctgttctcatcaatccccctcatttcacagccagggccactgcagcccaaaaaagagacctgcccagagtcaaagtgaggtgtttgtggcataatcaaaatggaatgcaagatcatgggaattcagagggggcatggaaatagtattcatcagactgaaaggaaactcatatattctgtgccattttgagggctcagggtgggagctaaaggctagtgtttcaaaatcttacaggcgacatgagaaaatcaatcatttcaagaataaacattctctaaagtggatttcccaaacttgtccttgaatgtatgcaaatcaccaaaaagctgtctccctaaataagtgcttttattcaactatgattcattattataccctcatgaagactgggagcgtaatgtcaagtgtaaagagccagataccgagaacatttacgtttttgtaaaactgccactgagaattttattcattatatttagaatgccactctgtacaaagaatcccattccagccttactttcagaactcaggaccctgaaaacacctgtttagtctgatgaactggtgtactccttgttattacataataagagccacataccctgtatagtttccctctttgccctggcagctaggaagctcaggtttgagttttatattgagttgttgtttaaagtggaaatgtttttaaagatccaactgcgtgatatgttatactgatcagtgttgactaagaaaaatgacaaaaatctataatgaattcaaaaccttttagattattttttccttttagattgatttgtacatacatattagaatatactgtaaatttttaatcccccaaggaccaaaagtaaattgttcctgctgagtcttcagccatgttaaaccctgtgttcacgtggccacctagcaaagttggttcagttggatttaagtttggctgtgtgtgtgagagagaccggggatgtcaaataaaattccaagttgttctggtggccctgctctatgaagtggtcagagactccgactccatttctccttatttcccattggtgagaaacaagtcatatggccatgcatggcagcaaaggggcctgggaaatgtagtcttattctaggtggacatttgcccagatgaaagttattttactgtgggagaagaagaaaacggatactgaaggacaagtgaagtctaggccaccctaacagttattagccatttgtgtttgtgatactcgtttgaatagaggagatcagcccaaactgaggaagactgaccccagaaaaatgctacttaagtggaccaacatttcataataaatagtgcttttaatgtatttagtaaggtatttgatcttgaaatgaaactacaatgtttcgagaataactctgttatgttacatctctttttttctttttctgagacagagtcttgctctgtcacccagactggagtgcagtggcacagtctcagctcactacaacctctgcctcctgggttcaagcgattctcctgtctcagcctcctgaatagctgagattacagacgcctgccactacgcctgactaatttttgtattttttgtagagatggggttttgccatgttggccaagctggtctcaaactcctggcctcaagtgatccacctgccttggccttccaaagtgctgggattacatgcatgagccaacgcacccggccctctgttaggttgcatctaatgatatttaacaaatattgggctctagttgcaactaatgagttgattcttcaagcaagtgaattgacgaagtgtagggaggaatataatgtgtttcacaaattgaaatggatggcacaagatgatatcctttacttcactagggacatttttgcaaaagtatttgaggatttgatcaattttttcaagggcctctcctaattctctgacatctgaatcttcccctgtgaagtgcatctcatacttcatcatccttctcaatagtctcttctccttcatgtagtatctttatagaccaggtaattattcgtcagtggatttgcatgtgttttttgagctatcttccagcgtcattttaattaattttacaaaccctgcatcttttaaaatatttgcaatttcattttgcagtgatcttgctttgcatggccccatgtttgcagtggagattgacaaaagacaaaatgagagaagctaagtttaagcaggataaatatcaatttgttcatgaatatttctctgtatggcttcttacaacttgagggacttggatctcagatatgaatacccttggaaggatcaattgcatcctcaggttttttgttttctttgtttttttgtttgtttttgagacagggtctcactctgttgcccacgctggagtgcagtggcgtaatctcagctcactgcaacctccacctcccgggttcaagcgattctcctgcctcagcctccccactaactaggattacaggtgcgtgccaccacgcccagctaattttttgtatttttaatagagacggggtttcaccatgttggccaggctgacctcgaactcctgacctcaagcgatccaccctcctcggcctcccaaagggctaggattacaggtgtgagccactgcacctcgccacatcctcagtttttacaaaggttttatagtcatcctttaacacagttcagcagttgaagtgctgttgccctgcctgtgatcacttatatatccacaagtcaaagttgtacagtgttcccagaatgagacacctcccagctctctgcagagtggttgagggcattagctttgcctgggtttgaatccagtctctgctgctttctgcctgcatgaacttggacaagttatttagcttctgtgtcttggcctcctcaaccacagttaataatgtcacttaactcatagagttttgtgaagattaaatacattagaacagtgtctggtacatggtcgtggtaggcacttgggaaatttagcaatgatggctgggtgcagtggctcacacctgtaattccaacattttggggggccaaagtggaaggatcacctgaggccaggggttcgagaccagcttgggcaaaatagtgagatcccttctcaatttttaaaaaacagtaataaaaaaaagttagcaatgacgatgacgatttgcacaatagcacaacatcacacagcccacctcaggccagtgttctgatgaatgtcatggtaagttgcactcatggatcaaaatgtggcagcatgtgctcagcctctggtaatcagcaaaatgcaaacgcagccaacagtgcattatcacatcccagccatgaccacagcaaatatgaagaggtcccatcgcaccaaatgttggtgagaatgtaggaaaacaggaaatcatatgcgccagcagcatgatggtaaattgttccctccactttgaagaacagtttgccaatttctggcaaagctgaaaatggacatctccttctactcagcaattttactctggctgtgtccccctcggttctgaggaggtgatgttgatgtgtgagttctgcttgagcaagggaacacacttcctggctgccctgtttgctcttgaagatgtgtgatgctcatggcaatagattccctttagatccaacggacaggaaccccgactgcagctggcttcaaaaacattgaattttttgctccctaaacaggccaggcacggtgactgaagcctgtgatcccagcactttgggaggcagggatgggcggatcacctgaggtcaggagttcaagaccagcctgaccaacatggtgaaaccccgtctctactaaaaatacaaaaattagccaggcatggtgatgtacacctgtaatcccagctacaggggaggctgagacaggagaattgcttgaacctgggaggcggaggttgcagtgagccgagatcgcaccactgcactctagcctgggtgacagagtaagactctgtctcaaaaaaaaaaaaaaaaaaaaaaagagaagatacaggtgagtagcaggcagagtcggatcttgtggtttacgagtatcatgatcatatcacgaggctggaggtctggacatggtggctggcactccagcagctgtgtgcctccttgtccacatctggcaggagcaagagagcatccttttccagaatgctcaaggcatgagatcccttctgattggaccaccctgagtcacatgccagcccctgagccaatcatcatataaagcacatggtttgtgccaacttgcccagcgtggatcacctgctctgcagcagctggctgagtccctttttccccagcacttggactgccaggtagaaatcaagggctgctggaaagaataaggaaaagcatactggagtgccgatcacaattttactacactgcctttggcaaacaaaaaacaaaaaaaaagtaacatcagctggccgggcacagtggctcacgcctgtaatcccagcactctgggaagccgaggagggtggatcacaaggtcaggagtttgagactagcctggccaacatagtgaaacccgtctctactaaaaatacaaaaattagctgagtgtggtggtgggcgcctgtaatcccagctactagggaggctgaggtatgagaatcacttgaacccaggaggcggaggttgcagtgagccgagattgcaccactgcactccagcctggtgacagaatgagactccatctcaaaaaaaaagtaacaacaacaaaaaggcaaccttttccagctctttctggtgaactagattggagtgccattttctccccattgggataatgcctttctccttccacacctgaatctggcagttctgaagttgtttcccagccccagcttctgccatccggtccagactttcgcagagatggtggcgggccctctgcccttctgcatcatgttctaaaatgcgtcaggggagcagggggtacatgctccttacaagaccaggccttgccagggctctcagttggagcctgttttggggtttggccctgagcgccccagttattttcactcttctcgcacaaagctgggtagagaggtcagctgaggaccagaacctggccatcagccttgggcagctaccctcaccagggtctggggggcctctgtgtcctgatgaccccaccccatctacactacactacacttggggcaccccatcgccctctcacacaggaggatggaaaggcgcccgctaggcattttggcatccccaacaaatgagacttgttttttccctaaagcggtttcattcaggaccgcaggggcaggagggctgctgcgtgggccgtcctcctctgcaatgctataaagtggcccaatgcccctctttccctgccactctctggatctacccttagccccttgccctgaaccccatccaccctggcccctctgcctcctggccatcgccccagagctctccccagcacatcaagcatgagtccagcatcacttcctggtcccccgcctccccggcgcctctcacaggcttctcctcggcacctccagttttccagttgctcaggccaaaaccttagcaccattcttgattttttttttcctattcctttcacactccacattcagttcatcagcaaaccctgtcagctctgccttcaaaatatgcccagagtcccctctgctgccaccagcccatccgcgccactgtcttccccgcctgccctgttccaggtttctcctgggatcccccagcttctgcgtttatgaccccttggtctgttttcaatgcagcagccagaggggtctggtcagaacctagttcagatgctctttctcctctgggcagagccctccttggctcccacctactcagggtagaggccccgacagccacctcagggtcccagtgatccttcccttctctctgaaccctctcagcctcctggtctcccctcagtcactgtcctccagccacagcttctcaagcagtcagccacacctgacatgcacccactcacagtgctttgcacttctttccttttctcaaaacttctacacgtctgcactttcctcgtgtctgtgttccaatgctgcctcctcaaagaagccttccttgactaccccatgcctcctgttcatcccagttttttcccaccagtgcccccatcaccactgaacaccactgactgtgtattctgcccatttgtctcattgattgtctcgtttctaaaatgccagctctcaggctgggcgtggtggctcacgccagtaattctaacactttgggaggctgaggcgggtggatcacttgaggtcaggagtttgagactagcctagccaacatggtgaaaccccatctctactaaaaatacaaaaattagctggatgtggtggcgcaagcctgtaatctcagctactcgggaggctgaggcaggagaaccactggaaccagggaggtggaggttgcagtgagccgagatcacaccactacactctgtcgcttgggtgacagaatgagactctatctcaaaaataaataaataaaatgccagctccctggaagcagcggcctctgttctgtgccctcgcgggttgccaggcctagagagtgcccaccccatcgtaggtgctcaggagaccttcccaggatgactggtgactaagtctccacattctgtccccgccagcagcccacccccatctcttccacactcctttctcctctcccgtttctctcctctccacccccactcccaccatctcagcctttcctcctctttcttctcagcctctctgcacacacagggaagagaagactgaaattattcccgggatgccgtccctgggcccctggtgcagctgtccctgccttcacaatggcagccttctctttgcttggctcttctcctgggtttgctccctgctctcttcctctctccttgagtgcacacaagtgtgcacgcacgcacgcacacacacagctcccttcttccctcggtccagctgcctctcatctgcccatcttccctccccctctccggcctgtggggggacagcagagcctctccattcaccccgtggagtgtatccactgctcacagcaggtagccttcctgtctctctgcagcgaacacccagccttccccactgtggggatccgagtatccacgggaattgcacagcccctcctgggacccaggctgacccagcgtgtcctcgagaggcacggatttgccgcctccgtgcacatcttcaagcgaaatttcttcctctaatttgatagtcacttcctttctctaagacctcagatttcaaaataagtgaagcacttgttttgagcaagagtctaaagaattagactccgccttaagcgcccttgtgaccttgagctgagacctcatcccctctgggcgtcagtctctccatctgtgcagcagtgttgtgacatctaagcactagtcacccagtgcctgtgataagacgccaccctgagtgatacgtgacctgtgcccacaaacccaggaggagaggttccctgcgccgtaagaggaagtggccacggggaaagaggaagctgatgtgaggccgatggggcagggtttccgattgtttccaggcgacaccctctctgtcccacccccttagcaggtgtatccacttccctagtggaccacagactgggtggcttagaacaaaaggcgattttcacagttccgggagccagaaccccaaaatcaagcatcatcagggccacgctttccctgcaggcttcaggggagggtcctttgcccttgagttcctgggggttgctgggaatcttggcaccccttggcttgtggccacatcactccagcctctgccttcatcttcatgcggcctcctccctgtgggtccctctcttcccgtggcctgctcctctctgaatcagtgtccaaatttccctcttctgtcaggacaccagtgattggactagagcccgctctgatccagcgtaacttcatcttacaacaccatgttacaaacacggtcaccctcacaggtacctgggcaaggacttgagcatatattttggggaacacattcatctcgtgacggctggtttctttcacacattaaaccccgcccccccccataaaggctgcagagccgatgtcaaactgagcaaacctgccgctcttcccctcttcactgccccagctgtggtcctgggtggggagcagtgtggccgccctgaagatcagctccatgcgtagccttcccttcccaaccatggtttctctcaaggaatctccacctgcagtgggcgttgaaacagctgcagggtcaaaagtgagggaagggtgactgtggtgacagacaggcacaccctgtctcctgggcctcaagaggcttccgggggtttcagagtgcatgagaccttttgtagtcctctcctaggtgctagctgtgactccctgaacattctggaatgagttaggctggagccaaatggcccagtaccgttgccactagccacagggagctatttaactttacgttaattacaattagcatttcagtttctcaggtgcactagccatggttcaggtattcagtaggcgcacatgggttctgtactggataatgcacatagagaatgtttccattggcacagaaaggactcttggacagcaggagaatagagcctatggctgggcctgtaatcccggcacttggaaaggtcgaggcaggaggatctcttgaggccaggagtttgagaccagcctgggcaacatagtaagacctgtatctttacaaaaaatttgaaaaaaaaaaaattagctggacatggtagtccatgcttgtagtcccagctacttgggaggctgaggcaggaggatcacttgagcctaggagtttgaggctgcagtaagccatgatcacaccactgtacttcggcctgggcaacagagtgagaccttgtctctaaaaaagaaagaagaataaagcctaatcaaacaaaatcttttgggagtggggagtgacacacagcactgagaaggggcaataaaaacgcagggggtggtggctgtcgaactttaggtgagtgctttccgtgattcctcatctgtaatccaatctcctcctcctcatccctgcactcacttccccttatgctcccagtaccttgatctgtcttcccaaaccttcctgggtctcgggtcagggtctcaggacaggttcctgttctccgagcagcagacaccatccatcccggggccagcaggttgtgccagcccacacagcgagtcctttgggaatccatccgtgtcgcaggggatttgagcaaatgaagggaaaccgagttcctacaccgaggccgggagcggggcttcctctgtcatccctgtgtgaacccgttctagcctgggggctccaaatgcatagagggctggcaggtagcccaaagcagagaggcaggctgggtggggagggggtgcccagatttcaactgtggactgttcactctactttttaagaatgagcaactgaaaacaccgggcaggcccacagcaaacacacctgagggatggattggtctgcaggccaccggcttgcaaacttctttctaagctggtggttctcaagggagcacaccgccccctaggggttaaactctgtgactgcattgccggtgatggtgaaggatttgactttgctggcttcctgggggcggagactaagaaggactttgatgtcctgctctgcacagcagagtccacgtggcccccacattgcattgtattccacatagcttctgagtttcctaccacatcactcatatgggtagattattttatgtttattgtcatctgagtcttgaacctacgtctattttatatgtaaatactggagggtttttgcatattcccaggaatgtacggaataagaaaatggaggcaatattatacttgagtgcaaaactttcccaagagtcattccttatttctgaaagtcccatccccgatgacagtgctacgccaaaggatttgaatggcaaatgtcgcccgcccacccagctgcccttgtaattgtcacattcccagtgaatctgtgtctaggtgcaggcgtctgcctgactactgtgttgtgccttcttgatggatgtgctgggggaatttcatattgaaatttatcttcattataaattgctttccttttattttccctgtagattgcagttagagcattatattgattttgtggaaatgacatgcataggtagcttttgttacctataaatttcctttcaagaaaacaagggcgctctacaaaatatttgtcatagaaatgggaggtcagtctgatggcgctgagaacagctctttgaaaggtgcaagtagtgtcagattcctccaaggcgataattaaatatccattgagtgacaggccttgttctgagggtctgttgtggattttctccccctcctctagtccatccctctgaacaaaaccacactttaaaaggcacaagacagatatttaagacacagcttgtcctcgtggtgactcagcaggcaataaaacctgtcactagagatggagccctccatacccagctaattgagtttccagggaatgaatgggcctcatcctcatttgcaggagctgcaagacccttctagggagcggatggctggagccagcatttaattaggcacaggcagcccgccctccatgccaccaacacccagagctccgcctggccctgctacaaccagtcagcagggccttggtgtcccccgcagcccagtcttcctcaatagccacagcctcactaaaaacaggcaggcggaagacaggaatgcatggagtggcaagacagaagcagctctcgcctctcgccctggcgatctgcttgtccctgtttgtccccagcaactggccattccttctccccacccacagccggaggacacttttaaaaattgtaaacctgaccacatcacttccggctgaaaacctcctacggctgcccactgctttttggataaactggcatctcctcgccagggctgccaagaccttgtttggcctgggtgtgctcacctctctgtccacatctcctatctgtcccttccttggtgacagcactcaggctgcctagcctctttgttcctcagaacttccaaggtccattcctgccccaggccctttgtatgtgcagttacctctgtctggagcactggcccacaaccattctggtacaagcaaccggtttcgtggaagacagtttttccacggactgggggtgagggatgttttgggatgattcaagcgcatttcatttagtgtgcactttatttctaatattatcacattataatatgtaatgaaataattatacatctcactataatgtagaatcagtgggagcccgagcttgttttcctgcaaccagatggtctcacccgggggcaatgggagacagtgacagatcatcaggcattagattgtcataaggagtgcacaacctagatcccccgcatgcacagttcacaacggggttcacgctcctatgataatctgctgctgatctgataggaggcagagctcaggcagtgatgcaagtgatgggaagcggctgtaaatacagatgaagtttgctcactcgcctgccactcacctcctgctatgcagcccagttcctaacaggccacagaccgctacctgtctacctgtctgcagcccaggggttggggatccctggtctagagcgttgttcacacactgcggagaacttcctccatccattctctcttccttcctgcccttcctgtgtcggttagtactcctcaaccctctcattctcgaccatgacacccggctttatgttcttcttaggacttctcgcccccttgaaattatcttgcatgtttgtgaacttttttttttttcttttttttgagatggactgtcactctgccacccaggctggagtacagtggcatgatcttgactcactgcaacctccaactcccaggttcaagcaattcccctgcctctgcttcccaagtagctggaactacaggcacccaccactacactcagctaattttcgttttttgttttggtttttttttgagacggagtcttgctctgtcgcccagcctggagtgctgtgccacgatcttggttcactgcagcctccacctcccaggttcaagcgattctcctgcctcagcctcccaagtagctggcattacagttgcatgccaccacaaccggctaattttttacatttttggtagagatggggtttcaccatgttggccaggctggtcttgaactcctgacctcaagtgatccacctgcctcagcctcccaaagtgctgggattacaggcatgagccaccgcacccagccaatttttgtactttagtagagacagggtttcaccatattggccaggctggtctcgaactcctgacctcaagtgatctgcctgcctcggcctcccaaagtgctgggattacaggcgtgagccactgcacctggcgagtgaacttgttttttacatgttttgtttgctgcccatccaaaaatagcaccaggcaggtattgggtactcagtaaagatttgaacaaggccaggcacggtggctcacacgtgtaatcccagcacttcgggaggctgtggtgggaggatcacttgagcccaggagttcaaaaccagcctgggcaacatagagagaccctgtctctacaaataattttaaaaactggccaggcatagtggcacacacctgtggtcccagctctttgagaggctaagatgggaggatcacttaagcccaggcctttaaggccgcagggagccatgatcgtgccactgcattacaacctgggcaagtgaaacctcaactcaaacgaataaaaaaaatgaacagatggagaactcttgggccttaggcttgaagtcagcaaaaaaataaaaacaaaatggaatttagattactatctcatttatccagcatgaagaaacataatcgaaattagttcaggcaaactttgccaggtcccagtgctcaaacgctgtcagaaccctgtctttctgcttcttgcgttttctgtcattgggttggctttattaggaaggttccctctttgtgatggcaagatggcccccacaggtccatctccccagtgtggtgaccccagctgaaagagaggcctctttccaagggctccagcaaaagttccagggaaagctctcattggctcatctagggtcttatgtctctttcacccaatcacagcagccaggcaaaaggagataccctgattgtccaggccaacctcatgggcctggtccaggattcagagctagaaagagcctcatcagaacatgtaaggctgagaaaggggaaagattggttccctccctctttggtgactgaaggcacaattatgaaaagacaggagaatggattctgggcagaaaaataaaacagatatccactatagaaacccacatgcaggccgggcgcagtagctcacgcctgtaatcccagcactttgggaggctgaggcgggtggatcagttgaggtcaggagttcgagaccagcctgaccaacgtggtgaaaccccgtctctactaaaaaaatacaaaattagccaggcgtggtagcgcatgcctgtagtcccaggtactggggaggttgaggtaggagaatctcttgaacccgggaggcagaggttgcagtgagccaagataatgccactgcactgcagtctgggtaacgagtgaaattctgtctcataaaaaaaaaaaaaaatagcttcttcttaaagggcaagtgggaggagagcatttctcccagcccccagctcgctctgcttccaacataagatgcctctttcgtgcggaatcatgaccccaccttcctcatttgttttcacacagctttcagttcagcaagatcccatctctggcatccagaacttttatagcattgatttatcacttcgtgcagtgatttgcatttggtattttttttttcaaaagcagaagaactcgactcaggctgtaaccttgcaaagcagcacaaagttaaaaggatccagttacagaatatcagaaataccccagccctgagagctgtggagctctgggtttatttaatgcatttcttgccagccctgcctcctcagccaatttgtctgccaaaaaaacaaagacttcagtcctgtggcatttcacatctaatatttatgctgttctagagtttgcaaaagggcttccttttcatttatcactgttcctcaggaacctccagctcccctgctaggttaatgggattgttctctgctgcccagaccgggagccccaggaagccaaatgacagatcatgaaagtggcccagtggaggactcttctactggtgtcaggggtaggatcaaaactcagcctgaaccagctcagtttctattttgtgaccctgggggccaaatatggatcttgcaaaatggcagctggcagcctgagtctacacttcaaccccaaatttctgtcagagttacaagatgctttttaaaatctggaaatttaaccaaaaatacccagattacaaacttctctttaaaaaaaaaaaaaaaaagattatgataggcctgtaatcccagcactttgggaggccaaggtgggtggatcacttgaggccaggagttcaagaccagcctggccaacatggtgaaaccctgtctctactaaaaatacaaaagaattagccgggcgtggtggtgtgcacctgtactcccaactactcaggaggctaaggtgggagaatcacttgaaccaggaggcagtggttgcagtgagccaagatcatgtcactgcactccagcctgggtggcaaagtgagaccctgtctcaaaaaaaataaaataaaataaaggccaggtgcagtggctcaagcctgtaattccagcactttcagaggccaaagcaggtgaatcatgaggtcaggagatcgagaccatcctggctaacaccgtgaaaccccgtctctaataaaaaatacaagaacaaaattagccggtcgtggtggcaggtgcctgcagtccgagctactcgggaggctgaggtgggagaatggcgtgaacctgggaggtggagcttgcagtgagtgcagtggcactccatcctgggcaacagagcaagactctgtctcaaaaaataaaacaaaaatttgaaaaagataataatgataatgatggtattgccattactggtaacattcctgcatggtggagattagtaaactgtggcctacaggagtctgctgccaggttttacaaagttttctggaacacagccacacccattagtgtatgtactgtctgtagctgctttggctctacggtggcagaattgaatcattgcaatagagaccttatggctgcatagctgaaaacacatagtctggccctttgcagaaatagtttgctgagccctcctaagtggcgccagcccactggatttgtgccacagatacccccaggatttattagaatataggtggagttgagggtacttcagtccctaattaacagcggattagagatgataggtgcttatttctctcccatttgacagtttgggcataaacagcctagagatgatgtggcaggcatggtgttggctcccaggctcctgatgggtgatggtcagatggcgttccatcatcctgggcgatcgtccttatctaaagcagcatcccatcctgtctgcatccaaccagcaggacacagaaactataagggaagctcacttcccttcctggaggggagtttccagaagtcacacaccacctggtgtacccctccagttcatagaaaatacagagaattacaaaggaagccagttatatgaaaacatatttatcaaaatattttataaactgtgatatgtatgcttctttacacataaaatggcacgatgaagcagttatttaatggacaatggataggtctgataacttccatgatttcgaagtagcgctggctcaaatgatattttaagaagtccatgttgactacaatgtgatatgaaaatatccgtaattcccattggtgacaaagtcccagggaccatcattcataattgaaggggatgctagttataggttaatgaaaataaacaaatacatacttttgccattcaatttcaggaaattatatcttgggacaacagattaagaacctcttcctcaggtgatctgattcgattccatggcattaagtgccatctaaatgcttacagctcctcagtttgtaattccgtagcttttctgtgaacctggtctgtttccacctgaatgtctaacctgagtctcgaggttaatgtgtctgatttctttatcaacccccatccccaactctgcccctcccagtgtccctttcctaaataagggcaaatctgtcctcctcattgcttggaccaaaaaccttgagttatccttgactctctttacttctttcgcatgccacatcagcaaatcccattggttccacctttaaaaatagcctggaaccaaccacccaagcccttcgcctgccacgattgtggtcatcacagtctgtctcctgaatgactgtgagagtctccaaacattccagttccctgcctcggactggccttaattctaggacagaagctccaggaagatgcaggttttttgctgctttaattttttctgttttgttcactggtatccccagtgcctagagccatcccagccacacaggagtcctcctttaatgtttactgattgaatgaatgaatatataacatcatgatcaataatattatgataaaaacagtaaccatttagaggcagttaacatattttctcattgaatctttcccagcaactttgtcatgtagggatattattattattcctattttgcagttgagaaaactgagctggaaggcagaggtagctgaacttaaatgcaagctgttggctccagagcccatgcccagccctcagacctgcctgcctcggaggataaaaatcatttctgaggccaggccaggtggctcacgcctgtaatcctagcactttgggaggccgaggcaggtggatcacgaggtcaggagatcaagaccatcctaaccaacaaggtgaaatcccatctctactaaaaatacaaaaaattagctgggcatggtggtggcgcatgcctgtaatcccagctactcgggaggctgaggcaggagaatcgcttgaacctggcaggcggaggtttgcagtgagccgagatcgcagcactgaactccagcctgggtgacagagcgagactccatctcaaaaaaaaaaaaaaaaaattatctctgaaaccctacacttctggaaagactgatctggataacgactatggctcctacctgtgtcccccacctatgcttcaagaaaggcaaagtgcccgggtcctgggaatgaccttccttcaaaagcccacggccggatgaattctgggaggatgcagcatgggaagataacctcagtgtggaaattccctttgcctggaattctggcagaaagcacttcggagatagtctgagccacatcggagaggaggagctctcggaggctgagtcccatttgtgtgtgtccccacctttagccatggggcagtccctctgctgttccctcttccctgcctctctgcgtccccgtggatgggaagagctccagtctgtggtcgctggagtcctgctgagaggctgaacagggtagtcaccaaaaggcaggtggagacagacaacctgggattgagcctcatttcagctctgacacttggcagttgtgggatgttcggtgaaaaggggactttgcctctctgtgcctcagtttctccatctgtaaaatagggaccaaaaaaaggatctacctcactgggatgttgtaggtcatcgtctaaaccagtggctctcaaagcgtggtcccaggatctctagactcaaaactattttcatgataataccaggacactgtttacctttttaccgtcattttccttctggtagacagtggagttttctagcaggtacatagcatatctagttatctaaaaaggattaaaatactcttcccttttccatctgcatacccattttattttattttttagaaatagggtctcgcttgtcacccaggctgaagtgcagtggcacaatcacagctcattgcagcctcgaactcctgggtccaagtgatcctgccacctcagcctctcgagtagctgggaatacaggcacacaccaccacgactggctatatttatatatatttattttttagtttttgtagagatgaggtctcactttgtcacgcaggctggtctcaaactttttgcttcaagcaatcctcctgccttggcctcccgaagtgctgggattacagacgtgagccactgtccctggcctgcatgtctgtgtgaggctggatttttcatgttaaacaaccaaaacaatatatctcagcagattgaatgccaaaacagatttaagaatcctgctgccttccagtaaacaagacattgaagagattggcaaaaatgtaaaacaatgcaactcttctcattaattgtattttgtttgggaaaaatatagttatttatctttttttctccccaagacagagtcttgctctgtcactcaggctggagtgcagtggtgcaatctcagcttactgcaacctccacctcctgggttcaagcagttctcctgcctcagcctcccaagtagctgggattacaggcgcccgccaccacacccggctaatttttgtatttttagtagagacagggtttcaccacattggccaggctggtcctgaactcctgaccacataagtcatcacgcccagcctctatttatcattttttaaatgtatgctaacaagtagtgagtttattatttaaatgagtgaacaaatatgttttaaatttctcagttttcatctctaatataataactatcactagatataaccaacatacacaggactctgggttccttaataaattttgaccatattgaaaagcactgctgttgccttacactgaccttgagtgcttttttggttttataaagcacatccacaaatggaagtcatgtcccgtgtgggccaaatagatccaagttcagccagccaaacaccatacaagcaaataggaagacaagaatttaacaattctacccactcctccactcacagagggtgtgcaccggatgataaaaaaacaaatctacgttctcagccaggcgcagtggctcacgcctgtaatcccagcactttgggaggccaaggcgggtggatcacttgaggtcagctcaagaccagcctggccaacatggtgaaaccctgtctctactaacaatacaaaaattagccaggcatggtggcgaacacctgtaatcccagccagtcgggaggctgaggcaagagaatcactggaacccgggaggcagaggttgcagtgagccgagatcgtgccattgcgccccagcctgggtgacagtgtgggactccatctcaaaaaaaaaaaaaaaaatcgacattccctcactcagctgtgtctcccacaggcctcccattacgaggtgttcgttggttcagttgtttacccatttattccacaaacgttcatcgaggtctcgtcactgaccaagctctgttctagatgtgaggacacaggggacaagggactcagaaagccgctgccctcatggggctggtactctggtgggagaagcacgtgataaaaactagaagacagataaatatgaccagtgaataaatatgtggagaagcaatgtcgggggaaaggggagagcctgggcggtgtggggagatgccatttgaataggagggttaggattgagccccagtaagttaacatttgaggctggacatggtgactcacacctgtaatcccagaactgagagaggccaaggtgggcagatcgcttgagcccaggcattgagaccagcctgggcaacataatgaaaccctgtctctacaaaaaaaaaaaaaaaaaaatacaaaagttatctgggcatggtggcttgtgcctgtggtcccagctacttggaaggctgaggtgggaggatagcttgagcctggggaggttgagggtacagtgagccacgaccgcaccactgcactccagcctgggtgacagagtgcgaccctgtattggaaaaaaattaaaagctttgagcaaatagctgggaaaggtgaggaagcagcccatgcaggtatctgaggaaggtgatttctttcaggtaacagcaagggcaaaggccctggggcaggtatgagctttggggttggggtgctggtaggatagagggagaccccaggacaggaggctggggggaaagtgggggcagatgcagtcacggagcaggacaggagacagttataggactttgtagggcatggcaaggactttggattttagttgaggtggatgtggagccactgaagggctttgcacagagtggggggcttgatcaaatttgtgatttaatgggatccttctggctgctgtggaagatgggctgaaggtggaggcaggaggaccagggacgaggttccagcaaggtccaggcagaggcagtggtggcttggaccaagatggtgacaggcggatgatgggaagtggtcagacctggatgtgtcctgagggtgaagctgctgggacatatgtgagggaggacagaggagctgaagtcccctccatggtgcgtagccttgacccactggcattgacggatgtatggatcacagggcgaaaatcaagaggccggtgtgaagtgctgatttgacaccaaatgaagtgatttgaaggaaattactaagtatgcagcggtccaaatgatacataaaaacggccaaacgtgtgtgagaggcacgcggacaactggaattgagatgatgccacgaagggcaaagaccccgttttgttttcgcagactccgtgcctgcgaaatggcgcgggtctgttttgggaaggacggactttccacaggcttctgcttcatctttcgccgacctctctgaattgctttggcaaacactgtttattgtcattggctcggctccgcgctccagcccatctctgctgatagatgtgtgtcatgctcagccgacttcactgtgcggcatgaacactcctccccaagctcattactggagtctcggaggggccttgccattttccaaaacggtgtcacatctggtttctaacaaccatttttatttctccagaggtccaagttttcatccccctccctgaaaacggaaagcagactgtattttgggaactcacagttcttttttgtttctgtttttttgttttttattattttttttttttcagagacagaatctcactccgttgcccaggctggagtgcagtggcacaatcatggctcactgcagacctaaactcctgggctcaagtgatcctcctactttggcctcccaaagtgcttggattacaggcatgagccaccacgcctggccctttttcagagttctttatgcacaatctcatttgttgctgcccccatttttatagaagaattcactgaggctcagacaggagcactcgcttgcccaaggagtcagagtcctctgactctgcaaaccaagctctttaaagccacactgcaaccctgtcgttaatggtacatttggacaactttttaaactgtgcactttacacagagtttcacaacctcggcactggtgacactttggggctggatcattctttacggggggaggagggccatcccatgcactggaagatggtcagcagcatccctggcctctgcccgatagatgcctgtagcacattcccccaccccgccaggtcatagcagtgaaaaatgtctccacacactgcccagtgtcccctgcagggcaaaatcacccctggttcagtgtattctgcacacagatgtgcttcaggttggcagccctgcctgctccgttgacccatttttttcagcatgtagcactgtgctgcagacactataatagaaatcccttcctttctttttctccccccacccctgccccccagacagggtctggctctgttacccaggctggagtgcagtggcaggatcttggtccactgcagcctccgcctccacttcctgggctcaagcgattctcccaccccagcctcccaagtagctggaacgacaggcgtgcagcaccacacctggctaattttttggttttttggtagagacagggcttctccgtgttgcccaggctggcctcaaactcctgagctcaagcaatctgcccatcttggcctcccaaagtgctgggattacaggcgtgagccaccacaccaggcctagaatccctttcagtaagacatgcagttgccacctctcctgcactcctgggcgaggggtgtgacgcttaacattagagggcgctgccccaccttgcacagctgtgtacctcaatcaggtgcacctacccagccctcctgtcggccactgctcaccgtgtgcacactctgggccaggtactgcgctggggctacagtgcagcacggctcctgccttacggaccccacaccctagttggggaaatgaggataaacaagaaaacaaatgcatctataggataatttcagagagtgcagagtgctgtagaggaaataaacagcccggtgactatagagggatgggtgaccagggacaacttctcatctgacctgaggtgccacggtgaggaggaggcaggcgtcccaggcagaaggaagagcaggtgccaatgctcggtggggtagagagcttggctcctagggagcgtgagacctagagaagttgaaacagagtgagctcagcagtgcgtccctgaagggagacggcctgatggctcttggactcagaagggccctctggccatttggggaagtctgggctctgggaaggctgcggaggcagaagtccagttggaagttggctgtgagaaggaaacaggtgaagaagcaagatgcatttctgtcttttttgggattttatatcctgtgtatatgtgtatgttgtgtattcgtgtatgtgtgtatatgtgcttttactgtattttcctgcatcgtgtatatgtacatatgtacctgtatattcatgcattgtgtatatgtgaatgttgtatatctatgcatgtgcgtatgtgtgccatatattaatgcatatgtgtatttttatatgtcatgtattcactcgtgtgtatatgtgtgttgtatattcatgtatgtatatgtagtgtatttgtgcttgtgtatatgtattcatgcatgtgtgtatatgtatgtgttgtatatttatgcaggtgcgtagatgtgtttgtgtgctggttccaaaatatgaggacaaattgccaaatcaaagtgaataaatatttaatgaaatggtgttgcatgattcagcgagtcagctctggaacatttggactcttagagagctgtttgtcgattacctttaatgtagtgtgtgggtggaaatggtgtgggatgaacatgtaccgaaagttgctgatgtccttaaagaagccctgttggtatttccagccagatggcccgtcgtgggggagagaaagtcctccgaaagcagcgggtgctttctgtcctgctggctgcctcttgggaggcccctaggacagatcaggtcctgtttcacccttcgcatgcctgtcagttcatccacgtgcatagcagtgggtgggggtgcactgtcgtttcattgccaacaaccacaggggacaaagtcctttgtggtcccacagctaggaggtggcagatccaggattcaaacccagacagtctgactgcagagacgctttgggcactctgccacattaccacctgtgttactgggaaaagggagaactgatgctgggaggaacagcgtgttcctacgccggcccggcatggcggggacatgtctgcagcagggagaggtggccgaggttcccagtggtttctggttgcaggagccctctgtctcccccattgtccgtggcttgcttagtatccccagtgatgccgtgtgtgcccctgtgccaggtttttcaccagctaatctcagtccctggtcgccacgagacacagctttcacagaccacaaatgcaattattacaaggcaatttcagttagatttggggctgggagagaaaacagaagggtctcctcctcccatcaggctccgaatcgttccccaggagcacttaactcagacaaatggggaagcagccgcgtggagcctccaccgtagagctgcctgcaggggaagtggccgacctgctgggccacgaagcagggtgcaggaaggatatggggagctagtgatcctctccaagggggcagggggactccattaaaccagatgttaacagcaagaagttggctataacaggggacgggcccattggtggataatgaaaatataacccttagtaggcacttgctatgtgccagttccaagcaatgtacagtcgtgtgtcacgtaacaatggggatacatgctgagaaacgtgtcgttaggtgattctgtcattgtgcgaacatcatggagtgcattacacgcctggatggcatagcctactacacacctaggctctgtggcgtgacctattactcctaggctacaaacccccctacagcatgtgaccatactgaatcctgtaggcggtggtaacacaatgggaagtatttgtgtatctaaacatacgtgaacatgttaatagagtacagtaaaaatatggtgggcatggtggctcatgcgtgtattcccagcaccttgggaggccaaggcgggaggatcacttgagcccaggagttccagaccagcgtgagcaacatagtgacaccccatctctactaaaaattaaaacattaggctgggcacggtggctcacgcctgtaattctggcactttgggaggctgaggcgggcagatcacctcaggtcaggagttcaaggccagcctggccaacatggtgaaacctggtctctactaaaaattaaaaaattagctgggcgtggtgttggacacctgtagtcccagctactcgagaggctgaggcgggagaatcgcttgaactcaggaggcagaggttgcagtgagctgagatcatgccactgcactccagcctgggagacagagtgagactccatctcaaaaaaaaaaaaaaaaagtggtttcaggtaagagtggatccccagggcctcaaaccagcatctctctatctctctatctcttgtatctctctatctcttctgtctctctgtctctatctttcccacctccgcatttttccatattgctttacacacacacacacagactcttccctcttggtggcaagatggctgccagcagcttcagttatgtatcccaccagttccaagccttgaggaagaagaccttctcttttctagtagctccctaaaaatcccagggctgactcgctgcagttggcccagcttgggtcacatgcctttgcctcaactaaccagtttgtgcatgatcaccaggggaatgcggtcctcatgggagtcaaggatttgcacacattcctggagtcaacagtcaaggtcagcccgtgcaacttaaataaggaagtgttggtgcccaaaggatgacagagccaggcaggtgaagcttccacctagtgctgggcacacaggaggcagtaagtgctctggcctttcagcagatgccagccctgctgcccaggggcagtcgccagccagctcattgtcaatggcctttcctggcctgccattaattcctcttaatctgcctgccaaattttcccacccccacgccagcccccagcttgcccctcctcttgtgctgtccttgcctcgaaagctcagcgaatccaagcttcccaggcaccagccacctgccacaatttgggctgggcttttaatcttggttttaattccagctcattctcttggctgtatctcccagcccaggagccccggggcccatgctaatttgcttctcccacctccactggtgccggaataaccatttttaaaagtgccttggggaaatataatcaaatgagagcaaaatctaatttggcactaaaagcctctgactgaagccctgttttctagggcctggtggagactgaataatacaccctttttgggtttttaagggttgggggttggagaaaggaaagagacgtgaaaggggagatgctagcagaggaaacagcttgcattaagctgacatccgtggcactgaaaagaatgggcaggaggaggacccccacccactccctatgaagaaattcatatcccagcagccaagccaagaagctaaactccagcattcatcagaaagaccttggcccaagtcttcaagaaccagtaggttcactggctggagatttggaagatgtgggagtgtagcgggaaacccagttccccagtggggagttcagtgaagcctttttctctgactttcagttcacttttctgcaaactgagggggtgaaaatctgtgcttcttaaatgacttgtgatctgggctcctttcagaatgtgtcaaaagctgtggacttgtttccaggaaaatgcacaaaaggcaaaatctggcatgcaatgttccaggagcggtacgaaccctgccactcctcatgacagtctccaggaccctatgggatctgtcccctcttccccgtgatgtcatttcctccctccctcactgtcccccttgggttctgcgatgcccccacgtttgtactggcttcagggactttgtacctgccaattccctctgcctggaacagttttcctcctatcccctctgactcttgctcttcagcccagcgaggcctctcacagcactgcgtggggccactctgtcctatcattctcctttattttcttcatcgcatttgtcatcattccccactagaacatcaactgcacgagggcagaagggatcctggtggtcttgttcactcctgtgattccagtgcctgggaagctccctgcataccgtaggtgtttaatcaacacttgccgaatggatacaggcatgcataccttccctagggcagtgggaccccaaattcagcaatttcgagtgccaccatcatgaggtgtaccatgcccaggtacactgattctgttaacattttaccctagattgtttcactctggacttcagttgtttcaaaaggaatcttttacatcactgacagtattgtttgccacgagtagaaagtgtcggggctctgtaggggtgtaacaaaaacgcaggtaataagagcgagatctggtataaagaaagtgattttttattccaaagctagcttaggggaagaagtacagtcttcctgccttaagggtactgctttgcttttaggagcagaaaggagttgctttttaaaagggggcctggcatgaatggcacacaggggaggaattgagtgctgggggggtccgcatatctcactcgagtacttcatctaccgggaagtcagctggcagccactggtgcctttgtgggtggaactaggttgtaagggtggccagaagctctccacctgggagggagtttcgcagcaggcatactttgggttgtagtggaccattgtctctcgaggcaacctcccagtgagtgagagttccgctccagagcctctaagcacgtgattagatgaacttgccctgaagagagtgtctggtgtaggggagataaaaggttataattgcatttctaaagggcgaagtggggcacggggaaaatggagaaaaaagaagaataaaaaataataaaactgccggacagggtggctcacacctgtaatcccagcactttgggaggctgagatgggtggatcacctgaggtcaggagttaaagaccaccttggccaacatggtgaaaccctatctctactaaaaatacaaaaattagccaggtgtggtggccatgcctgtaatcccagctactcaggaggctgaggcacaagaattacttgaacctgggaggcagaggttgcagtgagctgagattacaccactgccctccagactgggtgacaagagcaagactccatctcaaaaaataataataataataataaaactcatctttttcttagaaaaaatgggaataccgatttatgtgggggcttattaaattttaccctcttccttgttgaggtcctgagccgattaagaaatcagacccaagagtcagctgatgaaagtcaacactgcactctgatgaatctggtgaaggctgggtttgagggcatggcttccttctgagagcatttgggcttcctgactaaactccagagtgtgacagacttcccactgatgcaggtccacacctctcctccccgcgcagacaggacaagcctcctgaaaactagccctccccgggggcagctcagtccccagaggaaaagcaagggaagggattgggctatgcatgcccacttcggcccttcaaatccactaggcacatgctaggggtcagcaaaccacagccaatggacctaaccaggccctccatttgttttagtaaataaagttttattggaacatacccgcccacttgtttatgtcttgtctgtgacttcttttttttctttctaacaatagggtttagcagttgtcacagagaccctttgaccctctggcccacaaagcctaaaatactgactatctggcttttacaggaaaggtttggtgacctctgctgtatattgtccccctcggaggaggtacgggagagcatggagagaggccaggagtgttacagaagtggagcccccccgcatggagggcagcgttagaggtgggggtcaaggtcacaaggtttaggaaatcttgtttcctgaactacacttggtctccaggggccttcctggctctcacaatatggctccaaagacctgaggggtgagatgctggagggttggaccataggcaggtttatttaaataagatagggtttctcagcgacgtatggtggctcacatctgtagtcccagaactttgggaggccgaggcaggtggatcacttgaggtcaggagttcgagaccagcctggccaacatgatgaaacctcatctctactaaaaatacaaaaattagccgggcatcatggtgcacgcttgtagtcccagctactcgggatgctgaggcaggagaatcccttggacccaggaggcaaaggttgctgtgaggcgacatcacgccattgcactccagcctggaaaacagcgagaccctctctcaaaaaaaaaaaaaagaaaagaaaagaaaaggtttcttggattaggcgctgctgacattttgtcctggctcagtctttgtagcgtgggggctgtcacgtgcgtcggcgaatattgagcagcatccttggcctccacccaccagatatcaacagcacaccaagttgtgatgaaaccaaaaatgtctccagacattgccaagtgtctcctggggacagaaattaccccctttctggccaagagccactgctttgaggagctggatgcattgaggcatctccaacattccaggtcccagagaaagagaagtgcaggcctttagcttgcccgggaatctcatgctgcctccactccatcagttactccctgacacctagccagggacgcccagtcgctgtttaattaggcacccaccacctaattacatttcactctgtgaaaactggatatgactcagactcagagactgcagccggttccccgcctcctcctctgcagaacgccaggttcttcccgtttatttttgctccatcctcccacacaaagggaggttccatcccggaccttacccctgaggctgctgggggatcctcccttcctattttcacctcccctgtgtacccagacccttacaggaggtgtttcatcagctcctccctctggagcggtcacctcccggccctgcatgatgggcaagtcatttaatgaagtgctcccctttgccttgtattttgggggtttcagaatccagccgcttgggttcctaaggggttttcccactcctggaaagtgtcagccatctgccaggtcaccaggaaaaccgctgcagagggagccagctccatcacagctcccccagggccaggtggctctgtgctttctccaaggacactggtggataggttgtcctctcctctaggggcaccagagccccatcccacccactctcctccttcctctgggggttcacctccctggcctttctctcttcatcctggcttctcggccaagcactcacgtgcacaaggcccagcgctgagctgtctgttagcaagatctccttacatccctacaacctcctggaacgctcatattctgtgctctcagcaatactcgtcagaaatttcagaaccgcagtgtcctcatctagaaagagacgactagaataggattgctgtctctagactcaaattttcccatttcttaaatatggctttatagattataattattaaaaattatacatgcaagccagacacggtggctctcgcctgtcatctcagcaccttgggaggctgaggcaggcagatcgcttgagctcaggagttcaagaacagcctgtgcagcatggcgagaccccttctctacaaaaactacaaaaataagccaggcatggtggcatgcgcctgtagtcccagctactcgggaggatgaggtgggaggatcacttgagcctgggaggttgaggctgcagtgagccgtgatggtgccactacactccagcctgggtggcagagtgtgacgtgtctcaaagaaaaaaaaaatgtacatgcaaaataaaaacagaagaggatcatgaagaggtcttgtctgtctccttatcacagagcttttaggcacatccccttcctgatgaattagggtgattttctttaagctttgttgttgatgtaaagcgtgcatgtggaaaagtgcatggctcccaaatctccaggccaatgaggtgtcaccaactgaaccacctgctccagcaagaaatagaacaagatcatcacccgagaaactccccttgctgctcccagccaccctcccccagtctccaggatacccactgtttttattctaacatcatagattagtttggcctgttctcaaatttcacatagatgacgtcatatggcatgtattcttttgtatctggtttatctctcttaacattcttaggttgttgagatgcatccctgttcttgaatgtagcactaggtctttcgttcaagtttcaatgtagccttccgttctgtaaatatgcaacaatttctttacccatccttttgttgataaacatttcatttgtttctacctatttactattacaaatgtgctgtcatgtcttgtacctgagtttaggtgagtgtatgaatacttttctgttgggtaaatacccaagatttaaattgttgggtagaagttaccaatgcattcaaatttagcagacacagccaaagagttccccaccgtggttggaccggttggggcagccactcagtgtgtgagggctcaagttgtcccacatccccacccatactaggtgttgcccatttctttaatgttagccattctggttgctgtatagcagacagaatccaagggatccacaaacttcaatgggaaaaaaagtgacactctggttttcactaacctacagctgagacttagcatttgcttccaatatgagcataagccataaaccacagtatgttggcagaatctgtagctttgtcatctgtagaaatcaccagtatttaatatcccattgcagtttttgcagatactgcaaaatataatattttcactcataactattctgaaatgatcgctctctacaaggttttaaaagacacagtaggccaggtatggtggctcacgcctgtaatcccaacactttggtcaggagttcaagaccagcccggccaacatggtgaaaccctgtctctactaaaaatacaaaaaattagccaggcatggtggcagacgcctgtaatcccagctgaggattactcgggaggctgaggcaggagaattgcttgaaacctgggaggcagaggttgcaatgagccaagatcgtaccattgcactccagcctgggtaacagagcaagactccatctcaaaaataaaaaataaaagacacactgtatcgcaaatgtgtttagtattttgataaccgtatttccaaacaattgattttctctgtaatcctatatcttgtattcaatgcacgtaataacattggagaagggatccattgctctgtgtgccagagggctccatggcagagcaggtgtgcatgctcaggcctcggacacacaatagtttaataaacatcgtcaggcactttctcacgtggcctcctgatccatctccctccgcagctttcttcgggaagtatcttaatgaatacaacggctcctacgtgccacccggctggaaggagtgggtcggactccttaaaaactcccgcttttataactacacgctgtgtcggaacggggtgaaagagaagcacggctccgactactccaag

SEQ ID NO: 15831 - DNA, 96507 bp, Homo sapiens
gtgtcgagtgagtgtgcgtctgtgtgtcccggcgagggtgcgcgctcggcgccgggagcgcggccagccgagtccggaggcatcgggaggtcgagagccgccgggaccccagctctgcgttcactgccccgtccggagctggacttcggggccggggccggggccgtgcgccggggacaggcagggccgggtcgcgggccgcgcgtcccccaggccggaggtaaaagcgctagcgcgcggagggctcgaggagggcaccgcggctgggccccccgcgccccgggccccagccgtccgcggctcccggcccgacgctccccgccccggagcgcgcccgcctcccctgcgtggaggccggcgggcaggcgagcggggggcggtagcgccgtgccaaggggctggctggggcagcgtggccggccgggctggggcgatttaagagcggtccgggcggggtgcggagccggactttggctggggcggcgcgcggggagggggccgggggcggtggcggcggcgttggggggcggggaggaggcaggaggaggagcagcagcgctcgccgggggatgcagcagcggcagcggcggcggcggcggcggcagcggcagcggcggcgcggagtcccctgcgcccagcggcccggccgggctgcggcagaggcggcggcggcgccccgctccgggtgaggttgccggggccgtgcgcgctggtgagtggggcgtggggggcaggtgggtggctgggggacgcggggctcgggcgggggctcgcggcggccggagccttccccggcgtgagcccggccgcgagcgccgcccaggtgagccggggctggtccggaccgcccggctccagccccagcgctgcttgcggaggtgggtccgggcgggcgggagggaggctccggcgccggccgtccgcagagggatgacctgtttgaccccgctggctggcgggcgggcgaggacttcccgccgcgcccctgacccgcggacacggcacaccgagcacaggcggccccgggtaggggagcgcgcctgggccggccatccgcaggggcatggccttgttgacccttagggtttagacccaagggaccggtagatgccagcccacgtggggcttgtccgggcaggactcggggaagcagtgggccggatcttcagagtggttggaaactcgcagacaccgaaaggacaaacaggatcgaaaaggcagacttcctcccaggccagggcagaacgagtttccatcgcctggcggagggatgctcccctccccggctcctcggggtttcagaagtctagcggtgaattctaggagtgcacttttccaaacattccttatagtagttcgttcattcgttctacaagcatttctggagcaccccctcgtgccgggcaccgcgttctgttccagggaaacgcggctgaacaggatctggctcctgcgcgccagaagctgccggttcactgggagggcagcagggtagagagatgccgtctcggggtggaagatggaaagggaagcctgcaatcctagtttgcacactggcctcggtccgcaactcccccacctgcacgcagtaggcccagcacacagtaggaagagcaagccagacctgcctgtgacgaccctctcctcctcctcctcccccttgaaagctttgattcattccctgcccccctttctggaaagtcttcctgcagcttgttttaatcactttttgagttaaaagtcaatatttaattaaccaagtaattacattcagcttacgtttcaatctgggtatttgctcatctgtgcgtgttgggacacccgccctctcgcccctccatctgtcccctgcctgtttcccaccgggtccacccccacttttggggcagagaaggggaggctgcgctggagcaggttctcagggggagacagggagcaggagagacgggctttctctggaggacacccccggatctgcgcgctctccaaatttcagcttgtagtgaatagtgaaggtgatttcttgacagcctctgcctcccattacagaaccaccagagggttctaattaaattagagccaatcgttaagtataggaacggggtagggaggacagaacgaagggggccccttccctgtaagagatgttctccccagcttcgtctctcccacatcatagagaagagaaaactcatccagacagcctgtcggatgtgtaatttagcgttctaataagcagcttgaaaggcgaaggtggtgggcttggcagatggcatgttggacctttgtacatgaaggcctcttccttccccagctaaatttatatacataaaggccgtgatgttggcatcactgctgcagctgagggtcaatgtgggtttggggtttgggctttgtgtgtacttcttgggttttttatttgaatttatggctttttctgaaaccctaataacatgttaaattttcaaacttgagagtagagtgatgagttgactgtaaaagtctggtcttggaggaggacagcatagcagtgtgtgtgcatgcacgtgcatgtcccccagttcagctgctgtccaaagaacccagttgatatgcagtttcacacctgatttggacctgatttgggagataacatttccttctcactttttctggcactggttagtttatctgcttggacctgcctcaagagggcagctgggttaaccaggcagaatatcacccaactctgtcaagctttggccattatctgaccttagactttagtcctgcagaaggagtccagaagccctgtcctacagaaaaatatcagcatttctgaccagcttgtagttaaaagaaaaggtttagtccagacttaagataattggtaacacttaagtagttttgtatgggcctgatctgaggcattgatctaagcccttataccttactcattaaatccacacaaataccctgttaagtaagtactgccattgttgccatattaaagatgaggaaacaggcacagagaggattgtgacttgcctacagctggtcacaggtagagctgggattcaagaggccctcaagctccggggtccacttggaaccactggactctcctccatgaccttggcctttgtcccagatgtagaagaaacacatatgcaggggaagaaaacaccttcagacagtcaaactttgcaaagtaaaaggcccttaactttccataaacccccactgttccgacagagagtccgggtttgtatttgaggttttttgccccaaggaaaacatgtgtctgcctggtgctttttcttctgcttatgagcagacacactgtcccctcccccagtcaaaatgcaaagggaaacatcaaatgcagctgatggaaaagccaggtgaaccatggtgaagatttcagcccactcagagcacagtggccagagagcaaaagctctcctagaggtgagaccttcctgtggttggtgatggagtctcgatggcctggccctgggggtggtgccagggtgctctgtgtcaggcctgggcggatgtggaagatgggggcctctctcaatgctgatctgcaggtgagggggccctccctgaaacctgctttctctgggcctccttggaatgggccttggtggagatctacagacagccctggcccagccggattgaaggcactgtctaattgggagggcattaagatcgttataattaattggcatcccgataaatggcatggttgcctaattggggtggttgctagggaacgaggcctcacttggagcctaaaggggaagaagcgctgggctggccacagttgggtgtcagggtacagatccagcagtgaatggaccggaagggagagcagtccatccgtatctgctggtgtttactgagcagctgctgtgtgcaagttgcaaatggagtatcagttaggggtacttgcctagaagaactgtaaagtaatcaggttcctttctcttgcaagcaacggaaaaagagaagaaaaaaactcaagccagcttaaggagaaaagaagtggacttactggttttcataaccaaaagtcttaaggtgactaactctagcttcagacacagctggacccacagctcagattttgtaatgagaatccattcctatccaccgctcctctgccttccatgaggctgatgtctctccagctctggggcgggcagtccctggcagctgtgggcaccgtggctaggagagccagactgcctggctccctgcccagcagtgggatctggggcatgctacttaacctttctgtgccttgatgttcacatccaacaaatgatgatgatcatagcacctgtctcctgcttgtggtaagcatgaaatgagatgatcaatgtcaagtgcttagcagggcgtctgacccaggtgagccttcagtaggcattgactgttaccataacttaggtgtcaggacagatgtcatggagcagaggggtctcatcccctctggtttaagcccaaaaggaaagaacaagcctctgatctggcaatgcacacctgagccccatggttccctctgattggactgttttttgtccaaaccagtcactggctaaggaaatgagttgccaacaattggcttaagccaggctcacaggcctctccctggagctggatggaggctgactgctgagaccccaaagcctggaataaaacagcacggggagtccccagtgaaagggaagcccggttgctggagaggcagatggccagtgcctgcgatgatgggccactaatgtgagcaatgctggccagatggacccatcttcattttggccaaggtggagactggggaaacacgctgcctgggcaatgcctctcccttccaccagggccaggaggcatcaaaggcctgacttttctgccttactgtctgaaggatggggcctggccttgatcctgtgctttcggggggccaggggcagtgtttgtctaacctcccaccatgagaatcatctggctgtatttgtttaaaaaggcaaagaccagatcctgttgaatcaaacttctagggagggtcctggatgctggggggcatgaccaatatgtcatgtgtatattctatatcagcaggagggtttggcgaagagagctctggagcgtgggcctctttgtcttcctgcctaatgcaggggctgtcagaaggcggggaaaatgctctaggcctggcgtgctggctcatgcctataatcccagcactttgagaggccgaggtgggaggatcccttgaggtcaggagtttgagaccagcctggccaacatggcaaaaccctctctctactaaaaatacaaaaattagccaggtgtgatggtgcttgcctgtaattccagctacacaggaggctgaggcaccagaatcgcttgaacccaggagtcggaggttgcagtgagctgagatcgcactactgcactccagcctgggcaacaaagtgagactcagtctcaaaaaaaaatttaaaagaaaaatgactgcatgatgtgatggggtgggaggcaactttaggcaggctgtcagggaggcctctgtgaggatgtgacctttgaactgtgacctagattttaggaaggagtccgccttggaaagatctgggggaagagcatgccaggtagaaggaacagctagtgcaaaggcccagaggcggtgggaggggcctgtccaagacacctgccccaaacacaaatagaagtcaagtggggtaggccaggcgtggtggctcacgcctgaaatctcagcactttgggaggctgaggcagttagatcactggaggtcaggagttcaagaccagcctgaccaacacggtgaaacctcatctctgctaaaaatacaaacattagccaggtgtggtggcacgtgcctgtagtcccagctatttgggaggctgagacaggagaatcacttgaacccgggaggcaggggttgctgtgagccgggatcacacttctgcattccagcctgggcaacagagtcagactctgtctcaaaaaaaaaaaaaaaaaaagtcaactagggtagagggtcaggagtaagtgggggagggcacgtcagagatgagaaatacaggccatgctaagaaattttagactttattttaaataaaatggataactgtctggacgcggtggcttatgcctgtaatcgcaacactttgggaggccaaggcgggtggatcacctgaggtcaggagttcaagactagcctggccaacatggtgaaaccccatctctactaaaaatacaaaaattagccaggcacggtggcgcacacctgtaatcccagttactcgggaggctgcagcaggagaatcgtttgaacccaggaggtggaggttgcagtgagctgagattgtgccattgcactctagcctgagtgacagagcaagactccatctcaaaaataaattaaaaaataaaatggagaaccattggagggttttaagtcagagaatgatatgatttgtgtttcaagaagatcctgctggctcctgtgagaggcgtgctgtgcagatggaagtggtatcaccgggactgttaggcaacagagagggcccgagagtggcttggaccgtggtggtatcaatggagatggagtgaaatggggattggagatgtattttggaggtagggcccacaggacttcctagtggattggattacagagtgagggaaagggctttgattctcaaccgagggtgattttgacacccagaaaacattttaacactatccggagacagtataggttgtcccaactggggaagggttgctactggcatctagagggtagaggccagggatgctgcttaacctgcaatgtacgggatgaccccacagtgaaaaatgattcagcccaaatattcatgatgtatcctgccaaggagtcaaaggtgactaggcagcctggtgcgtggtgattgctaaatagggaagataggagagaaggttttggggaggaggagtgatctggaattccgacgtggaaatgttgggtttgagatgaaccccacctggatgtctgaaagctcagtgggtggtgaacgtggatgtctgcagccggtcggggctggcaacctaagtttgggagttatcggcatattgatgttattttaagctgtgggactggacacaattatccagagagaatgtgttttgttttctagtgtggttttctccccccagcctccccctagtgcctgtcatgaatctatttgatgaatatttttagcatatcccacatgctcacctctctgacatttccaagaagttcctgaaggctcgggctgagcctccccttcttcatcgcctggtttctcagtgattaacagacagagctaaatattcattgctctgccacagatgcccttgggaaattgcttaaggtcatgtgggatctcgggccttgtaggcagcacgatgccttctgggtggaacagctgttggcatggccttcagagcttctcctccagcccaggccagggcttcttggaattctctgtaaccagaatgttttgaattccccacgttctcttaatgtgattccaaagcacacgttgcccagtggccctggcctctgccatggagcgtcatcttacagaaggcctggcccactgctctgcacacctgggcccagcttgaatcttagataaattctatcccaaactcagagttgttatggccaggtcttgtgtgtgtaagttggtggacagggccatccccagggaccacaaatagtaccaaagatgtgtttggccatgtggaagccagatgtgttaggggaagaatgtggccaatagcttttcttattggctcatggtcaggaccccagcgggtgacttgacccaccccagtagccagagaagaggagcttttttgtttttgagacagggtcttgcactgtcatccaggctggagtgcagtggcacagtctcagttcactaccacctcaacctcccaagctcaagtgattctcccacctcagcctcccaagtaggtgggactataggcacaggccaccatacccagctaattttttttttttttttttggtagagatgagatcttgctatgttgcccaagctggtctcaaactcctgggctcaagtgaccctccaaaagtgctgggattacaggcgtgagccaccctgcctggcctggaactttttgaaaagagattgaaaaaactgttagctcacagaagccttggagatgttcctgcttggtgaaaatcagaccatctgaaagccacatttctggtctgctctcgagacagatactatccatagacttctgattgcaggccacttatctggatatttcagagaccaggaaagcctactataattcttagtagcttagagtcctgatcattttaatgtgaattgaaatggtttcattatgaggaatcacatttctgactgacagtggcttatgcaatagaaacatttaattctcacataacaccaagtccaaagcaggggagtccaggcgctggtttttcagtacaacagtgtcatccaaggtcccaggatctttcaagcctcttcttctgtcctcatcatgtctttggccttgttgcctcatagtctcaatatggctgccacagctccagacgtcgcatcaccctacaaagtgggactataggacaggactccttgctgtctctcttttaatcagagagtaaaatccttgccagaacactcccaccctagcagactttgctttctgtttcattggtccggagttgggttttgcactcacctctaaatcaaacactgggaaaggacctggctccttcctatgcttcggatctcagctgaaatgtcacctccctagaatgctggaaggacaacctgttttatgttttataacacttatcactctctggaattagcctggtttgcttatttgtcctttgtcttctctctcctcactaaaaagcaagctctgtgcttgtagggacattgtctgtcttgttcatcgctgtatccccagcactgagaaccagggtggcactctttggatactcagtaaatttttttttgaatgaaggaagcaagaaaagaaagaggcttggagagctacaggcacatctggctagcatgtttgctcgaaggtgactgctcagggcaaggatgtcaaaacctgttagtcatttgcaaaaagctaagcaggtggctgggaggattggtttcatacacactcacttgctccccagtgccagagctggggttttgtgctagcattgcttgcagaggaaggatcgtcccctttatgccacggcagggacctcacggccttgcagaagggctggtggaaccctccacttctgatgactctggggccaagctagtcttccaggtcagtggtgtgacattctaatgagggctcttgggttaaatatttctgcatgtgcccttgaaaagacaactcccttccctaaattgtcccttcctgaaagaacagcggtcacagcccaggagagcagcctctttaacctccactccccaacctaccctcctgaaagctcacatttaccgagcactttgtacaggctagtggtggtttaagtgcgcgctcctgtgaatgtggaataactcagcgatgtggggatcttccaaccccgttttacaaaggaggaaagagacacaacgaagtctctccttgctctgccatgctggtagaataggacatcacaggccacctaaccaggggctctgttcagctcgcagaaatgttttgtttgaaccttctaaaaagctgtcagatttgtaacaactacgagatttcacattttaaaaatctggattttcagcttctcctgaaaaatggggagatgtggtccccaccatcccctatagcctgacattgtgaaccaattcatttggcttttcattgcactttcccttctgtttttctcattgtggagcaatatttctctgttccatctctaccaaaagtggccagatgagagctggagaggaagtggggtgtggagttttcttatgcgtccacttcacccgtttacattatctgcctggcccacgtaggcatttgagtttgtctcccgttgtgacactttgtacccaatggctacacttccagggacattgcaagtgtccctggacacttacattgtgcattgcaagtgtgtagtaataataatgtctaatatctattgattactttttgcccagcatttcatcatcacagcaagcctttgaagcagggactaatatcatcttcactttatcagtaaggaaactgaggcactgtgtgtgatgccctcactagaacaggaggtcctgaagcttgttcatctttgtaccatctgtgctaggcttactggctgtttgaatgaatgactaaaggaatgaatgaatgatgttctcctccaagtgttcattagccgaagaggctgaaagtcttaacctcatagtcatttgtgacatttctgttgggggaatgggctctgatcagtgtcactgaggattcttgggttgtgtttctgctgtataacaaaccactccaaactcagtggtttaaggtaacaacattttattttggacgattctgtggtttgaccaggtggttcttcagcttcatgtgatatcagctggcaggtctaaaacaaccccattcaaatggctggcagctcttgctggtcaccagatgggagctcagttattctccatgtgggctctgccctatggctacttgggcttcctcgcagtatggcaggttcagggtagcctgacttctaagagtgcaaaaatgaaagctgccacggtctcttaaggcttaaccgcaaaaccggcacagcatcacttctgccaccttctcttggtcaaaacaggtcccaaagccagcccggtttcatgaggtggggcccacacaagggtttgaataccaggcagtgtggctttttggagtccaccaaagtacccattcatcacagactgcaagtagcagagcccaacacttactacctcaagctggaacaggatttactggggggctcaggaaaggacaggtcaggaactgaggaaattctggggaccttggcgcaggagttactagcagcctcctgaaggagagtttccatcccaatgcgacaaatgcacccctgctttttctttctgcccttgacactttatttgacagttggggacatggtaagaaagtctgattgaccttggtcacatgatcaccccttggcagagaggatgggggcatcttggcagaggggagggagtcctcaaaaggaagctggggtgctgtcaaaagaaggggaccagatggacaaaaattgttagaaatctctgcaccgcccctgcataggtgactccacccctggcagagcaatgaacattttaaaacgagtgaatggactttgaaagtccagtataagtagaatgcccaaacctgtgtggcagcttctccagctccagggccccatagctcaggtgctgctgggggtctggaagcttctctccactttacggggcaaagtcaactcctagaacccctgccatgcctcaatatccccctccagaagataggggcagtttgcttctggctcctgaaaggagagcatgcgcggtaatgagggacctgggctcaatgcctgcactccctcctcccagaccccgcctcaccagtgacactgccttccaccccaacacctggtgacacccagtgagtccccgcagcaggggaggctgctagtaggaaaaactgatccagactaatctcagctcgcagagcctctgacccgggctttcctcccacttgccggtctatttccggctgctaattagattgcacagcaagccacattgggaagccgacctgtcgttccaaaggcactccactcgcatctccaaatgtagcaggtgatttggtaaaagttgattctgactccttcccccagcttctaaaataattgtaagtgtcgggctgtttccaaggtgaactaatgaacagctcatctgctaatagcaggggcaagctggctgaggacggcacgctcgcctgtggattgggtgaaaaggaaagaagtaattggattattaataccaagccgtcaaaataccttttattccttttatattcttctggaaggaaacgacaatctctggaaacataaatacatgttctgtgggggtaagcagggctaagaaaatgtggggctgaaaaggaggagggggttaaaaaggtggaattgtcagtccccactgtggcagtctacactgagaaccagcccacagttaggcgtgaataatgactctgttcaagtcggactttattgcttttggccaaaggccttttgcagaaataactttgtaactccctgccagggaagcttttgtccacagctgagacaaaggaacaaagaacagaggtgggaatttctgtatctgatttctacttcctctaaacagccagaaaggacagcgggtgtggcctgcccagaaggcatgggctggggcaaaggggtgtccagcctcctgtgggccacactgccgtgctcggctgcaccatgttggtttcattgtgcacattcccaccccagggcctttgcacttacttcctccgttcatagaaagcattttgcccacaactggcttctcgcccgcctctgctctcagctcagatgccatttccttatgccacctcctcatgccagagaggcctttcccaatttactgtccatcctatcacctgacagcttcctccaaagctcttaagacaatcttcattcattcattttctcctccaccaaggtatcacagctccatgaggacagaggcctggcctgccttgtggccactgctgtttcttagcatgtggcacatagtaggtgctcaggaaagattggatagcttggaagagtcgcacatagctcccaggccaagctccagcggggctttatggagcccgctcagtgcttaaaataggttgaaagtttttactttggaaatggtgtttccggtgtagtccaggcgccaccccatctctatcctaaatctaggccactttactcactcaggtctcctgcccgacccttggatgcatttgcatatttgtccctgctttagacaaaggccactgcaaacatatctctctccaaaggtcaccagacaacatccagacttcttgcattgccaagtcttgtgccagaccggtggcctccaccaaccaggtcccattgactggatcaaggtgtagtcttcatcttagccgtccacgcacagggcgtaagtggcgttgatctcatcataagcaggtcatggcaggaggagggtcgggcaggagacctgagtgagtgaagtggcctagattcaggataagagacggggtagggcctggactacattggaaatgccatttccaacgtaaaaacctttaacttttcctttttccccttttccttttctgctctcctccaagcctctgggtcatcaaggagggaatcgcgtgaactcctcctttatggtcttcaaggagacctactcccaatgtaaggggaagcgcagaggccttggcaagcaagaatgtaaccacaatgtcattgcctttatactgttgccatctaagtatggcaggggttctcacctaggggcagttttgccccctagggggacatttggcagtgtctggagatatttttgattgtcacaactggggtaggtgctacttgcatctcatggacagaggcctgtgaacaccctgtgatacacagcacagtcccccatcgaagaatgatcctgcccacgcggcagtaatgccaaggttgagagacccaggtttatggcaatgggtgctggttcctccaagatagacttttctttctaaataaatttattgaaataagaaagggaatgaatgaatgaatttaggcccagatttgggtattctacttataccagacttttaaaaattcatttatttattctgagacgctggcatatgggatggagcacagaggttaacgatcagccctgtcatccctttcggagcagatcaggctgtaccatttgcctcaaatcaggagcccctgccctggaagctgccatcttgccagaaacttcctggggagctgcctgtaaaaaactctagcagcagttgattctggcccaggtggaaaagctgtgttatcccaggcggagttccggcaggttgggagatgtttccaggtctcctgcccagccaggcatgatgagcatccttccaagcttggccccggagccctggcccagcacccccatttgaagcctgcagagcctcatcatcactgcccccgcccccgccccatcctgccactgacaagccaatacctgcctgatgagaggggctcccagggacagcagccttccctcctggactccagggcaacctccatgttgttgggcggctttgagcacagggctcaagggcagaggctgagttggaaaatttcttgcctctgcagaagggaagagctgggggaggttggggcctttttccccaaacgaggtcttattcttctgtggggttttctgggtttgttaggtggcttcctttctacttaaaaataagctgggagtggttaaaaaatgggaagaaatcaatgtttctggcgtacatagaactgagcagatgtgttatctagaataaggaggagaggttgttgtgactctagctcctggtacgagcccttcagttcaccctcctgccctgctcagaaccccctggacctgacatcgtggctttaacacccttgggtcatgtgagaaggaagagtgcccacccaggactttccgaggctcacagattctttgaaatggacgtgagcacaaacgcccagccccgacagccagggatcagatcgggtttcacttcctaggagggaggatgtactgcaggggaggcccacgtggctgccccaggcctggccagcctctgtgacccagcaggactgactgttttacgggatggccacacggtaccctgcaggctcatccatggtgggaccttgatgctcctttgttgagatgtgggtctgtgtcccctccccttgaatctggccagacgtgcgtagccctggtggaaggaacaccatgggacagcagaaaagatgagccagctccccctggatcactgggaccctcgctgttgtgtaagaaatcagaccccactgcaaggccgccatgctgtgaggaagcccaagccacactgaggccacatggaggtgcccactccgcagcccctcccaagctcccaaccgactgccagcaacaactgccagacaagccaaggccctgctgagccttctcagcagtggcctcagacgttacaaagcagagaccagcccttcctgccatgtcctgcgcaagttcctgatcaggagcctctgagaataaaagaaagattttaattcaccactaagttttgcggtaaattgttacacagtattagtaactggagcattcagccaattccagtcttcccaccgtgcagttattcattcattcactgaacaatattcagaaaccgtccacctcttgccccttctttgctcccacctagtcatctcagtggcctccctgtgcctaccctcatgccctgcagtctgttcccctcacatagtcagaaggattctgttaaaacttacatcagggctgggcatggtggctcatgcttgtaatcccagctctttgggaggctgaggtgagaggattgtttgagtccaggagttcaacaccagcctgggcaacatagcaagacctcatctctaccaaaaatttaaaaagtaatcgggcatggttgtcctcacctgcagtcccagctgcttgggaggctgaggtgggaggattgcctgagcctgggaaatggaggttgcagtgagctatgttcgtgccgctgcactccagcctgggcgacagagcaggactctgtctcaaaaaaaaaaaaaaaaaaaaaaaaactacaccagatcacatcacccgcaagctagaaccccccagcccccttcactcagctccgtgccgccatgcgtgccccctttccggccctccctcaggcatcttcctacctcaggacagttgcgctttctgttccctgtgcctaggatgctcttcccctaaatatccacaaggcatgttccctcccctcctgcagggatccacccaactgtcatctctcaggccttcgctacccaacctatttaaagttacaccccctcactccctagcactccaacctccctccttaggacttgatctccttgggacacgttgcctcatatgttgtgtaatttattttggtgtctgatccatgaaggattgtttttcctgattcccagcactgaagaatagggccgggaacatagtaggtgctcaggaaatctcggctgcctatctggaagaattagcacctcggctctgccaggagctggggccgtggcgtcaggcaaccaagagacagcccctgcccatgcgagcttctggtggagggatgcccctctacaaaataaaaacccaggccaggtgcagcggttcacgcctgtaatcccagcacattgggaggccaaggtgggcagatcacttgaggtcaggagtttgagaccagcctggccaacatggtgaaaccctgtctctactaaaaaaaaaaaaaaaaaatacaaaaattaggcaggtgtggccgggcgcggtggctcacgcctgtagtcccagcactttgggaagccgaggcgggtggatcacaaggtcaggaaattgagaccattctggctaacacagtgaaagcccgtctctactaaaaatacaaaaaaattagcgggcgtggtggtgggcacctgtagttccagctactcaggaggcggaggcaggagaatcacttgaacccaggaggtggaggtatgcagtgagctgagatcacgctactgcactccagcctgggcgacagagtgaaactccgtctcaaaaaaaaaatgaggcaggcatggtggcgggtgcctgtaatcccagctactcaggaggctgaggcaggagaatcacttgaacctgggaggtggaggttgcagtgagccaaggtcatgccactgtactccagcctggatgtcagaggagactccatctcaaaaaaaaaaaaaaaaacacgcacacaaacacaaactcaggccagagagtaaatagaggaatcacaagttatgataagtgctctgaagagagcagtgctgggactgggggtgggggtgaccgagcagggcctgcttcagggacagagggccagggaaggcccaagtcacagccagggtggccgagtcaggtccagaatttgtgattcccacacccacgttccttccgcttttccacactaccttctcttatcagttgtcaaagaaggatgggcgagttggccctcagtaaggcggagagttgggcacaggccaaggaggcctagcgtgggctggtaggccgtgccctgaggcctctgttcacacaggcacgaggtggccaggaagccacgggagtcagccctctgcctccagcccgccccccaatttgggttcatttggttgcaagtgagagagcaactaggaatgacctaattgaaaaaagggaatttcacttctgatcttgaagagtcaaaagtatggggaaactgacctacaaagaaaacagaaactagttaaagaggaatttattgggcctgaaacaaagaacccaacccaaatcttcctctttcaggctgggctggatcccaggtgtccagtgctgttaagtcccaagtatggtgcatttcacagcactgctgtgttcggtgtgttggcttcattcccgaccccactcaagacaaagtggcgtcgctgtcttccctggtcctcacattggaaccacatggagtgagttagccagttgtaaagactggatgcctcttcctgaccagtcaggccaaagggcctggattactctggcccgtcactgaggcaaggggtggggaggctctgattggcccaggtctaggatcccacgatctagcattgtagctccagaactggagcctaatttgaactttgtggaccaagggtggggagaaaaggatcccccaatattttttttttttttttgagacagagtcttgctctgtcgcctaggctggagtgcagtggcgtgatctcagctcaattctcctgccttggcctcccgagtaactgagattacaggcacatgtcaccacacctggctaatttttgttgtttttgagacacggtcttgctctgtcacccaggctggagtgcagtagcgcaatctcggctcactgcaagctctgcctcctgggttcacgccattctcctgcctcagccttccaagtagctaggactacaggcatgtgccaccacacccagctaattttttatttttagtagagatggggtttcaccgcattaaccaggatggtctcgatctgacctcatgatccacctgccgcagcctcccaaagtgctgggataacaggcgtgagccactgtgcccagcctaatttttgtagttttagtagagatggggtttcaccatgttggctaagctgatctcaaactctggacctcaaatgatccacctgccttggcctcccaaagtgctgggattacaggtgtaagccgccacacccggcctcagactcccaagaaaattgggagctgttatagaaaggagataatcctgggtggcccaaacctagcagagaacacaagccagcatttattgggcacttgctgcatacagatctgttgaaagtctccgtgcatgttaaaccatccactctgtaggcaagtgcttgtaggtgtcctcactttccagatgaagtcactgagaagacaagaggttcagacacttgcccaacctctagtaagtgacggagctgagatccaaacccaggcaggctagctctagatcctaccctcctcctactcagcgtgttccctgtggcattttcccccaagtaagtatcaggctgtttgcttacctctgtccgctgtttgtcagctctctgagaatcgagagttttgtctgttctttttttttttttctactgatcatgaaacagtacaaagcaagtggcagatgctcaggtatttgagggtgtgaattatatggcctgtcaaacatctacccacttgacatacaaaacattttggtgctcagcttcctaagacttgaatacattgtttctaaatttcctttgtgctctaactttaatccatggccactctgttctcacagcttgccggtggtttgccattatttccagtcctcttttctgatcattctcacatgtagctggaatctttcaactccagcttttcctatgttgacttagagtatcacttccaggagggcagggagctttcttttcactgctttatccacagtgccaagaactgtgcctggcacacacgagccttcaggaatgtcttgttacatcaatagttaggcaggtaactgggttcctaagccctgcatttttgccctacaatctttatgccctaatttcctttccagatcctgagcctttgtcttgaaacctgatctttccctcctccctctgaatgacccttctattgtctcctgccctgttcttgagagccggcttggttctctgcctccatttggaattccaagaacaggcaaggagagccacaagatggcctgggctaggtaggggagacagggagaagctgtggcccataggttacaggagcttctgtcctttctttgacggccccaaagaggaggagagaaggctggagaaagcctgtagccaggaagaaagggagacacaggggagtgtaaagtttaacagatgtgcgtgtgtcatcccctgtctagacagcttctgggcttgtgaggtttgggaccacactttcccatccctccaggggcctctctctgtttcctctgcctgctctttgcccaaactgtttctcctgcctgaagcatcctgtcctccaccctcctcttcactggccatccaaatcctttggattcttcagaactttgctcctgttaggctgctcagtttatgctaagtactcctccaggaagccctccctgactgctcccaggccagcagtttcccctttcctcttgctgtttatacaacacacttaacctcagtcccttgtatcacttgttgctttccaagtcagcataagtgtcaaaagagtaggctctggggtcagaatgtctgtgtgcaaatagccatgctggcttgcttgttttgtctgtcacttggaggtggcacatccaagtgaacctcccaggggacagggaagagtggattactgttgtaatcgggcaggattctcctatcactgaacactgcctcacatatagcaggcccttaataaatatttgtaaagtaaatgaaggaagagagaaatgatcaggctccctggaccacctgaggaggccctcaggtctgttgctgggctctggccccagcccgtgggacatatctgcacacccacaatttcctttcttccctcctctcatgagtgtttcccgtctgaccaatgccgccttctgcctctggccccttcttcctctcccaccacctcaactgcctaattattaccaaacttctctctcctgtttttttttttttgttttgttttgtttttttttaaggcagtgtcgctctgtcacccaggctggagtacagtggctcgatctcggctcactgcaggctccacctctgagttcacgctattctcctgcctcagcctcccaagtagctgggactacaggcgcccgccaccacgcccagctaatttttttgtattttttttagtagagacggggtttcaccgtgttacccaggatggtctcgatctcctgacctcgtgatccgcccgccttggcctcccaaagtgctgggattacagacgtgagctgccgcgcccagccctctctcctcctcttgttggatttggaggtggagagaagatgggaagggaggaccaaagggacagtattcagcacccatgctgcacgacactgggcaggttctggaacctgtccgtgccttatcttccttgtctgtaaatggagcatcccaactcacaaggtggttgtaagggtggcgtgaggtcacacactaaaagtgcttagaattgtgcagggcccctgatgttagctatcattcattattgttcttctagggtgtttcctgtgttggtctgggtgctccctgttgcaaatgacagccctaattcggactctcttaagcagcaaagggcacttttttgagtctgtacctggctacaagatgcaacttggtccaccccattgtcaccagcatcctctctctcgggctccatccaatgggcggccaccatcagcaccatattcatgcctcctggcacccagcacagtctcctccagcctccaggactccctctcgcttattggccagacttgggtcacatgtctgccccaggaccaatcgctgaagctagagctggaattgctgattggctccacctggctcacatgcgctgccctgcagtcaaaccatatataagggggggtgggaaataagagcacttgtggcctcaaagcactaacaggggctgttaccaggagacaggagataattctttgttaagccagtaaatattttgaatgcctgctatgccgcaagcattgttttaattgttgaggatatagatctgaacaaaaatgacaaaaacctgtaccttcagggggctgatattctgctggaggacatccgcaaagaaataaaggagctagctgtgagaggtggtaagtgctactggggagggcagagatttcggttttaacctgccaaggtgaaatttgagcaaagacctgaggagggggaagaagggatggtgaagataacctgaatgaaggctccaggcagagggagcagcaagttcaagggccctggggtgggctgtgctagcatgtgcaaggaacagtacagagaccgtgtggctggaaccaggtgtgcaagggagagaggggaaggcaataaggtcggagaggtgatggagcaggttgggtgggttcttgtagcccctttggagggtttttgcgttttactctgcgtgggatggaagttattgaaggccgttcagtggaggaaggcaggcccttgcttttgttttaacaggatctgtctggctgcttgatggaagggacgaggtagaagcagggaaaccagttaggaggctgttggaatccaggcaggattctcctatcactgaacactgtgcctcataggaggtccttcatacgtatttgtaaagtgaaagaaggaagagagagaaatgatcaggttctctggaccacctggggaggccgctaggtctgttgcggggctctggccccagcccgtgggacgtatctgcacacccacagtttgctttcttcccgcctttcatggacatttaccatctgaccagtgcctccttctgcctctggccccttcttcctctcccaccacctcagctgcctgattgttcccaaacttctctctcctcctcttgttggatttggagatcctcagaggaaaacagcccatctgggtctttctaaacaggtctggatgaggtcccaggtgtttgttcaccgctgtggtttgtggcattgggaaggtgagggcatcagtcactcagacccgttcctcttggcagatcggcagagaaattgagaactaaaaatgatgtttctaaatgctcaggacgttagctgtttccagagatgtctcctgggctggcgagcctttgccaaggtcctggagaagactcaggatggagaggaggagccagagagacctggaaaggaactggtgggaaggagaggtgttgtccacagcagggatggagtggcaggcggctggtgctgcgtgagttcactgggtgctctctcggttcagccactttgaatattttaccaagaaaaaggaaaaaaaacaaggcagaatcccttgtgtcatctttaattgatttcttcagcatccggagagaaactggcatgaggccacgagaagtctgagccaggggaattcatcagaaatcgacccactgatgacttgatctgatgaaataattagctcctgttattctctggcttctggtgccggagctttgacttccatccagaggagagcgggtgatagccgcccaggagtggggggtgctctgaaaccaacatgggagccaggaacgaagtccagctgactgtgccccgggctccatctttacccagcccagggctcccaatgaagactgcccttcccagcccccctgtaccctggcatcacaggcccagggccaaaaaggccctcagagggcacctggccacctggcaaatgaggaaactgaggctgggagactcttaggaacttgttcaaagatctgcttctagggggtcctggttgagctgcccaaatcgggccagactaggtttgaaccccttctctgccacttacccatatgatcgggggaaagtgattttaactctctgtgcctcagcttcttcatccataaaatgggtgaaatattgatgggtgggtgtgcatattaattgggttgacacctgcaaacagctcagagcagagactggagtgtgctgcaagctttcagaaaggttttcctgtgattggtttctggtttcagagagttgctatttgtagggcaccccatcggaattctcccaatattagcactccacgtctgtctctctgaaggaacgtgaatgtgcatcttagaacgctggctgctgcaatcgtagtttcaagtgcaaagcatcccgtagtgtttcccgatggagggacatgggccactgataatgtattagtctgttttcacgctgctgataaagacatacccgagactgggtaatttaaaagaaaaagatttaatggactcattgttccatgtggctggggaggccttacaatcatggtggaaggtgaaaggcacgtcttatgtgatggcagacaaaagaagatgagaaccaagcaaaaggggaaaccctttataaaaccgtcagatctcatgagacttattcactaccatgagaacagtatgggggaaccacccccatgattcaattatctcccaccaggtccctcccacaacacgtgggaattatgggcgctacaagtcaagatgagatttgggtgaggacacagccaaaccatatcagatacacaacatagtttgaggattactctgatttggggtggttcagggactgattcgatggctagagtttgtctccttttcagctgtctggcagcctccagttacctccagcagaaagtctcagatggtgctaatgtgctttgactcctttcaacacctgctaatctcacttcaaaagagagtgcgagcgcgagggcacgcgaagcctgggaagctatttgcatcaagttccactgattcagctttctttgacttttatttgtacaattagctctacagggaagcgatgtccactttccatttatctttgggtaggaagttttcttttcccaaaacatgtgtttgtgtttttattttaaaatgaggccatttaaagaagcacgttaagcaaataatcactgaagggctctgcagattcagcagaaatcagggccgtggtccttgaacggaaagagttgggaaatccgagtttcgtgatgagaagcccacattgaacggtgagggagggcagaattcacatcccatccctgccatcttctgtctgggtggccttaggacagtaatgaaacctcagttttctctggggctaataatagtacttgcaggagggagccttggtggaggttgaaggagatttcagagtgcctgacgcaggacagctgcagcggtaggatcactctaataatggtttacattgtggaatatgtatcccagttagtactatggccaggctctagtcccagcacactgtatcaacacatttaatcctgcacacccatttcacagatgaggaaactgaggcacaaaggtgttaagttactagctcagggtctttcagcaagtaactccaaagtccacatccttaaccatcacaccacgtggcataaagcaggtgcccagcaggcagttgccgcagtggctctggctgtcatgaggtgtatgtttctgcagacgagagattgagaaggaaggtgttgttcaccctctggtcccatgaaactcacagttctcatgtcagacgactgcatcgagtgtgtccccagctcccctgaaattgtgactctcagagccacctgggaaggaggcattgagcggagcctgcttcctgctcccaggggaggtgctagaagggagacttgctgtcctggccagcctgacataggatacaggtccctgaatgaagtaaattagggtgcgcatcagggcagctgggagagttgattgaaagcactgttttcagaggcaggtgggcaaagggagcaaagaaatgatgctgcaccgaggaaccggtagcaacaggagcccttactttcccgagacttgatggggcaagaggagggagaggtgaactcagaactggggagacgctagagccaggaggggccccaggcaggagctgcatccacacacacagacacgaaggctactgcctggggagctactgcgtgcgggaggagaataaatgcacggacttcccaccacctcccatgctgcagcctcccagccggaagccagagagcagggacgtgccgaccgtgccatctgtagagctcagcctcccagggtgccaagcagagctgggggagaaatggagcaggagtgacccttcctggggtttttcaaccatagcgctgcccagagaacacagtggccagctcctcgttggtgtccatggagggtggctggggcaaggcatcagtgatggacgcctctgagccatgtagacccaagctatggcacggccctgccaagtccagcttccctcactctgcagaactcaaaggaccttagcagaacctccgttcctttatttatctatttctttgtgccaaggcctggagacagccatgaataacataagcctgtctctgtcctcagggagctgaccccctagtggggaagaattggacaataaataagaaattgcaggctgcagtagtgattacaagagaaataaaaccggttataaaatgcagagtgcctgggttgggggcccccgctttaaatagggtggccagggcaggcctctctgaggtgatgacgtttgttcttttgacagaaagagccaggagtacaaagcaggagtttgttgttgttgttgttgtttttgagacggagtctcactctgtcacccaggctggagtgcaatgacatgatctcggctcactgcaacctccatttcccaggttcaagcgattctcctgcctcagcctcccgagtagctgggattacaggcatgtgccaccatgcccagctaatttgcgtatttttagtagagatggggtttcaccatgttgatcaggctggtctcgaactcctgacctcaggtgatccacctgcctcagcctgccaaagtgctggaattacagatgtgagccactgcgcacagctgcgggagttatttttaaaagagcaggtgcaaagaccctggggcaaagagaagcttgacttgtccattcgacagaaagaagccagtagggctggaaaggagaggtcgaggagaagtgggcaggggccagatctcacgggccagggcagccctggcaagaagtttgcatcttatcctgtgagccatgagcagccagggaaggtgcggcaggtgagcacaggactggcactaaggtgaggcgagtgcctggcacttgtgcagcctgggagcgagcacccccttcagtctgtacctgcacgaggcactgtgccctcccctgcccagtgctgtgatctgatctgtattttaggaagattcctccggctgccctgggaaaatggaggatgggggcagggaagagggaggcgggagacccctcaggccaccttgcagtccccaggagagatgaagcaggcagcacatccccctgctgaacccggagaccttgctgagcctctgagtcatgactttgagctgatggctggggttccccatgaagggcaaggacaaacagaccctttcaaggtcacagcaacacagccacccccacagcacttggcttcctcccggcacatctgcaggctgtggctctctcgctcatgctctcttgttttaaataaatgataccaaaagtctatatctggacaggacttgaaggctcatttcctcaagaagtgaaaaaatgaccacggagagcaaagagcagggcgagattagagacctgcttgagccagagtcgcgtccccacctccccgcacccaccttcgctggtgacctagtctgacctggggccaggggggtgactgagggcacagtggcctgtggcaggtcttccccctccaccttttagcgctcaattttctctattgtcatttcatttattctgcaacttaaaactaataggctgggcacagtggctcacacctataaccccagcactttgggaggccagggcaggtggatcacctgagttcaggagttcaagaccagcctggccaacatggtgaaaccccatctctaccaaaaatacaaaaaattagccgggcgtggtggcaggcgcctgtaatcccagcttctctagaggctgaggcaggagaatcgcttgaacaccaggaggcagaggtcgcagtgagcccagatggcgtcattgcactccagcctgagcaacaagagcaaaactctgtctgggaaaaaaaaaaaaaaaaaaaaaggaatacttttttgcccaactacaagatcccttaacaaggggctttcacacgcatccccagcagactgaaatcttacaacagccctgtctactcattttgttcatggggaaaccgaggttccaaacgggcttgctcacgggaaaactgagccagtgagtggaagatctgccactcacacatgccagttgtccagcccaaaacatccagctccaggctctcgtttaaacccctgattgaatcccccgctgctggggagctggaacttcatctccctcacctctgtaccccacggtgcgggcagatgcaagaggacggcaaatattcaccccttgagaccagcccgctgctgttcctctccctggggacgatttgtctgtggagttgggtggattattcagagacggctgttatctgactcgggtcttgggctgccaccgacacatcagaggctcactggatccagggaagaaattgtttctgcagaagtggccacagaaggcttttctgccagtctgttgaccaagcaaactgtaaagactttgctaacttcagcggagttcggttttcactctgccatagccacccctgttcaaagaaactcccattgttcatgccagccgccatacaaatcattatgcaagaatgagcagccggcagccttgacataaatattgacctgattcttcctcctcctctagatctgcgagtgaagagggacgagggaaaagaaacaaagccacagacgcaacttgagactcccgcatcccaaaagaagcaccagatcagcaaaaaaagaagatgggccccccgagcctcgtgctgtgcttgctgtccgcaactgtgttctccctgctgggtggaagctcggccttcctgtcgcaccaccgcctgaaaggcaggtttcagagggaccgcaggaacatccgccccaacatcatcctggtgctgacggacgaccaggatgtggagctgggtaagcctcggggccccagggtggcacctcggcccctcggagcagggtccctgggttaggctgaggctcctgaggcaaggcggtggtgttgatgcgtcgtgctcacttttgagtacattgaaaccaagacacgggccacccacacgtgtttggggtcacaactgggtcctcaaggttaggggtctctacccttctccagttgcacaaccgttcctggatttctccaaagagttaaagagaacaggctgggcgctatggctcatgcttgtaatcccagcacgttgggaggccgaggcaggtggatcacctgaagtcaggggttcgagaccagcctggccaacgtggtgaaaccccgtctttactaaaactacagaaatgagccaggcatgatggcgcacacctgtaaccccagctactgaggagactggggcacaagaatcacttgaatccaggagaaggaggttgcagtgagtggaggtcatgccactacactccagcctgggtgacagagtgagactctgtctcaaaaaaaaaaaaaaaagatgagacatgagcctggagccaaattttggaggctcttgtgggttgtggcaaagactgtcaatcattgatcccgtgaagggtgatccctcagcctctgtccactcttaaaggataacagcgtgttgttggtggcaacaaatgtgaaggttgactaggttagccttgacaacctgaatttgtcttttagctaccaggaaaaggcaatttacataaaaccaagttgttccttgcaatgctttgtattaatgatcacaagtatagtttttttcctccgggagcttctcagtgcagaaagaatttgtagccaggaagcaatcagagcccagagcttttattgacaatttgacacataggatacctatctcctggcagcatttagaatgaggcgcatttgataactatggggagtctgcagactgtggccagagaggtgtgtttcgtttcttgaagaattttgcagaggggtcttgcaggcagcacctggacctcagagcttcttggtctcacattgtgtagccccgacgctgtttcggctatagtcatgcttagaatttccgatgccctgcacgtttgttcattcatccagcagatgtttattacgcatttgttgcattcagtgcactgtgtcaggagccagagaactaagggaggctcattccaggtgaggagaacaggaaattcaaagatactgagatagaaatgggctcggtggtttggagcaaaaaaaaaaagtgccagggagccggagtggagggagctggggccgtgatggagagagatgaagctgaggagctgacttggcccgggttgcaccaggccttgtggccatggtgggggctttgagtttgattcttagtaaaatagacatggatgagggggccttaagaagaggaaggccgtgacctcacttaggttctaacaggatcccccagctcttttgatgaaattaaatcgcaggggtaagggcagaaacaggacactcattcagaggccgatggggtgatagggcagtgatgatggaagctcagacccgggtgctgagatgcggtcccacctgatgtatatttgggaaataaactgatcaatgggttaggtatgtgggttatggaaaagatacgtttcaagggcagccgctagatttggggcccgaatcaacaggtgagtggctgaatacccactcttaggaacaacacatttttgcaacatgatccagctaagtctcatgtctgaatctgactgaattttgcatctgtgacttgtgaataaaaccaacagtgtatgcagataaaaagaaagcaaaggcatatgcagatataaggaaaccaacagcgtatgcagatacaaggaaaccaatagcaggtatgaagtagacacaggagagaggggaacaaagaaagccgtggctgacttaaaatacagagatttcttctctccatttgacagatggaaaaactgaggcagagagaagtcacttgtccaagtttgcacagctagaatgtgattaaacatgatttgagctgggtgcagtggctcacgcctgtaatcccagcattttgggagcctgaggatcacttgaggccaggagttcgagaccagcctgggcaacatagtgagaccccccccgtcttaacaaaaaatgtaaaaatcagccaaggatggtggcacacacctgtagtagcagctaatgggaggctgaggtggaggatcacttgagcccaagaggtcaaggctgcagtgagcctaggtcacaccactgttctctagcctgggcaatagaacaaaaccccatcttagaaaaaaagagaaaaacaagatttgaacccagaacgcgtgatcttagccactgctctatttagccagattcctgggatggatattgagttgttttcagattggtagcgtgtgcgtttgttagtttttcactgttacggatattgttgctggaaatttaaacaggcatcgttgcacagacaagggagtgcttctgaaggataaattctaggaggtggatgcggtgggtttagagcccctggtgttcagtggcctgtgtcagctcttgcccaatagcactacacagcatagattagggcctacaagtcttgccctctataaacaagccagacctcttccaccagcagcactgggttttgaaggaggcaagggatgggaaggtggttgtgggaggggcatgataggctttttataaaccactagacagacccagatcaataatgcatgtcccaaaaaagcccaatacattatctcacagtctctgctacaactggcatgcagcgggtggtcctaaaaaatttatcatttgctattttctgcccatccgtgcagcagttctgacagccctctgggctggagacttcttgactgagataatcccaggattctttccagtcccaggacagagaacagacgtccatcctcattagggtccggttgggaggactggtgccagatacacaagacgaggggcttgttctgtttcctaattgcaaggttggggggttcggggctgtaccacgtatattcaattttcctttccctgcacgcatttgactccctaagctgtcatttggaattatcaaatgcccaggggaactgcttccagggccatactagttcgtaagtggcctaaattatcattacatgtttaaagtagttggggacatccctgtgtctcaatggccctctgagaccaacggacttttgctggacttccgctccaaaagaataagagggaagcacatggaggtaaaggtctcgtttgcagacgtcctttgttcagggaggcagtagaatctttgggctctgccagggtttactgatttaatttgatctaaacctctggggagcctctggggctccagcaggctctgagacagcaagaggattaagacatggttctggcctggagcaagagaatttttgcagcatcccagttctgatctatgacttgagaatttctttaactggacttatttttgaagcttaaatattattttaaaaggaacctccaaattctgactgtaaaggaaaaaaccaatacccattgccttcggcaaaggatcactgtaaaaccaaacacagtgaaaaccaagtcgtgtttttaaatttcagcaagatgctgcctcccagaaagccagtgtgtctctactgtaatgagggtgacgggcagtttcagaagcggcattaaaggtgaagtagcacctgccaagactttcttcttggcctcatcagcaggatagagactagaaaagagaagaactttctcaagcttttgatgtgggggtcccacttacatggggaccacttggtggtggctcttgtatcagagggttaaggacacagccagactccaaaccccagaatatcagagcggattccccagtgctcattttcctgagtgttcacaccaggcagagatgggtgccttttcgaggcccctcagattgtcggatttgaagtgtgccccacgagactgcatccagtgtttgcatttcttttcttttctttctttttttttttttttttttttgagagagtctcactctgtcacccaggctggagtacagtggcgcaatctcggctcactgcaacctctgcctcctgggttcacgtgattctcctgcctcagcctcccaagtagctggaattacaggtgcccgctaccacacccagctaatttttgtatttttagtagattcagggtttcgccatgttggccaggttggcctcgaactcctgacctcaagcagtccgccgcctcggcctcccaaaatgctgggatcgcaggcgtgagccaccacacctggcctgatgtttgcatttcaaaagaattctttgcctctcagaacatctttatttttatttgtttatattttttgagacggggtctcgctctgtcacccaggatggaatgcagtggtgtgatcactactcactgcagcctcgacctcctgagcttaagcaatcctcttaccccagcccccgaagtagctgggactacaggtgcgcaccatcacactcagctaattttgggagtttttggggttttttttttttttttttagagatgggcttttgccatgttgctcaggctggttgcaaactcctgagctcaaacaatccgccccccattggcctcccaaagtgctggaattgcaggtgcgagccgctgcacccagcctatcagaacatctttaaatgaaaatactccgagtaaagttgcaagggtaagagctgtctcattagccaccaggttcaaatcctcactctaccattgaccatgtgtccttgggaaagatttgccctctctgtgcctcagtttactcatctataaagtggagatgatgatctgtttccctggcattcttgtgaggaatacctggcacctgtcatatgtgtgacagtttgctctcacttgggttgttaaagccatcctctgttagagcaccctgggccaatgccacagtgttgtttgtctacagcaagctttgcatatcaaaacgacattaaaatctaaatgtctcatggcactgaacagcaacattagagtctcctcccagctgacacagtggggtgagtgctgtccacgctcatgcaggtgagctggcacccactctgccaggtatgtgagcctggcatggttacataccccataatttgagtgacacttgtcaatcaagtttggcatgggttcttctgccattactgcctctgctgatgaacagagttgcaccatcatggctgttgaaaagcaactgagtggtggttttggggcctgcaaaagtgccatgggaaccagccttccactgggtgttaaaaacgcgtgtgtcacaaccactctctgtcagcctggattctctcagttacgagtgatgtaaacccaactcgagcaggattgaggaatcaaaaaggggactttattggactcatatgaataagtccaagtatacattgagcttcaggtgcggctggatctaggagctttgtctctgggtggcctctgtccctccatctccctgacctcagctttcctccaagttggctttactctcaggccagctctccaggcagcattcctggcatcactagacccacatgaacaccatacaggtgcaagccatccctgtggaaagagagcttctctcacctagaagagagtacccaaattgagtctttttggtctgacactgtctgggacttctggtcaaccagattcaggggaatggaacacagtggttggccagatggagtcaggtgcacattcctggagccaggactggagccaaccccacttgaaccatgaggactgggattgggatagagcagattccccaaaggaaaattcagaagctagtgccagaagaaggcaggtagctggtgtgcagtccagttagagagatgctcgtgacaccctcacatggcgctctctgaagcagctgctcaaactgtggaccagacttattcattcggcaggtgtttcctgagcacctactgtatgccaaaggagatccaacagcaaacaaactaaacagagcttacattctaatgcaagagttaacaagacacatcgaatctatagtacataaaagagcagaaagtgaggaggagaataaagccaggaggggaagccaggaggggcgatcaaccaggagaaaggtggagaaaagaatcgctgggattttctatagggtggtctcattgggaaggggaaatctgagcaaagaaggtaaggaaaccagtcaagggggatccctggggaagagcactccaggcagagggaacggtgtgtgctaaggccctgaggcagatgcggtctcagcaggctcagagccgcaaagaggccagagcagcgtgcacaagagcagcaggaagaatgaacggtaatagggaggtggtggttggatggaccgtgcaaggcatgagcctttgaatgggaggaagattttggctttctgagtgagatggacaccaatagaggacattgagcagaggaggacattgagcatctgatttgtgtcttcataggacccctctagaagaatagactgaataggtgtaatgagagcagggtgtccagtaaggagtctactgcaacagtccacgcatgagatgagcccaatgaggagtctattgcaatggtccaggcatgagatgatagcggttcagaccagagtgaggaaagtagtaagtgctggtcatatttcaaaggtagagctgatacaagtgctgatggaactgatgagggatggtaaagaagagttgagaatgactccaaggttgtggcctgaaaaactatgagaatggattttctgtgtacagagatggggaaaaccatggttagaagctgtgggccgggtgcggtggctcacacctgtgatcccagcgctttgggaggccaaggcacgcggatcaagaggtcaggagatcgagaccatcctggccaacatagtgaaaccccatctctactaaaaatacaaaaattagcggggcatggtggcacacgcctatagtcccagctactcgggaggctgaggcaggagatttggttgaacccaggaggcggaggttgcagtgagctgagatcgcgccactgcactccagcctggcgacagagcgagactctgtctcaatacatcaataaatcaataaataaagctcagttctggacctgggaagttgcaggtgcctgtgaaaagccaacaggaactgtccaataggcagccacatcagtcagacgttgaagagagaggcccaggcctgggtggacttagagtagggcacggtggggatcgtatacaaactgtgtgcttgtttgtgctttactgaatctgagaccctccccagatcctgaaagttgcaggaatacagcctggagaactgtccagtgggagaggcaggcttttgaaagaaagatgtagcagaggtctggccggcctcctgttttccactttccatctgtgaacacaaggaaaccacaccctgtgccacagcctgatatccaggagatcaattccaaatcgcaggctcaagtactctctgtaggggccagatggctggaagcccaggacaacatacccagattccagacaccagatcagtggtaacttccagctcagcctctctgagatcccacctcctggccttctagccgctgatcactagaggagaaaaaacatgtggatgcaggttatctcaggaagaagagaggctcattcggacccacactggtgttcagcttgccaagcacattcctgtaagatgattttttttcaattcagcaacatttgggagatcacttgagttctggaagttaagtgtatcaggattaggtttggctgcatgtaaaagaaaacataaaataacagtggcttaaacaagacagaattatacaaatgtctggaggtaggcagtctagggctggcttggtggcttcaaggttatcagggacccaagctccttctctgcctttctgttccatcatacttactgcgtagcttccatctgcaaagtcaccttgtggttagaacagctgctggagctccagctctcatagccacactctaggcagcaagaagaaggaagcagaggcagaagggcaggaaaaagaaaaaaaaaaaaaccacttcagaagtcacatgcaacacgaatagatcttatttacttagccacatgatctcagcgagaattataaagcacatgcaaatttgaatcattggaagacggtttaagtgttttttgctaaggtgtgagcaagtgcgaggaaaccactagggatagggcagtgccccaggctaattagcaacagtgggacaagaggttactggaacccagggacacagagggtcaccccacaagagctgtcaccctctgttggcaccacagagaggaaggtggaggaatctgtccaccaacctcactctcttctttctccgatctcctgccaggggcccttgtcagtcaaatccaacccaaagcccagagagcgaaggggcttgttgaaccagcacctccaggccagtgccctggggtggagaactggacagagagcagggctggaaggcggcaggcaggctcctggcacatctttggccataagggaatctgggaaatgtttcctagctgggtgcattgaaaataaagtcacagcctgatcagaggaagaaggagaaagagatatttgtgggcaactgagggtctcagcaacaccagagatcaggagcaagggtcccagtgagggcagctcccctagcagtgggaagtggggttgtgtggcctaacactggggagacctgtgtcatgaggagacattcatgtggaaacccgaggcaggagcactgcaggcagaagcacggcacgtgcaagagccctgtggcaggaacaggtttcccaggacgttggaggagggcagcaggacatgggaatgaaggggaggaggatggggaagagggcggcagagagcagacaggggagacctggtggtccccagcaggccatgcagcagggtctggatttgattgcatgcccgatggaaggtccccagaatgttctgagctggtcagctatgcgtgcatgttctcagaggcacaccccggctgtaggtgaagagggtggcccagggacaagagcggaagcagggagatcaggtggtgtttgcagcagtccaggtgggagatgctggtggtacggagcaggacggggcactgcagagcgagagaggtgggtggattccggtgctgcttggaaggtcggcagggtttgctttatggatcgtgagtgggtgggtgagggaagaggaatcggggatgactcctaggtttttggctgagccgttgggcagatggcagtgccatttacagagatgggaaggcgggggcaggaggaacagattgggagaggtggggaagggggggacattaggttgctttgcaaacatcacccaccaggcctgtggctgggcagcagctctgcgtagccccttctgaaaagtggggaaaacaccctggaagccctgccccattgaataaatatcccctcccagggatggtgattgtagcattttgagttagaggaatatttctgggtggagtttctcagagaggaaatgaccaatcattgcagagcctcgtcaattacacccaagccctgccctttcccacgtgtgctctgccacctctctgctatggttgacgatgaccatagcagaattttctcccaggaacttctgcaaccagaggcagcagaaagcaacggagaaaaaattaactgcatggtctctctgacaacccgatgcttattaatagaatctcagtcctgcctcctcgacatctgcctaattgattttgggtttaggaaccgatttggagccttggcttttcgtagctgaaaccagcaataacatttgtctttattttgtaatgtccaagagtcaggaatggttcacctttgcaccaacaaaagaaaaacaacaacctctgagcaacaggtctccagaatccagtgtaattattctggattgagttacaggcacagcaagagttgccaccagcagcagtgagcacatctatactaggtgaaaaataagagattccctttttatgtgtgtgtgtgtgtatatatatatatatatatatatatttttttttttttatttatttaagttctagggtacatgtgcacaacgtgcagttttgttacatatgtatatgtgtgccatgttggtgtgctgcacccgttaactcgtcatttacattaggtatatctcctaatgctatccctcccctctccccccaccccacaacaggccccagtgtgtgatgttccccttcctgtgtccaagtgttctcattgttcaattcccacctatgagtgagaacgtgcagtgtttggtcttttgtccttgtgataatttgctgagaatgatggtttcgagcttcatccatgtccctacaaaggacatgaactcatccttcttttgcccaagtgtggctcccgatttctgctgtttgtgccccaggcctttctctcccctctgctggagacagagctattctggggcagttggtcaggtctgatggagcccagcctgctgcagcccattagcaggtgttgccttggtcatggcagggagctcacaagctgatcctacagcactgcggacattccagggacatttgagggccaggagagggctgctgaatgagttccagcctgttaggtggacaccagtagccagaggtcagtgcaggacacaggttctttcccgcctgtggctcgacctcatagccctcttcatcccccacctgtccaggtcaagactctgttccaacctgtacctgaccccacagcctctcttccccactgaatgcctgttctctgcaggtctctgggccccagtagagcgttacctttgcagatttatttagctgctcccttcacttggaattgaatcagctaagggttgcaaactccatgcccacagggctaggcacgtgctggcaaggaggaagtcggcatggtaggggtggtggaagaccagaggaggaccttgtcaagtgggccttcgctactcaggtccagcccactgtgggcccatcaaagccaggtctttgcatttttcaagcaaagccagaaagctgaattgatgtgaaatctcgcaattaaagaaaaaggccattcaatttttaaaatcctttccttttgggcagacctaaatcaaacacacatgcagacaagatttagtctagagggactccgttttttaactccgcgtgagacgatacttgttgaaaagctgacatgtggccgggcacagtggctcactcctgtaatcccagcactttgggaggtcaaggcaggtggatcacttaaggccaggagttcaagaacagcctggctaacatggtgaaaccccatctctactaaaaataaaaaaaattagccgggaatgatagtgggagcctgtaatcccagctactcaggaggctgaggcaggagaatcacttgaacccaggaggcagaggttgcaatgaaccgagatggtgccattgcactccagcctgggtgacaagagagaaactctgtctcaaataagtaaataaataaataaaagctggcatgcattaagtgctttctgtatgtcaagcattgaactaaaaaagtgtgtgtgtatgtgtatatatatatatatatatatatatatatatatatatatatatatatttttttttttttttttttttttttttttccctcaaaactcagaacaaccctgagaaggaggcactgttattctcccgctttgcagatggggaaactgaggtgcagggtggctaaatcatttgcacaaggtacctggttaataggaagtggcagaaatcaagatttggaatcaggccttctgactgaaaacctttttcatcctattgagtatggtgacatagcgataggttctagaatctatcctagaatttcatagtcaaaccttatacctaaagttatttatgggctgtgtttttacagacagggaagctgaagctcaaagtcagtgatttacggcagttcacacctcattcttggcctctcaattcagtgctctttggcacccaaagtctacagatgaaaaaggacctggtgattcagtctaggactgaagtgtatatgtgcatctgtttgtgtgtgtgttatacacacacacacatattcatttgtagcagctgaacccttttaacatacaaaacaaaacaggtaagagaggaatcaggagaaggacgcggcctggagaggggtgtgtggtgcccccttcatcctcagcctgccccatgccaggtggactttaatgcccctctcctcaaggaaagaaagcacagcttgggggcccctgggagcagactggccccaggtagagtgtagcaggtgatatgtggccacaacagtggccacagtggataacagtgttatcccaacactgggaggccaaggcaggaggatcacttgagccctggagttcaagaccatctatagatttttcggtcatctatagaaagcccactgtgtgccctcttcccctaaatcccagggcctgcttcacataggggtagcacacagacaggcctgcagacccgtgcaggaatgccaagtgccaaatcctgccctctcccattgttctagaaacctgtggccctcttgctgcatttatttattttttatttattcaggagttcaagaccagcctggtcaacatggtgtaaccctgtctctactaaaaatacacaccaaaaaaaatagctgggcatggtggtacttgcctgtaatcccagctgctcgggaggctgaggcaggagaatcgcttgaacccaggaggtagaggttgcagtgagccgagatcgcgccgctgcactccagcctgaaagacagagggagactccatctcaaaacaatcaataaaattacacaagcaaaactttaaaatatccaagtaatgcaaagcagagatagcccttgactccccacccaccgtgtaccccactcaccccaaaggcacctgcatgtcccctaagaatctgtagcctgcatgtcccctaagaatgtttactcttcatttactcacacggaagcaccaggaagagcagcaaaaggcaagaaggaaggggagggcatgattctaatcagcacagtccagagaaagccttgctgagaaagtgatatttgcagaaacctgaaggcaatgagggactgagtctgggctgaggagtggcaggtgcaaaggtcctgaggcagaagcgtgcttggtgtgttcgaggaacaacaaggaggaggtcaatgtgactggagcagaggaagcttagagagagagcgcacagtaggagttgtagttggggcgagtgagcatccggatcactgaggaccttgtaggacagagggaggactttgatttttactctgagtgaggcgggcagtcactggaagacaaagagcaacgaatatgatgatttcactgactgttttaaaagaagtcctggccaggcaggcatggtggctcatgcctgttatcccaacactttgggaggccaaggaaggaggatcacttgagcccagcagttcaagaccagcccgggcaacgtggtgaagccccacctgtacaaaaaatacaaaaattagctgagtgtggtagtgtacacctgtaattccagctactcaggaggtggaggtgggaggatcacctgaacctggggaggtcgaggctgcagtgagccgtgatcacactactgcactccagcctgggtacagagtgagaccctgtctcaaaagaaaaagcctctggccaccaaacggagaatagaacagcttgggagcctactgcaatagtccaggcagagaaaacagtgattagagtgaatttaagtcaaggtcctgtgtttactgactccgcctttatttttctccctgccccattcttccttctgctgctttccctaggaggccctgccatcacagactctaataatatctataattttaagaaactagccataggaaggcatctcactagttatacatcaaaatcacccaagttgagggccgcagggatttgtctgggaggggtacagggttcccctgctcccagctgaagcaggcctccaacagataggagccacctaagcctcaggaatggcaaaaaaaaaaaaaaaaaaaaaaaaaaaaaatcatgttttgaatcctgaaactccctggcaccttgctaagtccccatagatagtgtttgctctgacttagacctttagaagagcaaattcattcagcatttcctatgacactggcaacgtcgtcatctgtggcaggtcagcaaaatattgattttatcaacgatggacttactggatggtgcatccaaaaatatatatatataactcacaccttaattctctaactcgacgtagttaacttggattgagattaaagggttttttcttaaatcacgttaaatacaaatatcaaacaaatcatagcacagtggtacacaggcccccaaaaagccaccgtgaatggggaggcagttcaggagtgtcatgggagaaactgcattctagcagttgggtggtttgggcccccaagtttaaatcccaacagatgggcctgggggtgaggcctctccagcccatcagagtcacagaggtgtcagagtgacctcaccctcaacccagtatggtgggaaggtttggtcatggaaagaaaccgggtctgtttttgtctgcatgtccccaggtttatgttggacgaaagaagttgaggttggctggcccagctgcattgaaaagcttgaaaactggccttttcatttctgtgtggccgtgtcgttcaggtccttccctcccgtcggagctgtccttctgcattagggctggggctgggcaaggggatgagatcatatgtttttgtgttacagaggtaggtttacacagcctcgtcgctatggcagttttaataaagcaggttactgtccccaaggggaggcttagcacatagcactgcccatgcacagatgctgctgtcattccggggcactgttgtcctttactcgtggattgacacagcgctcctccgccagctgatttgggaagggtgagtgctggccaagagcacctcacagctcgcttcctctggaatgaggaggaaggagatctaagcatttcgagaccctggatctgagcccattaaaaacaagaaatggttctggaggctgttcactgtttgccaaggcagcactgggggctgcggagtgcaggtgatttcatcaggtgacggcctgccctgcgttcccttccaggagaagggtctgaccagttaggtgggtggccagcttttgtcctttctgcagggtctggagaccgagagaggctgagctctcactaccagctgcttcgtcctttctccttcgtgtttgggactagggagcaaaggatcgattccacttggggtgccctggactcgtgcatttaagaaatatttatgagcacccactgcgtgccaggcactgttctaggctgagctgtggagccatcaaaagtcacagggaacagcaaacgggatcagtagataaaaacataaaagtatatcatgtgttagatgatgagtgcagggttgaaaatgtcaggcaaggaagggagtagaaaatattgggggccagggaagactccacggagaagggaacttttgagtaaagacaagaagggggtgagggcaccgctgcggggctccgggggagaggtcttccaggcagaaggaacagcagggcacaggttctgggatgggagcacgcctggtcagtctgtggacagagcaggggaccctgtggctgcagagagtgggcggagagggggatggggttagggaggggaggggattgggtcccaccacactctgtggatggccagaaagatttgggctcctctgagtgagcaggagccccggagagtgtcaggagaggagactctggctacaccgtggggaataagtgactggagtccaatcaggaagcaactggcctgatttcagggagagaggatgatcgcctgacccacgggggaggtggcaagggtacgatcgtgggtgtttacgttgaagagagggcaacaggctttgctgatggattggatgtgggaactgaaagatgggaggaaccgtagccaagatgattgcccaagtacccggaggaaaggggagtggcttcgggaggagcaggagggacggtgacatcagggcttggctgtgggtgtggcacctgaggtctaatcgacagccgaatgacatcaatggatgtcagggttgtaccaagccacacatcaagggatgtcaggtccgggttttaccaagccaatgattgccaaattctaatcattccctcacaattttcatcatatatctgtgtgccacttgtacgattatttactttttaaaaatcggctgcaattgtttgttgttgttgttgttttaagaggatttccaccaccctaaaggaaaagctaaggttacttgccctaagtagaaggaaaccaagccacgcaattaatctaaggcaatgccaccccctgcctggagctcccagtggcctttcacaccaccagcatccctggtgtttggtgatgtgaccctgggccacccccacccctggtgtgcctgatgaagtcaccactagaggacccccttctgggtcaccaagggaccattctgagcttaactgaagccaagagtggaccaagagcatggggacctctatgcacttcctcaggacactgttaccacctcccgtgtgactgtgacattttgtgaacgtgaaactcagcaccccgcctctgctaggcttgagtcttcactgccttcccagctgtgcagccttagccagtcattcagctccccaggttcagttccctcttctgtcaaatgggccattgggagaattaagtgatgaatgtcttcagcccagccataagcattcagccagtgatagtcgccactattaattataatgattattactggcatagaagactgccctcttccccaggaataagttggagtgctctcagttccttagctatatcagaaggttgcaacacccaagccttcaggggtcgggcaggtaatgagagtgggtgcaggtggtgtaagactgtagggagcacgggggagtgtggcaaactggagagcacatatcctgtgtgatgctatttaatgtcacatttttaaaacccactctacaagacaccaacacacaggtctgtggacaccaactggtttggattcctgagatatgaaaacccgagtgtaagatagtattttatatgttaatttagctggtctctgttgagcacattatgtgccaggcactgtgctaggcagtgaacaaagtaggctgagtctctgcccttgtggtgaaggcagcaacatacaaataagtgaaatcaaaatgacttatgtttgaggacagtaactgctgtggagagacacggagcggggaagcagagtggagagtgctatgggttgcgggaggtggtttcaatacaggccagggaaggcctctccaagaaggtggtgtctgatcaataacttgaaggagacagaggtagccctgtgattggaggagtgagagcatcccaggctgggggtacggctgaggcaggggccaggaggtgggagggcggccaatgtgcaatactgggacctcaggggcacgaccttggtgccttgattggtggtaaaaatttaaagtagaagcagctgattgctgagcagagggccttccccagatcccaggaggctgcagtgggtctgatgcttgttttcaggtttctagggggttgctaggtgattgggatcacagccttcacatgcctggtagaccctgttttggtttcccactgctgtcctaacagatcacaaactgggtggcttaaaacaacagaaatttactctctcaacagttctggaggccggaagtccaaaatcaaggtgttagcatggctgtgcttcctcagaaggctctaggggagagcccttccttgcctcttccagccctggggaccctaggagttccttgttccttggcttgtatgtgcatccctccagtctctgcttccctttgaatgtggccttcccctctgtgcctgtgcgtcttctccactttgtgtcctatgtggacacttgtcactggatttagggcccacctggggaatccagaacaaatctcatttcagtagcctcaatttaattacatctgcaaagacaccctgtattggtctgtcttcatgctgctgataaagatatacccgagactgggtaatttagaaagaaaaagaggtttaatggacttagttccatgtggctggggaggcctcaggatcatggcagaaggtgaaaggcacatcttacatggcggtaggcaagagagaatgagaaccaagcaagagggaaaacctttataaaaccatcaaatctcgtgagacttattcactaccaagagaacagtatgggggaaacaacccccatgattcaactgtctcccatcagatccctctcacaacacgtgggaaatatgggagccacaattcaagatgagatttgggtggggacacagccaaaccatatcaccctctttccaaatatggtcacattcacagcttccagaaattaggacatggtcttatctttaggggacgggggcaccgttcaacccactgcacaccttaagaactgcaaggaaaaggggaaaaaccaaggatggccatagaagaaggagagagggtttccatggaatatttccatcaaatcactaagggtctgggtaccaaccacagcatacaattgagcatgcactcgtcacacctatgttgagtacccactgtgtgtcacacacggcagcagtgctgaggattcagcgctgagcggagcacacagcctttgccctcctgggaccttggcctgcacgcagtagggctcccacacacgttcatttgcttccttccttccttcttgcctttcttcctaagtgtcttgctctgcttacagcttggttgagaaacaagagcaggcatggccaggcaaggtggttcatgactgtaatgacagcactttgggaggcagaggcaggcggatcacttgaggtcagaaattccagaccagcctggccaacatggcgaaacgtcatctctactaaaaatacagaaactagctgcgtataggggctacttgggaggctgaggcaggggaatcgcttgaacccgggaagcagagattgcagtgagtcaagatcacaccactgcactccagcctgggcaacagagcaagactctgtctcaaaaaaaaaaaaaaaaaaaaaaaaacaaagaaaagaaagaaacaagagcaggcatgaccgaaacctcgaagcctggggtatgatcagtactcaggacacatgctgcaagactgctcagagctctcaagcccagggtggtgccagaggctccctacgagagggtactaggccgatgggttggatttggggtgaggggtggtgggttccaggctcgaagaaaagtgtggacaagaggccagcagggtttgtggctgatggcagagcacctcagccagggaatactcagggagaaggtttgccaccaggttggcatgaccagatttcagtaagagcaaacaattattgggaaagttccaaagaaaagaaagtataatcttccctcaatttacatggtggttggtttccaaaagaaaaaacaaaacaatgtatattaataccctgcaaaaacaatgttgtgtttaaaatttgtaaaacagtttgattccagtctcaggtcatttataaacaggtttttacctgccttgcaggtagagatgcaattacagtaccggacagtgacagtacagtcacttacagtcactcacctccagcaccattgcaaaatcctccagactccagacctggacctcaggagtgtccaggtggactcgggacccagggtccttcctgattatgcaggacagtcccaccgtgcagcagtggcccctgccccgtctgccccgtaggtctgcagaatgtgcccactccagacctagggatgccacgtgctgagagccccctggtgccggtgccgcccgggtctcctgccctgcgccttacttccacccttgacttgcaggttccatgcaggtgatgaacaagacccggcgcatcatggagcagggcggggcgcacttcatcaacgccttcgtgaccacacccatgtgctgcccctcacgctcctccatcctcactggcaagtacgtccacaaccacaacacctacaccaacaatgagaactgctcctcgccctcctggcaggcacagcacgagagccgcacctttgccgtgtacctcaatagcactggctaccggacaggtgagcagggacgggggcaggtgcaggaagggagtgacagccagggcgggcgtccctaggtgtggtctgcacaccactgcggtacccaagttgattctggatagcccctagagcaactctcttataatttcagagttgtgcatttatttctgtgtgtattaaagaaatacagatttatttgcctacagtagtgatgtaaagtgaccttgtcaaaggaatttgagtcccccaaaaaagtgagtcttttcaaactatgaatcatagtgtggagaggccataaggtgcccatgcatgagtttgcatcctctgttaatagttattaagcccatcagggactgtttcgttgacttcaaaccattagcttggaagaaggttccaaaacataggggtgggggatgggaattcatggaggggaacagataatggggctgtgtggtcgctttctacgtggcagtaaccaaggtggtgcagaaactgacatggtggttgactgtccacactcacccgtgtcatcctgggtggagggcgacccagttcctgtttgcttatccttcaggaggtctttggtgggctctgaaggctcacctgccaggctggttgtctgaggtagagatgcaattacagtatagtcacttacctgtagcgccattgcaaaaccctccagactcaattcatttaacttgctttaattaaaaataaataaatactccccgccttgggtaagaagccgcggcggttgtgaaatcaagatattgtggctcagatgttgcaaccccaggaagttgcatccaagtgacaaggggtttgtttgggtgggagtgccgcaagggaaggatggactcctcctccagccctgtccgcagtgctggacctgcagccctcgaggctgggcagcttcctctcagatacacagtgtgggctggcagggatgctttggtgtggggagcaagccagtaaggtgtgtcttcttacagcctcatcccatagccagaatcacctagaaagtatgttctgctgagaactaggaaggcctcgttcctataccttgttcctgtgtattgtgcgtgccattatgcagaatcaaccacctgttggttcccctgagcctctgcagaaagccacatgtgtcagaagttaccatggccaccaccctagatgattggcgggggcctggatgttgctagcagaagcaggacaggcaggcccgcagcacagcagtgggcccttattgaagatgcacctgcaacttggctctagaaagtacagccatgcactcaagagtgaccagccttgaaatgttttaaagtctgaatatttcactgaaaatcttattttaaaatatgccggcacagcttattttttctttaatgtatactgggggccaaagaaaatatgtctgaggagtgagtgtgtggctcacagactctcttttcacaacctctgggtgaaaggtctgtacagaaacctttcgttttggatgctggaagatcagtaaagaccctagacctgttctcatcaatccccctcatttcacagccagggccactgcagcccaaaaaagagacctgcccagagtcaaagtgaggtgtttgtggcataatcaaaatggaatgcaagatcatgggaattcagagggggcatggaaatagtattcatcagactgaaaggaaactcatatattctgtgccattttgagggctcagggtgggagctaaaggctagtgtttcaaaatcttacaggcgacatgagaaaatcaatcatttcaagaataaacattctctaaagtggatttcccaaacttgtccttgaatgtatgcaaatcaccaaaaagctgtctccctaaataagtgcttttattcaactatgattcattattataccctcatgaagactgggagcgtaatgtcaagtgtaaagagccagataccgagaacatttacgtttttgtaaaactgccactgagaattttattcattatatttagaatgccactctgtacaaagaatcccattccagccttactttcagaactcaggaccctgaaaacacctgtttagtctgatgaactggtgtactccttgttattacataataagagccacataccctgtatagtttccctctttgccctggcagctaggaagctcaggtttgagttttatattgagttgttgtttaaagtggaaatgtttttaaagatccaactgcgtgatatgttatactgatcagtgttgactaagaaaaatgacaaaaatctataatgaattcaaaaccttttagattattttttccttttagattgatttgtacatacatattagaatatactgtaaatttttaatcccccaaggaccaaaagtaaattgttcctgctgagtcttcagccatgttaaaccctgtgttcacgtggccacctagcaaagttggttcagttggatttaagtttggctgtgtgtgtgagagagaccggggatgtcaaataaaattccaagttgttctggtggccctgctctatgaagtggtcagagactccgactccatttctccttatttcccattggtgagaaacaagtcatatggccatgcatggcagcaaaggggcctgggaaatgtagtcttattctaggtggacatttgcccagatgaaagttattttactgtgggagaagaagaaaacggatactgaaggacaagtgaagtctaggccaccctaacagttattagccatttgtgtttgtgatactcgtttgaatagaggagatcagcccaaactgaggaagactgaccccagaaaaatgctacttaagtggaccaacatttcataataaatagtgcttttaatgtatttagtaaggtatttgatcttgaaatgaaactacaatgtttcgagaataactctgttatgttacatctctttttttctttttctgagacagagtcttgctctgtcacccagactggagtgcagtggcacagtctcagctcactacaacctctgcctcctgggttcaagcgattctcctgtctcagcctcctgaatagctgagattacagacgcctgccactacgcctgactaatttttgtattttttgtagagatggggttttgccatgttggccaagctggtctcaaactcctggcctcaagtgatccacctgccttggccttccaaagtgctgggattacatgcatgagccaacgcacccggccctctgttaggttgcatctaatgatatttaacaaatattgggctctagttgcaactaatgagttgattcttcaagcaagtgaattgacgaagtgtagggaggaatataatgtgtttcacaaattgaaatggatggcacaagatgatatcctttacttcactagggacatttttgcaaaagtatttgaggatttgatcaattttttcaagggcctctcctaattctctgacatctgaatcttcccctgtgaagtgcatctcatacttcatcatccttctcaatagtctcttctccttcatgtagtatctttatagaccaggtaattattcgtcagtggatttgcatgtgttttttgagctatcttccagcgtcattttaattaattttacaaaccctgcatcttttaaaatatttgcaatttcattttgcagtgatcttgctttgcatggccccatgtttgcagtggagattgacaaaagacaaaatgagagaagctaagtttaagcaggataaatatcaatttgttcatgaatatttctctgtatggcttcttacaacttgagggacttggatctcagatatgaatacccttggaaggatcaattgcatcctcaggttttttgttttctttgtttttttgtttgtttttgagacagggtctcactctgttgcccacgctggagtgcagtggcgtaatctcagctcactgcaacctccacctcccgggttcaagcgattctcctgcctcagcctccccactaactaggattacaggtgcgtgccaccacgcccagctaattttttgtatttttaatagagacggggtttcaccatgttggccaggctgacctcgaactcctgacctcaagcgatccaccctcctcggcctcccaaagggctaggattacaggtgtgagccactgcacctcgccacatcctcagtttttacaaaggttttatagtcatcctttaacacagttcagcagttgaagtgctgttgccctgcctgtgatcacttatatatccacaagtcaaagttgtacagtgttcccagaatgagacacctcccagctctctgcagagtggttgagggcattagctttgcctgggtttgaatccagtctctgctgctttctgcctgcatgaacttggacaagttatttagcttctgtgtcttggcctcctcaaccacagttaataatgtcacttaactcatagagttttgtgaagattaaatacattagaacagtgtctggtacatggtcgtggtaggcacttgggaaatttagcaatgatggctgggtgcagtggctcacacctgtaattccaacattttggggggccaaagtggaaggatcacctgaggccaggggttcgagaccagcttgggcaaaatagtgagatcccttctcaatttttaaaaaacagtaataaaaaaaagttagcaatgacgatgacgatttgcacaatagcacaacatcacacagcccacctcaggccagtgttctgatgaatgtcatggtaagttgcactcatggatcaaaatgtggcagcatgtgctcagcctctggtaatcagcaaaatgcaaacgcagccaacagtgcattatcacatcccagccatgaccacagcaaatatgaagaggtcccatcgcaccaaatgttggtgagaatgtaggaaaacaggaaatcatatgcgccagcagcatgatggtaaattgttccctccactttgaagaacagtttgccaatttctggcaaagctgaaaatggacatctccttctactcagcaattttactctggctgtgtccccctcggttctgaggaggtgatgttgatgtgtgagttctgcttgagcaagggaacacacttcctggctgccctgtttgctcttgaagatgtgtgatgctcatggcaatagattccctttagatccaacggacaggaaccccgactgcagctggcttcaaaaacattgaattttttgctccctaaacaggccaggcacggtgactgaagcctgtgatcccagcactttgggaggcagggatgggcggatcacctgaggtcaggagttcaagaccagcctgaccaacatggtgaaaccccgtctctactaaaaatacaaaaattagccaggcatggtgatgtacacctgtaatcccagctacaggggaggctgagacaggagaattgcttgaacctgggaggcggaggttgcagtgagccgagatcgcaccactgcactctagcctgggtgacagagtaagactctgtctcaaaaaaaaaaaaaaaaaaaaaaagagaagatacaggtgagtagcaggcagagtcggatcttgtggtttacgagtatcatgatcatatcacgaggctggaggtctggacatggtggctggcactccagcagctgtgtgcctccttgtccacatctggcaggagcaagagagcatccttttccagaatgctcaaggcatgagatcccttctgattggaccaccctgagtcacatgccagcccctgagccaatcatcatataaagcacatggtttgtgccaacttgcccagcgtggatcacctgctctgcagcagctggctgagtccctttttccccagcacttggactgccaggtagaaatcaagggctgctggaaagaataaggaaaagcatactggagtgccgatcacaattttactacactgcctttggcaaacaaaaaacaaaaaaaaagtaacatcagctggccgggcacagtggctcacgcctgtaatcccagcactctgggaagccgaggagggtggatcacaaggtcaggagtttgagactagcctggccaacatagtgaaacccgtctctactaaaaatacaaaaattagctgagtgtggtggtgggcgcctgtaatcccagctactagggaggctgaggtatgagaatcacttgaacccaggaggcggaggttgcagtgagccgagattgcaccactgcactccagcctggtgacagaatgagactccatctcaaaaaaaaagtaacaacaacaaaaaggcaaccttttccagctctttctggtgaactagattggagtgccattttctccccattgggataatgcctttctccttccacacctgaatctggcagttctgaagttgtttcccagccccagcttctgccatccggtccagactttcgcagagatggtggcgggccctctgcccttctgcatcatgttctaaaatgcgtcaggggagcagggggtacatgctccttacaagaccaggccttgccagggctctcagttggagcctgttttggggtttggccctgagcgccccagttattttcactcttctcgcacaaagctgggtagagaggtcagctgaggaccagaacctggccatcagccttgggcagctaccctcaccagggtctggggggcctctgtgtcctgatgaccccaccccatctacactacactacacttggggcaccccatcgccctctcacacaggaggatggaaaggcgcccgctaggcattttggcatccccaacaaatgagacttgttttttccctaaagcggtttcattcaggaccgcaggggcaggagggctgctgcgtgggccgtcctcctctgcaatgctataaagtggcccaatgcccctctttccctgccactctctggatctacccttagccccttgccctgaaccccatccaccctggcccctctgcctcctggccatcgccccagagctctccccagcacatcaagcatgagtccagcatcacttcctggtcccccgcctccccggcgcctctcacaggcttctcctcggcacctccagttttccagttgctcaggccaaaaccttagcaccattcttgattttttttttcctattcctttcacactccacattcagttcatcagcaaaccctgtcagctctgccttcaaaatatgcccagagtcccctctgctgccaccagcccatccgcgccactgtcttccccgcctgccctgttccaggtttctcctgggatcccccagcttctgcgtttatgaccccttggtctgttttcaatgcagcagccagaggggtctggtcagaacctagttcagatgctctttctcctctgggcagagccctccttggctcccacctactcagggtagaggccccgacagccacctcagggtcccagtgatccttcccttctctctgaaccctctcagcctcctggtctcccctcagtcactgtcctccagccacagcttctcaagcagtcagccacacctgacatgcacccactcacagtgctttgcacttctttccttttctcaaaacttctacacgtctgcactttcctcgtgtctgtgttccaatgctgcctcctcaaagaagccttccttgactaccccatgcctcctgttcatcccagttttttcccaccagtgcccccatcaccactgaacaccactgactgtgtattctgcccatttgtctcattgattgtctcgtttctaaaatgccagctctcaggctgggcgtggtggctcacgccagtaattctaacactttgggaggctgaggcgggtggatcacttgaggtcaggagtttgagactagcctagccaacatggtgaaaccccatctctactaaaaatacaaaaattagctggatgtggtggcgcaagcctgtaatctcagctactcgggaggctgaggcaggagaaccactggaaccagggaggtggaggttgcagtgagccgagatcacaccactacactctgtcgcttgggtgacagaatgagactctatctcaaaaataaataaataaaatgccagctccctggaagcagcggcctctgttctgtgccctcgcgggttgccaggcctagagagtgcccaccccatcgtaggtgctcaggagaccttcccaggatgactggtgactaagtctccacattctgtccccgccagcagcccacccccatctcttccacactcctttctcctctcccgtttctctcctctccacccccactcccaccatctcagcctttcctcctctttcttctcagcctctctgcacacacagggaagagaagactgaaattattcccgggatgccgtccctgggcccctggtgcagctgtccctgccttcacaatggcagccttctctttgcttggctcttctcctgggtttgctccctgctctcttcctctctccttgagtgcacacaagtgtgcacgcacgcacgcacacacacagctcccttcttccctcggtccagctgcctctcatctgcccatcttccctccccctctccggcctgtggggggacagcagagcctctccattcaccccgtggagtgtatccactgctcacagcaggtagccttcctgtctctctgcagcgaacacccagccttccccactgtggggatccgagtatccacgggaattgcacagcccctcctgggacccaggctgacccagcgtgtcctcgagaggcacggatttgccgcctccgtgcacatcttcaagcgaaatttcttcctctaatttgatagtcacttcctttctctaagacctcagatttcaaaataagtgaagcacttgttttgagcaagagtctaaagaattagactccgccttaagcgcccttgtgaccttgagctgagacctcatcccctctgggcgtcagtctctccatctgtgcagcagtgttgtgacatctaagcactagtcacccagtgcctgtgataagacgccaccctgagtgatacgtgacctgtgcccacaaacccaggaggagaggttccctgcgccgtaagaggaagtggccacggggaaagaggaagctgatgtgaggccgatggggcagggtttccgattgtttccaggcgacaccctctctgtcccacccccttagcaggtgtatccacttccctagtggaccacagactgggtggcttagaacaaaaggcgattttcacagttccgggagccagaaccccaaaatcaagcatcatcagggccacgctttccctgcaggcttcaggggagggtcctttgcccttgagttcctgggggttgctgggaatcttggcaccccttggcttgtggccacatcactccagcctctgccttcatcttcatgcggcctcctccctgtgggtccctctcttcccgtggcctgctcctctctgaatcagtgtccaaatttccctcttctgtcaggacaccagtgattggactagagcccgctctgatccagcgtaacttcatcttacaacaccatgttacaaacacggtcaccctcacaggtacctgggcaaggacttgagcatatattttggggaacacattcatctcgtgacggctggtttctttcacacattaaaccccgcccccccccataaaggctgcagagccgatgtcaaactgagcaaacctgccgctcttcccctcttcactgccccagctgtggtcctgggtggggagcagtgtggccgccctgaagatcagctccatgcgtagccttcccttcccaaccatggtttctctcaaggaatctccacctgcagtgggcgttgaaacagctgcagggtcaaaagtgagggaagggtgactgtggtgacagacaggcacaccctgtctcctgggcctcaagaggcttccgggggtttcagagtgcatgagaccttttgtagtcctctcctaggtgctagctgtgactccctgaacattctggaatgagttaggctggagccaaatggcccagtaccgttgccactagccacagggagctatttaactttacgttaattacaattagcatttcagtttctcaggtgcactagccatggttcaggtattcagtaggcgcacatgggttctgtactggataatgcacatagagaatgtttccattggcacagaaaggactcttggacagcaggagaatagagcctatggctgggcctgtaatcccggcacttggaaaggtcgaggcaggaggatctcttgaggccaggagtttgagaccagcctgggcaacatagtaagacctgtatctttacaaaaaatttgaaaaaaaaaaaattagctggacatggtagtccatgcttgtagtcccagctacttgggaggctgaggcaggaggatcacttgagcctaggagtttgaggctgcagtaagccatgatcacaccactgtacttcggcctgggcaacagagtgagaccttgtctctaaaaaagaaagaagaataaagcctaatcaaacaaaatcttttgggagtggggagtgacacacagcactgagaaggggcaataaaaacgcagggggtggtggctgtcgaactttaggtgagtgctttccgtgattcctcatctgtaatccaatctcctcctcctcatccctgcactcacttccccttatgctcccagtaccttgatctgtcttcccaaaccttcctgggtctcgggtcagggtctcaggacaggttcctgttctccgagcagcagacaccatccatcccggggccagcaggttgtgccagcccacacagcgagtcctttgggaatccatccgtgtcgcaggggatttgagcaaatgaagggaaaccgagttcctacaccgaggccgggagcggggcttcctctgtcatccctgtgtgaacccgttctagcctgggggctccaaatgcatagagggctggcaggtagcccaaagcagagaggcaggctgggtggggagggggtgcccagatttcaactgtggactgttcactctactttttaagaatgagcaactgaaaacaccgggcaggcccacagcaaacacacctgagggatggattggtctgcaggccaccggcttgcaaacttctttctaagctggtggttctcaagggagcacaccgccccctaggggttaaactctgtgactgcattgccggtgatggtgaaggatttgactttgctggcttcctgggggcggagactaagaaggactttgatgtcctgctctgcacagcagagtccacgtggcccccacattgcattgtattccacatagcttctgagtttcctaccacatcactcatatgggtagattattttatgtttattgtcatctgagtcttgaacctacgtctattttatatgtaaatactggagggtttttgcatattcccaggaatgtacggaataagaaaatggaggcaatattatacttgagtgcaaaactttcccaagagtcattccttatttctgaaagtcccatccccgatgacagtgctacgccaaaggatttgaatggcaaatgtcgcccgcccacccagctgcccttgtaattgtcacattcccagtgaatctgtgtctaggtgcaggcgtctgcctgactactgtgttgtgccttcttgatggatgtgctgggggaatttcatattgaaatttatcttcattataaattgctttccttttattttccctgtagattgcagttagagcattatattgattttgtggaaatgacatgcataggtagcttttgttacctataaatttcctttcaagaaaacaagggcgctctacaaaatatttgtcatagaaatgggaggtcagtctgatggcgctgagaacagctctttgaaaggtgcaagtagtgtcagattcctccaaggcgataattaaatatccattgagtgacaggccttgttctgagggtctgttgtggattttctccccctcctctagtccatccctctgaacaaaaccacactttaaaaggcacaagacagatatttaagacacagcttgtcctcgtggtgactcagcaggcaataaaacctgtcactagagatggagccctccatacccagctaattgagtttccagggaatgaatgggcctcatcctcatttgcaggagctgcaagacccttctagggagcggatggctggagccagcatttaattaggcacaggcagcccgccctccatgccaccaacacccagagctccgcctggccctgctacaaccagtcagcagggccttggtgtcccccgcagcccagtcttcctcaatagccacagcctcactaaaaacaggcaggcggaagacaggaatgcatggagtggcaagacagaagcagctctcgcctctcgccctggcgatctgcttgtccctgtttgtccccagcaactggccattccttctccccacccacagccggaggacacttttaaaaattgtaaacctgaccacatcacttccggctgaaaacctcctacggctgcccactgctttttggataaactggcatctcctcgccagggctgccaagaccttgtttggcctgggtgtgctcacctctctgtccacatctcctatctgtcccttccttggtgacagcactcaggctgcctagcctctttgttcctcagaacttccaaggtccattcctgccccaggccctttgtatgtgcagttacctctgtctggagcactggcccacaaccattctggtacaagcaaccggtttcgtggaagacagtttttccacggactgggggtgagggatgttttgggatgattcaagcgcatttcatttagtgtgcactttatttctaatattatcacattataatatgtaatgaaataattatacatctcactataatgtagaatcagtgggagcccgagcttgttttcctgcaaccagatggtctcacccgggggcaatgggagacagtgacagatcatcaggcattagattgtcataaggagtgcacaacctagatcccccgcatgcacagttcacaacggggttcacgctcctatgataatctgctgctgatctgataggaggcagagctcaggcagtgatgcaagtgatgggaagcggctgtaaatacagatgaagtttgctcactcgcctgccactcacctcctgctatgcagcccagttcctaacaggccacagaccgctacctgtctacctgtctgcagcccaggggttggggatccctggtctagagcgttgttcacacactgcggagaacttcctccatccattctctcttccttcctgcccttcctgtgtcggttagtactcctcaaccctctcattctcgaccatgacacccggctttatgttcttcttaggacttctcgcccccttgaaattatcttgcatgtttgtgaacttttttttttttcttttttttgagatggactgtcactctgccacccaggctggagtacagtggcatgatcttgactcactgcaacctccaactcccaggttcaagcaattcccctgcctctgcttcccaagtagctggaactacaggcacccaccactacactcagctaattttcgttttttgttttggtttttttttgagacggagtcttgctctgtcgcccagcctggagtgctgtgccacgatcttggttcactgcagcctccacctcccaggttcaagcgattctcctgcctcagcctcccaagtagctggcattacagttgcatgccaccacaaccggctaattttttacatttttggtagagatggggtttcaccatgttggccaggctggtcttgaactcctgacctcaagtgatccacctgcctcagcctcccaaagtgctgggattacaggcatgagccaccgcacccagccaatttttgtactttagtagagacagggtttcaccatattggccaggctggtctcgaactcctgacctcaagtgatctgcctgcctcggcctcccaaagtgctgggattacaggcgtgagccactgcacctggcgagtgaacttgttttttacatgttttgtttgctgcccatccaaaaatagcaccaggcaggtattgggtactcagtaaagatttgaacaaggccaggcacggtggctcacacgtgtaatcccagcacttcgggaggctgtggtgggaggatcacttgagcccaggagttcaaaaccagcctgggcaacatagagagaccctgtctctacaaataattttaaaaactggccaggcatagtggcacacacctgtggtcccagctctttgagaggctaagatgggaggatcacttaagcccaggcctttaaggccgcagggagccatgatcgtgccactgcattacaacctgggcaagtgaaacctcaactcaaacgaataaaaaaaatgaacagatggagaactcttgggccttaggcttgaagtcagcaaaaaaataaaaacaaaatggaatttagattactatctcatttatccagcatgaagaaacataatcgaaattagttcaggcaaactttgccaggtcccagtgctcaaacgctgtcagaaccctgtctttctgcttcttgcgttttctgtcattgggttggctttattaggaaggttccctctttgtgatggcaagatggcccccacaggtccatctccccagtgtggtgaccccagctgaaagagaggcctctttccaagggctccagcaaaagttccagggaaagctctcattggctcatctagggtcttatgtctctttcacccaatcacagcagccaggcaaaaggagataccctgattgtccaggccaacctcatgggcctggtccaggattcagagctagaaagagcctcatcagaacatgtaaggctgagaaaggggaaagattggttccctccctctttggtgactgaaggcacaattatgaaaagacaggagaatggattctgggcagaaaaataaaacagatatccactatagaaacccacatgcaggccgggcgcagtagctcacgcctgtaatcccagcactttgggaggctgaggcgggtggatcagttgaggtcaggagttcgagaccagcctgaccaacgtggtgaaaccccgtctctactaaaaaaatacaaaattagccaggcgtggtagcgcatgcctgtagtcccaggtactggggaggttgaggtaggagaatctcttgaacccgggaggcagaggttgcagtgagccaagataatgccactgcactgcagtctgggtaacgagtgaaattctgtctcataaaaaaaaaaaaaaatagcttcttcttaaagggcaagtgggaggagagcatttctcccagcccccagctcgctctgcttccaacataagatgcctctttcgtgcggaatcatgaccccaccttcctcatttgttttcacacagctttcagttcagcaagatcccatctctggcatccagaacttttatagcattgatttatcacttcgtgcagtgatttgcatttggtattttttttttcaaaagcagaagaactcgactcaggctgtaaccttgcaaagcagcacaaagttaaaaggatccagttacagaatatcagaaataccccagccctgagagctgtggagctctgggtttatttaatgcatttcttgccagccctgcctcctcagccaatttgtctgccaaaaaaacaaagacttcagtcctgtggcatttcacatctaatatttatgctgttctagagtttgcaaaagggcttccttttcatttatcactgttcctcaggaacctccagctcccctgctaggttaatgggattgttctctgctgcccagaccgggagccccaggaagccaaatgacagatcatgaaagtggcccagtggaggactcttctactggtgtcaggggtaggatcaaaactcagcctgaaccagctcagtttctattttgtgaccctgggggccaaatatggatcttgcaaaatggcagctggcagcctgagtctacacttcaaccccaaatttctgtcagagttacaagatgctttttaaaatctggaaatttaaccaaaaatacccagattacaaacttctctttaaaaaaaaaaaaaaaaagattatgataggcctgtaatcccagcactttgggaggccaaggtgggtggatcacttgaggccaggagttcaagaccagcctggccaacatggtgaaaccctgtctctactaaaaatacaaaagaattagccgggcgtggtggtgtgcacctgtactcccaactactcaggaggctaaggtgggagaatcacttgaaccaggaggcagtggttgcagtgagccaagatcatgtcactgcactccagcctgggtggcaaagtgagaccctgtctcaaaaaaaataaaataaaataaaggccaggtgcagtggctcaagcctgtaattccagcactttcagaggccaaagcaggtgaatcatgaggtcaggagatcgagaccatcctggctaacaccgtgaaaccccgtctctaataaaaaatacaagaacaaaattagccggtcgtggtggcaggtgcctgcagtccgagctactcgggaggctgaggtgggagaatggcgtgaacctgggaggtggagcttgcagtgagtgcagtggcactccatcctgggcaacagagcaagactctgtctcaaaaaataaaacaaaaatttgaaaaagataataatgataatgatggtattgccattactggtaacattcctgcatggtggagattagtaaactgtggcctacaggagtctgctgccaggttttacaaagttttctggaacacagccacacccattagtgtatgtactgtctgtagctgctttggctctacggtggcagaattgaatcattgcaatagagaccttatggctgcatagctgaaaacacatagtctggccctttgcagaaatagtttgctgagccctcctaagtggcgccagcccactggatttgtgccacagatacccccaggatttattagaatataggtggagttgagggtacttcagtccctaattaacagcggattagagatgataggtgcttatttctctcccatttgacagtttgggcataaacagcctagagatgatgtggcaggcatggtgttggctcccaggctcctgatgggtgatggtcagatggcgttccatcatcctgggcgatcgtccttatctaaagcagcatcccatcctgtctgcatccaaccagcaggacacagaaactataagggaagctcacttcccttcctggaggggagtttccagaagtcacacaccacctggtgtacccctccagttcatagaaaatacagagaattacaaaggaagccagttatatgaaaacatatttatcaaaatattttataaactgtgatatgtatgcttctttacacataaaatggcacgatgaagcagttatttaatggacaatggataggtctgataacttccatgatttcgaagtagcgctggctcaaatgatattttaagaagtccatgttgactacaatgtgatatgaaaatatccgtaattcccattggtgacaaagtcccagggaccatcattcataattgaaggggatgctagttataggttaatgaaaataaacaaatacatacttttgccattcaatttcaggaaattatatcttgggacaacagattaagaacctcttcctcaggtgatctgattcgattccatggcattaagtgccatctaaatgcttacagctcctcagtttgtaattccgtagcttttctgtgaacctggtctgtttccacctgaatgtctaacctgagtctcgaggttaatgtgtctgatttctttatcaacccccatccccaactctgcccctcccagtgtccctttcctaaataagggcaaatctgtcctcctcattgcttggaccaaaaaccttgagttatccttgactctctttacttctttcgcatgccacatcagcaaatcccattggttccacctttaaaaatagcctggaaccaaccacccaagcccttcgcctgccacgattgtggtcatcacagtctgtctcctgaatgactgtgagagtctccaaacattccagttccctgcctcggactggccttaattctaggacagaagctccaggaagatgcaggttttttgctgctttaattttttctgttttgttcactggtatccccagtgcctagagccatcccagccacacaggagtcctcctttaatgtttactgattgaatgaatgaatatataacatcatgatcaataatattatgataaaaacagtaaccatttagaggcagttaacatattttctcattgaatctttcccagcaactttgtcatgtagggatattattattattcctattttgcagttgagaaaactgagctggaaggcagaggtagctgaacttaaatgcaagctgttggctccagagcccatgcccagccctcagacctgcctgcctcggaggataaaaatcatttctgaggccaggccaggtggctcacgcctgtaatcctagcactttgggaggccgaggcaggtggatcacgaggtcaggagatcaagaccatcctaaccaacaaggtgaaatcccatctctactaaaaatacaaaaaattagctgggcatggtggtggcgcatgcctgtaatcccagctactcgggaggctgaggcaggagaatcgcttgaacctggcaggcggaggtttgcagtgagccgagatcgcagcactgaactccagcctgggtgacagagcgagactccatctcaaaaaaaaaaaaaaaaaattatctctgaaaccctacacttctggaaagactgatctggataacgactatggctcctacctgtgtcccccacctatgcttcaagaaaggcaaagtgcccgggtcctgggaatgaccttccttcaaaagcccacggccggatgaattctgggaggatgcagcatgggaagataacctcagtgtggaaattccctttgcctggaattctggcagaaagcacttcggagatagtctgagccacatcggagaggaggagctctcggaggctgagtcccatttgtgtgtgtccccacctttagccatggggcagtccctctgctgttccctcttccctgcctctctgcgtccccgtggatgggaagagctccagtctgtggtcgctggagtcctgctgagaggctgaacagggtagtcaccaaaaggcaggtggagacagacaacctgggattgagcctcatttcagctctgacacttggcagttgtgggatgttcggtgaaaaggggactttgcctctctgtgcctcagtttctccatctgtaaaatagggaccaaaaaaaggatctacctcactgggatgttgtaggtcatcgtctaaaccagtggctctcaaagcgtggtcccaggatctctagactcaaaactattttcatgataataccaggacactgtttacctttttaccgtcattttccttctggtagacagtggagttttctagcaggtacatagcatatctagttatctaaaaaggattaaaatactcttcccttttccatctgcatacccattttattttattttttagaaatagggtctcgcttgtcacccaggctgaagtgcagtggcacaatcacagctcattgcagcctcgaactcctgggtccaagtgatcctgccacctcagcctctcgagtagctgggaatacaggcacacaccaccacgactggctatatttatatatatttattttttagtttttgtagagatgaggtctcactttgtcacgcaggctggtctcaaactttttgcttcaagcaatcctcctgccttggcctcccgaagtgctgggattacagacgtgagccactgtccctggcctgcatgtctgtgtgaggctggatttttcatgttaaacaaccaaaacaatatatctcagcagattgaatgccaaaacagatttaagaatcctgctgccttccagtaaacaagacattgaagagattggcaaaaatgtaaaacaatgcaactcttctcattaattgtattttgtttgggaaaaatatagttatttatctttttttctccccaagacagagtcttgctctgtcactcaggctggagtgcagtggtgcaatctcagcttactgcaacctccacctcctgggttcaagcagttctcctgcctcagcctcccaagtagctgggattacaggcgcccgccaccacacccggctaatttttgtatttttagtagagacagggtttcaccacattggccaggctggtcctgaactcctgaccacataagtcatcacgcccagcctctatttatcattttttaaatgtatgctaacaagtagtgagtttattatttaaatgagtgaacaaatatgttttaaatttctcagttttcatctctaatataataactatcactagatataaccaacatacacaggactctgggttccttaataaattttgaccatattgaaaagcactgctgttgccttacactgaccttgagtgcttttttggttttataaagcacatccacaaatggaagtcatgtcccgtgtgggccaaatagatccaagttcagccagccaaacaccatacaagcaaataggaagacaagaatttaacaattctacccactcctccactcacagagggtgtgcaccggatgataaaaaaacaaatctacgttctcagccaggcgcagtggctcacgcctgtaatcccagcactttgggaggccaaggcgggtggatcacttgaggtcagctcaagaccagcctggccaacatggtgaaaccctgtctctactaacaatacaaaaattagccaggcatggtggcgaacacctgtaatcccagccagtcgggaggctgaggcaagagaatcactggaacccgggaggcagaggttgcagtgagccgagatcgtgccattgcgccccagcctgggtgacagtgtgggactccatctcaaaaaaaaaaaaaaaaatcgacattccctcactcagctgtgtctcccacaggcctcccattacgaggtgttcgttggttcagttgtttacccatttattccacaaacgttcatcgaggtctcgtcactgaccaagctctgttctagatgtgaggacacaggggacaagggactcagaaagccgctgccctcatggggctggtactctggtgggagaagcacgtgataaaaactagaagacagataaatatgaccagtgaataaatatgtggagaagcaatgtcgggggaaaggggagagcctgggcggtgtggggagatgccatttgaataggagggttaggattgagccccagtaagttaacatttgaggctggacatggtgactcacacctgtaatcccagaactgagagaggccaaggtgggcagatcgcttgagcccaggcattgagaccagcctgggcaacataatgaaaccctgtctctacaaaaaaaaaaaaaaaaaaatacaaaagttatctgggcatggtggcttgtgcctgtggtcccagctacttggaaggctgaggtgggaggatagcttgagcctggggaggttgagggtacagtgagccacgaccgcaccactgcactccagcctgggtgacagagtgcgaccctgtattggaaaaaaattaaaagctttgagcaaatagctgggaaaggtgaggaagcagcccatgcaggtatctgaggaaggtgatttctttcaggtaacagcaagggcaaaggccctggggcaggtatgagctttggggttggggtgctggtaggatagagggagaccccaggacaggaggctggggggaaagtgggggcagatgcagtcacggagcaggacaggagacagttataggactttgtagggcatggcaaggactttggattttagttgaggtggatgtggagccactgaagggctttgcacagagtggggggcttgatcaaatttgtgatttaatgggatccttctggctgctgtggaagatgggctgaaggtggaggcaggaggaccagggacgaggttccagcaaggtccaggcagaggcagtggtggcttggaccaagatggtgacaggcggatgatgggaagtggtcagacctggatgtgtcctgagggtgaagctgctgggacatatgtgagggaggacagaggagctgaagtcccctccatggtgcgtagccttgacccactggcattgacggatgtatggatcacagggcgaaaatcaagaggccggtgtgaagtgctgatttgacaccaaatgaagtgatttgaaggaaattactaagtatgcagcggtccaaatgatacataaaaacggccaaacgtgtgtgagaggcacgcggacaactggaattgagatgatgccacgaagggcaaagaccccgttttgttttcgcagactccgtgcctgcgaaatggcgcgggtctgttttgggaaggacggactttccacaggcttctgcttcatctttcgccgacctctctgaattgctttggcaaacactgtttattgtcattggctcggctccgcgctccagcccatctctgctgatagatgtgtgtcatgctcagccgacttcactgtgcggcatgaacactcctccccaagctcattactggagtctcggaggggccttgccattttccaaaacggtgtcacatctggtttctaacaaccatttttatttctccagaggtccaagttttcatccccctccctgaaaacggaaagcagactgtattttgggaactcacagttcttttttgtttctgtttttttgttttttattattttttttttttcagagacagaatctcactccgttgcccaggctggagtgcagtggcacaatcatggctcactgcagacctaaactcctgggctcaagtgatcctcctactttggcctcccaaagtgcttggattacaggcatgagccaccacgcctggccctttttcagagttctttatgcacaatctcatttgttgctgcccccatttttatagaagaattcactgaggctcagacaggagcactcgcttgcccaaggagtcagagtcctctgactctgcaaaccaagctctttaaagccacactgcaaccctgtcgttaatggtacatttggacaactttttaaactgtgcactttacacagagtttcacaacctcggcactggtgacactttggggctggatcattctttacggggggaggagggccatcccatgcactggaagatggtcagcagcatccctggcctctgcccgatagatgcctgtagcacattcccccaccccgccaggtcatagcagtgaaaaatgtctccacacactgcccagtgtcccctgcagggcaaaatcacccctggttcagtgtattctgcacacagatgtgcttcaggttggcagccctgcctgctccgttgacccatttttttcagcatgtagcactgtgctgcagacactataatagaaatcccttcctttctttttctccccccacccctgccccccagacagggtctggctctgttacccaggctggagtgcagtggcaggatcttggtccactgcagcctccgcctccacttcctgggctcaagcgattctcccaccccagcctcccaagtagctggaacgacaggcgtgcagcaccacacctggctaattttttggttttttggtagagacagggcttctccgtgttgcccaggctggcctcaaactcctgagctcaagcaatctgcccatcttggcctcccaaagtgctgggattacaggcgtgagccaccacaccaggcctagaatccctttcagtaagacatgcagttgccacctctcctgcactcctgggcgaggggtgtgacgcttaacattagagggcgctgccccaccttgcacagctgtgtacctcaatcaggtgcacctacccagccctcctgtcggccactgctcaccgtgtgcacactctgggccaggtactgcgctggggctacagtgcagcacggctcctgccttacggaccccacaccctagttggggaaatgaggataaacaagaaaacaaatgcatctataggataatttcagagagtgcagagtgctgtagaggaaataaacagcccggtgactatagagggatgggtgaccagggacaacttctcatctgacctgaggtgccacggtgaggaggaggcaggcgtcccaggcagaaggaagagcaggtgccaatgctcggtggggtagagagcttggctcctagggagcgtgagacctagagaagttgaaacagagtgagctcagcagtgcgtccctgaagggagacggcctgatggctcttggactcagaagggccctctggccatttggggaagtctgggctctgggaaggctgcggaggcagaagtccagttggaagttggctgtgagaaggaaacaggtgaagaagcaagatgcatttctgtcttttttgggattttatatcctgtgtatatgtgtatgttgtgtattcgtgtatgtgtgtatatgtgcttttactgtattttcctgcatcgtgtatatgtacatatgtacctgtatattcatgcattgtgtatatgtgaatgttgtatatctatgcatgtgcgtatgtgtgccatatattaatgcatatgtgtatttttatatgtcatgtattcactcgtgtgtatatgtgtgttgtatattcatgtatgtatatgtagtgtatttgtgcttgtgtatatgtattcatgcatgtgtgtatatgtatgtgttgtatatttatgcaggtgcgtagatgtgtttgtgtgctggttccaaaatatgaggacaaattgccaaatcaaagtgaataaatatttaatgaaatggtgttgcatgattcagcgagtcagctctggaacatttggactcttagagagctgtttgtcgattacctttaatgtagtgtgtgggtggaaatggtgtgggatgaacatgtaccgaaagttgctgatgtccttaaagaagccctgttggtatttccagccagatggcccgtcgtgggggagagaaagtcctccgaaagcagcgggtgctttctgtcctgctggctgcctcttgggaggcccctaggacagatcaggtcctgtttcacccttcgcatgcctgtcagttcatccacgtgcatagcagtgggtgggggtgcactgtcgtttcattgccaacaaccacaggggacaaagtcctttgtggtcccacagctaggaggtggcagatccaggattcaaacccagacagtctgactgcagagacgctttgggcactctgccacattaccacctgtgttactgggaaaagggagaactgatgctgggaggaacagcgtgttcctacgccggcccggcatggcggggacatgtctgcagcagggagaggtggccgaggttcccagtggtttctggttgcaggagccctctgtctcccccattgtccgtggcttgcttagtatccccagtgatgccgtgtgtgcccctgtgccaggtttttcaccagctaatctcagtccctggtcgccacgagacacagctttcacagaccacaaatgcaattattacaaggcaatttcagttagatttggggctgggagagaaaacagaagggtctcctcctcccatcaggctccgaatcgttccccaggagcacttaactcagacaaatggggaagcagccgcgtggagcctccaccgtagagctgcctgcaggggaagtggccgacctgctgggccacgaagcagggtgcaggaaggatatggggagctagtgatcctctccaagggggcagggggactccattaaaccagatgttaacagcaagaagttggctataacaggggacgggcccattggtggataatgaaaatataacccttagtaggcacttgctatgtgccagttccaagcaatgtacagtcgtgtgtcacgtaacaatggggatacatgctgagaaacgtgtcgttaggtgattctgtcattgtgcgaacatcatggagtgcattacacgcctggatggcatagcctactacacacctaggctctgtggcgtgacctattactcctaggctacaaacccccctacagcatgtgaccatactgaatcctgtaggcggtggtaacacaatgggaagtatttgtgtatctaaacatacgtgaacatgttaatagagtacagtaaaaatatggtgggcatggtggctcatgcgtgtattcccagcaccttgggaggccaaggcgggaggatcacttgagcccaggagttccagaccagcgtgagcaacatagtgacaccccatctctactaaaaattaaaacattaggctgggcacggtggctcacgcctgtaattctggcactttgggaggctgaggcgggcagatcacctcaggtcaggagttcaaggccagcctggccaacatggtgaaacctggtctctactaaaaattaaaaaattagctgggcgtggtgttggacacctgtagtcccagctactcgagaggctgaggcgggagaatcgcttgaactcaggaggcagaggttgcagtgagctgagatcatgccactgcactccagcctgggagacagagtgagactccatctcaaaaaaaaaaaaaaaaagtggtttcaggtaagagtggatccccagggcctcaaaccagcatctctctatctctctatctcttgtatctctctatctcttctgtctctctgtctctatctttcccacctccgcatttttccatattgctttacacacacacacacagactcttccctcttggtggcaagatggctgccagcagcttcagttatgtatcccaccagttccaagccttgaggaagaagaccttctcttttctagtagctccctaaaaatcccagggctgactcgctgcagttggcccagcttgggtcacatgcctttgcctcaactaaccagtttgtgcatgatcaccaggggaatgcggtcctcatgggagtcaaggatttgcacacattcctggagtcaacagtcaaggtcagcccgtgcaacttaaataaggaagtgttggtgcccaaaggatgacagagccaggcaggtgaagcttccacctagtgctgggcacacaggaggcagtaagtgctctggcctttcagcagatgccagccctgctgcccaggggcagtcgccagccagctcattgtcaatggcctttcctggcctgccattaattcctcttaatctgcctgccaaattttcccacccccacgccagcccccagcttgcccctcctcttgtgctgtccttgcctcgaaagctcagcgaatccaagcttcccaggcaccagccacctgccacaatttgggctgggcttttaatcttggttttaattccagctcattctcttggctgtatctcccagcccaggagccccggggcccatgctaatttgcttctcccacctccactggtgccggaataaccatttttaaaagtgccttggggaaatataatcaaatgagagcaaaatctaatttggcactaaaagcctctgactgaagccctgttttctagggcctggtggagactgaataatacaccctttttgggtttttaagggttgggggttggagaaaggaaagagacgtgaaaggggagatgctagcagaggaaacagcttgcattaagctgacatccgtggcactgaaaagaatgggcaggaggaggacccccacccactccctatgaagaaattcatatcccagcagccaagccaagaagctaaactccagcattcatcagaaagaccttggcccaagtcttcaagaaccagtaggttcactggctggagatttggaagatgtgggagtgtagcgggaaacccagttccccagtggggagttcagtgaagcctttttctctgactttcagttcacttttctgcaaactgagggggtgaaaatctgtgcttcttaaatgacttgtgatctgggctcctttcagaatgtgtcaaaagctgtggacttgtttccaggaaaatgcacaaaaggcaaaatctggcatgcaatgttccaggagcggtacgaaccctgccactcctcatgacagtctccaggaccctatgggatctgtcccctcttccccgtgatgtcatttcctccctccctcactgtcccccttgggttctgcgatgcccccacgtttgtactggcttcagggactttgtacctgccaattccctctgcctggaacagttttcctcctatcccctctgactcttgctcttcagcccagcgaggcctctcacagcactgcgtggggccactctgtcctatcattctcctttattttcttcatcgcatttgtcatcattccccactagaacatcaactgcacgagggcagaagggatcctggtggtcttgttcactcctgtgattccagtgcctgggaagctccctgcataccgtaggtgtttaatcaacacttgccgaatggatacaggcatgcataccttccctagggcagtgggaccccaaattcagcaatttcgagtgccaccatcatgaggtgtaccatgcccaggtacactgattctgttaacattttaccctagattgtttcactctggacttcagttgtttcaaaaggaatcttttacatcactgacagtattgtttgccacgagtagaaagtgtcggggctctgtaggggtgtaacaaaaacgcaggtaataagagcgagatctggtataaagaaagtgattttttattccaaagctagcttaggggaagaagtacagtcttcctgccttaagggtactgctttgcttttaggagcagaaaggagttgctttttaaaagggggcctggcatgaatggcacacaggggaggaattgagtgctgggggggtccgcatatctcactcgagtacttcatctaccgggaagtcagctggcagccactggtgcctttgtgggtggaactaggttgtaagggtggccagaagctctccacctgggagggagtttcgcagcaggcatactttgggttgtagtggaccattgtctctcgaggcaacctcccagtgagtgagagttccgctccagagcctctaagcacgtgattagatgaacttgccctgaagagagtgtctggtgtaggggagataaaaggttataattgcatttctaaagggcgaagtggggcacggggaaaatggagaaaaaagaagaataaaaaataataaaactgccggacagggtggctcacacctgtaatcccagcactttgggaggctgagatgggtggatcacctgaggtcaggagttaaagaccaccttggccaacatggtgaaaccctatctctactaaaaatacaaaaattagccaggtgtggtggccatgcctgtaatcccagctactcaggaggctgaggcacaagaattacttgaacctgggaggcagaggttgcagtgagctgagattacaccactgccctccagactgggtgacaagagcaagactccatctcaaaaaataataataataataataaaactcatctttttcttagaaaaaatgggaataccgatttatgtgggggcttattaaattttaccctcttccttgttgaggtcctgagccgattaagaaatcagacccaagagtcagctgatgaaagtcaacactgcactctgatgaatctggtgaaggctgggtttgagggcatggcttccttctgagagcatttgggcttcctgactaaactccagagtgtgacagacttcccactgatgcaggtccacacctctcctccccgcgcagacaggacaagcctcctgaaaactagccctccccgggggcagctcagtccccagaggaaaagcaagggaagggattgggctatgcatgcccacttcggcccttcaaatccactaggcacatgctaggggtcagcaaaccacagccaatggacctaaccaggccctccatttgttttagtaaataaagttttattggaacatacccgcccacttgtttatgtcttgtctgtgacttcttttttttctttctaacaatagggtttagcagttgtcacagagaccctttgaccctctggcccacaaagcctaaaatactgactatctggcttttacaggaaaggtttggtgacctctgctgtatattgtccccctcggaggaggtacgggagagcatggagagaggccaggagtgttacagaagtggagcccccccgcatggagggcagcgttagaggtgggggtcaaggtcacaaggtttaggaaatcttgtttcctgaactacacttggtctccaggggccttcctggctctcacaatatggctccaaagacctgaggggtgagatgctggagggttggaccataggcaggtttatttaaataagatagggtttctcagcgacgtatggtggctcacatctgtagtcccagaactttgggaggccgaggcaggtggatcacttgaggtcaggagttcgagaccagcctggccaacatgatgaaacctcatctctactaaaaatacaaaaattagccgggcatcatggtgcacgcttgtagtcccagctactcgggatgctgaggcaggagaatcccttggacccaggaggcaaaggttgctgtgaggcgacatcacgccattgcactccagcctggaaaacagcgagaccctctctcaaaaaaaaaaaaaagaaaagaaaagaaaaggtttcttggattaggcgctgctgacattttgtcctggctcagtctttgtagcgtgggggctgtcacgtgcgtcggcgaatattgagcagcatccttggcctccacccaccagatatcaacagcacaccaagttgtgatgaaaccaaaaatgtctccagacattgccaagtgtctcctggggacagaaattaccccctttctggccaagagccactgctttgaggagctggatgcattgaggcatctccaacattccaggtcccagagaaagagaagtgcaggcctttagcttgcccgggaatctcatgctgcctccactccatcagttactccctgacacctagccagggacgcccagtcgctgtttaattaggcacccaccacctaattacatttcactctgtgaaaactggatatgactcagactcagagactgcagccggttccccgcctcctcctctgcagaacgccaggttcttcccgtttatttttgctccatcctcccacacaaagggaggttccatcccggaccttacccctgaggctgctgggggatcctcccttcctattttcacctcccctgtgtacccagacccttacaggaggtgtttcatcagctcctccctctggagcggtcacctcccggccctgcatgatgggcaagtcatttaatgaagtgctcccctttgccttgtattttgggggtttcagaatccagccgcttgggttcctaaggggttttcccactcctggaaagtgtcagccatctgccaggtcaccaggaaaaccgctgcagagggagccagctccatcacagctcccccagggccaggtggctctgtgctttctccaaggacactggtggataggttgtcctctcctctaggggcaccagagccccatcccacccactctcctccttcctctgggggttcacctccctggcctttctctcttcatcctggcttctcggccaagcactcacgtgcacaaggcccagcgctgagctgtctgttagcaagatctccttacatccctacaacctcctggaacgctcatattctgtgctctcagcaatactcgtcagaaatttcagaaccgcagtgtcctcatctagaaagagacgactagaataggattgctgtctctagactcaaattttcccatttcttaaatatggctttatagattataattattaaaaattatacatgcaagccagacacggtggctctcgcctgtcatctcagcaccttgggaggctgaggcaggcagatcgcttgagctcaggagttcaagaacagcctgtgcagcatggcgagaccccttctctacaaaaactacaaaaataagccaggcatggtggcatgcgcctgtagtcccagctactcgggaggatgaggtgggaggatcacttgagcctgggaggttgaggctgcagtgagccgtgatggtgccactacactccagcctgggtggcagagtgtgacgtgtctcaaagaaaaaaaaaatgtacatgcaaaataaaaacagaagaggatcatgaagaggtcttgtctgtctccttatcacagagcttttaggcacatccccttcctgatgaattagggtgattttctttaagctttgttgttgatgtaaagcgtgcatgtggaaaagtgcatggctcccaaatctccaggccaatgaggtgtcaccaactgaaccacctgctccagcaagaaatagaacaagatcatcacccgagaaactccccttgctgctcccagccaccctcccccagtctccaggatacccactgtttttattctaacatcatagattagtttggcctgttctcaaatttcacatagatgacgtcatatggcatgtattcttttgtatctggtttatctctcttaacattcttaggttgttgagatgcatccctgttcttgaatgtagcactaggtctttcgttcaagtttcaatgtagccttccgttctgtaaatatgcaacaatttctttacccatccttttgttgataaacatttcatttgtttctacctatttactattacaaatgtgctgtcatgtcttgtacctgagtttaggtgagtgtatgaatacttttctgttgggtaaatacccaagatttaaattgttgggtagaagttaccaatgcattcaaatttagcagacacagccaaagagttccccaccgtggttggaccggttggggcagccactcagtgtgtgagggctcaagttgtcccacatccccacccatactaggtgttgcccatttctttaatgttagccattctggttgctgtatagcagacagaatccaagggatccacaaacttcaatgggaaaaaaagtgacactctggttttcactaacctacagctgagacttagcatttgcttccaatatgagcataagccataaaccacagtatgttggcagaatctgtagctttgtcatctgtagaaatcaccagtatttaatatcccattgcagtttttgcagatactgcaaaatataatattttcactcataactattctgaaatgatcgctctctacaaggttttaaaagacacagtaggccaggtatggtggctcacgcctgtaatcccaacactttggtcaggagttcaagaccagcccggccaacatggtgaaaccctgtctctactaaaaatacaaaaaattagccaggcatggtggcagacgcctgtaatcccagctgaggattactcgggaggctgaggcaggagaattgcttgaaacctgggaggcagaggttgcaatgagccaagatcgtaccattgcactccagcctgggtaacagagcaagactccatctcaaaaataaaaaataaaagacacactgtatcgcaaatgtgtttagtattttgataaccgtatttccaaacaattgattttctctgtaatcctatatcttgtattcaatgcacgtaataacattggagaagggatccattgctctgtgtgccagagggctccatggcagagcaggtgtgcatgctcaggcctcggacacacaatagtttaataaacatcgtcaggcactttctcacgtggcctcctgatccatctccctccgcagctttcttcgggaagtatcttaatgaatacaacggctcctacgtgccacccggctggaaggagtgggtcggactccttaaaaactcccgcttttataactacacgctgtgtcggaacggggtgaaagagaagcacggctccgactactccaaggtaagctgcaacctttccagcctgggagtggctgtgtggcccagcagttagaggcccaactcaggagccagactacttgggttcagattgtgactcaggcacttaaaagtgtgaccttgagcattttacatacacctcctcctcagtttttcatctctcagccagggacagtggctcacgcctgtaatcccagcactttgggaggctaaggcaggtgaatcacttgagtccaggagttcaagaccagcctgggcaacatgacgagaccctgtctgtacgaaaaaaatacaaaacttagccgggtgtggtggcacatgcctgtggacccagctactagagaggctgaaatgggaggattgcttaagcccgggagtttgaggctgcagtgagccaggatcttcccactgctcttcggcctaggtgacggagcaagactctgtctttaaaaaagaaaagaaaaatgtattcatttctcaaaaaatagtgtctgtttccaagagtttggttttttaacattttgccgagacagaatattcttacagaaagtacatacacagagtgtaccattcaaaggcttgccgcacactgaacggacatgtgtaatgagcacccgggtaggccaagaagagaatgtcaccaccgcccgcagcagtcccctcacggaattcccccgactcgacacccctcccgcgaggataacgatgattcagactcttagcgttacagattcactctgcatctggcttctcctgcttagtattatgttgagttcattcttgctgcccagcattccatcatgcgcttataccacaatttgtttatttcttctacttttattgggcatttaggtatttccagtttggggttattacaaatagcgctgctgagcactgtctagaacctagctcctggtgagcatagaggctcatttctgttatacccgttcctcacagcagcgttgctgagcacagggcgtgtgcatgttcggagtgagtgggtgctgcctgagcacctgcagcagtggttgatcctcagtcgtagttttttctgtttttaacataagatgaattgacatgaggtaacatgcacagatcttaagtggaccgctggatgaattttcacatacgtgtgcatctgtttcaccgcgcatctcttccacatatgcgtgcatccatttcaccgcggctccgatcaagacatagagcacttccagaagactccctgagacccctctccagtcatgaccccccaccctggggatgacgtctactctgacttctgacagcgtggattatttttgcctattctagaacttcacctaaatggaatcgtatagtctgttctcttctgcatctgccttttttcacccagcgcaatgtctgtgagatctgtattatttattcattcaacaactcatggacattttggttgtctccagtttgggtctattataaactaagctgccgtgaacatctttgtccatggcttttagtggacatatgcacccatttcttttggttatacacccaaagaaggattgctgggacataggatgtgttaagatgttgcgcccggccaggcgcagtggctcacacctgtaatcccagtactttgggagactgaggcgggtggatcactttaggtcaggagttcgaggccagcctggccaacatggtgaaaccccgtctccactaagaatacaaaaattagccctgcgtggtggcgggcgcctgtaatcccagttactcgggaggctgaggcaggagaatggtgtgaacccgggaggcagaggttgcagtgagccgagatcacatcactgctctccagcctgggagacagagcgagactccatctcaaaaaagaaaaaaaaaaaaaaaaaaagatgttgcaccagtttacactccagccggaaatgggagttgccctgcatcccttatcagcacttggtgttgtcttttttgtcagggctgctttgttgggcatgtagcggtgtttcattatggttttaccacaaaggtttttgaggatcacgtgagttagtacatgtagaacattagaagcgccccttgcacgtagtaaatactcagtatgtagtagcttagatcagggcaacaaatattttctgtaaagggccagatactaaatattttaggctttacaaggcttacagtcctgttaccactgcagaagtctgccgttatagtgtgaaagcagccatagataatatacaaacaagcatggccatgctctaaggaagctttgtttacaaaaacaggcagtcgacctgcttggctgtagtttgctgacccctggcttagatgatgaggaggagaaggaggagaggctgacagtgatgtttcatccagatgtcccattttaaaagaaatatggaaatgaacaaatcttcctgccccatctgaatcctcagagtcagctctgacatccccccacagctggtacattctttccccagaccagctgccaaatccatccctctttctcttttcccatccccactgccaccagtcctgggccctgcctactgtgacttcccaggttaaagtcactagagaacaggcagtcactgaaagagggtagcaagccaggagtgtgtggacaatagggagtggtggagacggtggagaaggtgtctgtccaaaaggggcagatcaggcccaggtagaactgtgggcccagatggccacttttcctgatttttcaacagaagccacaaatttgtattttttacctatgaaatctcctgattggtaaatattggcaactaattcagacttttctaaaatcttgcatcaattgagcatgcctgacccatgggcctgcagcccttcagcccaccatgtcgttcttctgccagcaccctccggggactgtacggtgagtttcacatttggagtcagtgggatcaagttgagagccccaaccttgacacatattacgtgaccttggacatgctacgtactcctaagagcctcaactcccaaatctgaaaaacaagcatacccttgcatacttaatcatgtgtacttccatttactgagcacctactgtgtacccctgagcacctactatgtagtgctcaggggtacacagtagtacttctgataacatgtagtacttctgatattcacaacaatcatatgaggggagtggactagtcacatttggttccattattcattcaccacccccaacaagtattcattgagagcctgctgtgtaccaggtaccatgccaagtgctggctattccaaggtgaatgaaaacagatgacccaatcatggtcctcctggagctcacagtctggcacatgaagatatgatataaactgttaagtgatgtgcacacatcattaatgcacacacacacagtcacatcacacccgtctattttgtcatccccagtatgagccatttcaacctccaagcttgctagttattacagtcatctcagttttgttttgttttttgagacagagttttgtgcttgttgcccagactggagtgcaatggtatgatcttggcttaccacaacctctgtctcctgggttcatgtgattctcctgcctcagcctcctgagtagctgggattacaggcatgcaccaccacgcccagctaattttgtatttttagtagagatggggtttctccgtgttggtcaggctggtctcgaactcccaatctcaggtgatccacccacctcagcctcccaaagtgctgggattacaggtgtgagccatggcacccagccactatagggtaattttttttaatcagactaggctcttgaagttgtttgtgaacagaaatttaactcccagtggcttaatcaaagaggaaatatattcacctatttaactgaaaaccagctataggggtatcaggcatgggtggatccaggagttcaaatgaacccccaaggagttgatttctctctactgtcagctctgtttttgtctgctcgactgtattcacagaagctctctctcctcctggtagcagtgcggccttccttatatcctcccagcttcctggccagctgcaagcatgggagtctctttcccaggagtcccagagagtctcagtgcatctcattggctctggatcagtcccatgtctgtccctgagccaatcagagtggccaggaggatgcctggttccctggactataagtcacatgctccactcctgagccagacatgggggtagcaggagctctacgctggaacgttggctgggaatagagccccaaataagaatggagtttccaccaggagaaggctgactaggtgctcaacggccaaaaaacactctgtcccacttctgttctggaaaccccggcacacatggagatccctctgcctccgacaggtcatcctgggctccctgtaagtctgatgggtccaggcccaagtggcagaagccgcccccggcctgccctcaagtctcattctgcacatagtaggcctccagcctcccaagtgaattaattccaaagttctgatgaggcagtccggcatggactccttggaatataaattccagtcccagggctaagcacgctgtttccctcctcccagcctcagtgcaggcggattctctaaatatcctgaaaaatacattccctcctttttaaaattcttcaccacatccacgcctcatctcagagcagcccgataatcaagttatcccggggtgctcaggattcttttggggctaagcatggggacatagaacgtccgtccttttgccctgtttcctgcccacacacatctccccctgtgaatgagaacagccctgtgagggaggcgtgagaggattcctggccccccagttaccaggggcctgggaacagagatgctctaacagggacgtgggcagagggcggggcggtgaagtcagaactggctcaggtccagggttcaaatcctgagggtagcagtgggcagcaggagcccaagcgtcaagggaacaggggtgagcccggggtttccagccaaggcagagctcaggagccctgtgccctgggccctagatcaggcagtaagatgcctctggcaaggcagaatgtcactgctggcctcgggcgggccttgttgggaggcccaggcagggaggaagcggcaacccttcgtaagcccccctcagaaggcctctgaggactctgtcccaagtcactaatccacagatgggcacatgccaccaaaggggtccagatgtcaagggcagaaagagaggcagtggtgatgagaaaagagtgatacaggacaagcgctaatggcagaagagggttggagaggggaagacagttgttagtgggaagggaagtgagaatgacctagagttgagtccacccgaaaagaggcttccaggtagctggcaaaagtgggcctgggtgttgggtggctctgcagggaggtgatggcagtgcacggccagtgtgggggcgacctggcagattctatgaacttcatgtgccccgccccttgccgcagcgtgtacacttctctgtctatctggagaagcctcagtcataggcaggagacggcgtgatggagcagctggttgtagctctgtttattactgaaagaaattagcaaagtccaccaatacacgaaataactaaatgaccgtgaagcatccctcctctggaagatcctcggcaaaggatgaggccggtctgccttatgtcctgagcccatcaggcagagtgggaaaagcaagttccagaactcctgaggtccttattcaaatgtcacctcactttagccttcctggaccaccttgtataagggcacccccaccacactccttactgcaacaaatcaccatctggtgcattacaccctgtgtatattactgattcatttgttaagtatctgtctcttctcataagaatataagccccatgaaggcaggaatgctcatttgttttgttcactgctgtatttgtcagatagataaatgaatatgtacagtatgatgtgattaataatataaaaagatgcataaagtgatactataatgtacctaacaaaacactggaaaggttattcccagtaggggacagaagagccaaggttatgggggtgggggggtggtaaggagtaatctaatcaaatgagacttcactgtcctttgtactattttaattttcacaaagaaaatgtaggcatatggttcttgaggaataatgactaacactcatttagacataccatgtaccagatactgtttgaatcattttacacaaattaacccatgcatttctcatcatagtctgtgaggtatatactgtgtctattcccaactgtcagatgagaaaactgaggcccagagaggctaagtaatgtaaccgggccacatagcctagtaagtgataaagcagaattcgaacccaggccatctggcttcaaagtccatgcactaaaccacagcccgtgggcccagactggtggtttttgtatggcccctgagctaagaatggtttttacattttcaactaattgaagaaacaatcaaaagaagagcatttttcacatggtatatacaaaaatgaatgtcattcagcctttaaaaaggaaatccggccaggcgcagtggttcatgcctgtaatcccagcactttgggaggccaaaccaggcggatcacttgaggccaggagttcgagaccagcctggccaacatggggaaaccccatctctactaaaaatacaaaaattagctggacatggtggcacatgcctgtagtccagctacttgggaggctgaggcaggagaatcgcttgaacccaggaggcagaggctgcagtgagcccaggtagcaccactgcactccagcctggccgacagagcgagactctgtctcaaaataataaaataaggaaatcctatcatatgcagcaacatggatgaaccttgagaacattatgctaagtgaaataaaccagacacagaaggacaaatactgcatgattcccttacatgaggcatctaaattagtcagacaatagcagcaaaaaggagaatggtggttggcagggctgaggggagggggaactggggagttcctgttcaagatgtatgaggtttcagttatgcaagatgaaacagttccagagatctgctgtacaacatggtgcttagagttaacagtactctacttcacagataaaactttgttaaaaagcatacagctcattttttttttaccacaataaagcttttaagagtaattttcatgacatgtgaaaaatacatgaaattaaaactgcatccatacataaagctttactggagcacggacatgcccattcattttcctgatagctgctttcaagctgcaatggcagtaatgagtagttgcaacagagacagggggcctgcagagtctaaaatatttactgtctggccctttacaggaacggtttgtgcatacttgctctaaaccactatgtatgcttctcattaataatgttatctgtggcggggagaaaaagatggacctgacccaaaaatacaaaggccttggctccagctctggatgcatggcttatttgtttggggacctcacttccttatctgtaaaatgggtataatgtccacttgtcaaagttgctgtgacgatcagctgagctaaggtatttgataacatgaagagcctatgatcattcattacgagttgtctggagcctgtggagctgctgccacccacacgcactgccttggccttggagggaagcccggtgcggagtgcccactcgagggaaacacgcttttgcctagggctgaggctggcagtctccgcagacactagctactcagtcggtgaagcttgtggatgcctgcaggaatcacctgaggctcagagggtgcttgccagagggggccggttgcacctcggggtcccagctgtggcttctcagccctgtggagctgtgcaggccagcagcacctgggtagagcctgactcctgggcgccgggttctggaaaatgcacctgggcctgtggacctccacccatctcaccctcctgctcacaggtctgaatttcagagttcttcctcatggcttgacccgggcaccccaaacacagtttgcccatctctgaactcagcctttcccccggcccaggccttctctacccttccctcaactgcccaaaccagagaccaacaggggtgggggtcacccgcccctcccgcaccccacatccacccagtggctgtcctggctgcccctgagcatcgctggatgctgcccccgccaccctggcccaggcctcctgttctctccctcagagagaacagggcatggctgaagccctgtggccggagggatgggtggctcttgttggctggcctggcactaactgcccactggtggagcagggtggcagctttggaggcaggtgtgtcatgtggcattgcggagctagcagagatcggggaagacttagccgaggagtggccactgaggaggatggataaggaggggagctctcagacatggagaaatctgcccagccaccaagacagtcctgattcttagctgaatggtggcagagagctggctgtgcacaggacactatggcaagagcttcacatctattggtgctttaacctgcctgtcagcctcaagaggcaggtactgtaatcaccccccacacactttgaaacattagactgtgggagcccctgacccaccctcctgggtctcattcctgccccggcctgagccctcccctggaggtagccagtatcctggagcttctacccacacatacctttattctttcatcccataggtggatatctcaaacaatgtacgatgctgtgtttgtgtccttagactttttataaatgatatcatatcatacacatccttccacaacctgcttttctcacccgatataacattgtaagatttatccacgtttgatccgtgttcatccacgtagctctgttctttttcactgctttagaatcccattgtatatcttctcctaggaatggaggttaatggtagctttatttttaaaaaagtttaaccacggccaaacaggcatatagttctaagatgaagtagtgaagatgagtctgttatgaagagcaacggtggcttcccaccccaccccactggcgggtggcagcaagtgtccaccactggcggttccatctcattctcatgccatttcctgacttgaccccttcaggccctgactgttgatgtcagggtacagagctttgcaccatttttagatccattgtaaattacctttgtcattttaagaacttttctaatacctttatatcacgttccaaaactatagcagcagctctttgatttatataacatatattatttttatgtaataaattctgtagagcccccttataaaattgtttttactccccaaaattaatccataaataatattcaaggagcaatatataaagaagcaagtaactttctccgcttctctcctcttcccagtcttcaatcagcattttgatatccttccagatttttccttgatgctcaaaaatatatgaggttagagtttggtttctcctcttcaccttcccttccctctgcccccacaaaaaatagaatgtttctgagtttgactctgttgcttgctcttacccttaaccatgtatcttggacaactttacacatgcctttttaatgtctgcacagcattgcatagtatggaagcaatgccaccaggtgtgttggctcatgccttaatacctacactttgggaggctgaggcaggaggattgcttgagaccaggagttgaagatcagcctgggcggccacttgctagctgtatctacttgggctaaccactgttagatactcaagactctgtctgtagagaccctgtctctacaaaataagaataaaaatgaaaaattagctgggtgtggtggcacatgcctatagtcctagctacttagaaggctgaggcaggaggatcacttgagctgaggacctcagggttacactgagctatgattgtgccactgcaccccagcctgacagagcaagaccttgtctctaatatgtatgtgtgtgtataatatatatacatgcatactgttaaacatatatcctcctgctggtcactgcaatgtttttgttttataaacaatattgcagtggccattcttgtgcatatggatatagtggatgagtgtacctgaaagagtgtctgtagatatatgaatacatcatggtatgtatatatgttgtatacttcagggtggaagctgtagacacctcttcacctttttttcttgaaaataatcactttttgaaagtaattgttttgggcagagctgctttctagcagagggtatatttcaagaagtcattaccttgaagaaagattagcagctaaatatttactaaattcaggaagagttgtatgggtgctgtggctcacgcctgtaatcccagcactttgggaggccaaggtgggaggatcacttgagcctgggagatggaggctgcagtgagccatgatttcaccactgcactccagtctaggcaatggagcaagaccattgctccattttttgctccatgaccaaaaaaaaattaaagagtataggcaaacctcaacttcttagctgagcttttaaagcctccagttctggccatttacttttcctccaactcttctctcctcttgcccaatatgtaagtcagttccttattttcctggagacattactgcatccccatcccttttttgtgtgtgtgctgctccttatatcatttctgcattttaccctctgacattttatcctctttccaaggagccagttgccatctgccctctcttctatttttagagcacatggcaagcacattcctgcctcagaccccgttatctctgcctggaactctttcctggatcagtgattctcaatcctgagtacccattagaatcccctggggagttttttaaaagtctgatacctgggccaaaccgcaggccaatccaaccagaatctctgggggtgggcccaggtatcagtaagctctccaggggattctggcaaaatccagtgatacatatcttcctatgcccagctccttctcatcattcaggtctcaactcaaatgtcacctcctcagagaggacctccctgactgccccagctaaaatatgcccctcacctcagctcccagttactctttgttacatctctctgttttatgatatttccttcatctgtcataacttttaactaccttggttctttatttatacatgtgtctgctcctgccccagtgtaggcaccccagggacttagggatatacccaccctgcatgacagtgtccccagagccttgaaaaaacttcagacttaggagccaagactatgtagtgctgggtccaacatttactagctgtgtgccattgggcaatttacttagcttctctgtgccttaatttcctgttctggaaaataaggattatcatcatacgtactttctatagttatgtcagaattaagcgagcaaatacaggtaaacacagaacagtccttggcacatcgtaagcactcaatagtgttagctattattcttttaatatctttttttttttttttgagtcagagtcttgctttgtcacccaggctggagtgcaatcatgcagtcgtggctcactgcagcctccacctcctgtgttcaagcgattctcctgcctcagccttctgagtagctgggctacaggtgtttaccaccacgcctggctaatttttgtatttttagtagagatggtgtttcaccgtgttggccaggctggtctcaaactgacctcaggtgatctgctcacctcagcctcccaaagtgctgggatcacaggtgtgagccatcccacccagcctattttaatatctatctaaagtgatctattgcaattcctgccctgttctccctatccacttctctgctttatgtccaattagcttagcaccatttgcatcatttgtctggcatttcatttattttacttgcttatttcttgtctgtctgctccctagactgtcagctccagaagggcagaaattgttttgttcactattgtgtccccagtgcctagcagggtgcctggcacgtagtggacaccagtatgaatacctggctcctcacctgttctcctgtctctccccaccccccaggattacctcacagacctcatcaccaatgacagcgtgagcttcttccgcacgtccaagaagatgtacccgcacaggccagtcctcatggtcatcagccatgcagccccccacggccctgaggattcagccccacaatattcacgcctcttcccaaacgcatctcagcacatgtaagcctcagcactctgcctgccagaggcactgcttagcatgaagggggagggtcaggctttagcaacagtactgtcaccaccatgacttcactgtgcctcctctctaatcctcctggtttaaagaccccaagaacatactgcttgtccatggtgaaactgggatgcaactccagacagcctgggcaacagaccaaggcaggagaatttttaacttgggatacacggcctcccaccaagaggtgtgtggatggaactgcatagaataggtttccttttaatgccatgtgtattttatttaagacatctaaaaacattcttttgaggagggggtctatagttttaccagactaattatttgccaccatttattgagctgtgggctatgtagcaggtgctgtgctaagcccttggcattattgtccagtccctgaatattcacagtgacccttggtgtaccagttatctattgccatgtaacaaatcatcccagaatctagcaacttaaaacaacaaacacaaattatctcacggtgtctgtgagtcaggaatctgggagtggctgttctgagcttctg

SEQ ID NO: 15832 - DNA, 128887 bp, Homo sapiens
ctcgggcgcgcacaggcagctcggtttgccctgcgattgagctgcgggtcgcggccggcgccggcctctccaatggcaaatgtgtgtggctggaggcgagcgcgaggctttcggcaaaggcagtcgagtgtttgcagaccggggcgagtcctgtgaaagcagataaaagaaaacatttattaacgtgtcattacgaggggagcgcccggccggggctgtcgcactccccgcggaacatttggctccctccagctccgagagaggagaagaagaaagcggaaaagaggcagattcacgtcgtttccagccaagtggacctgatcgatggccctcctgaatttatcacgatatttgatttattagcgatgccccctggtttgtgtgttacgcacacacacgtgcacacaaggctctggctcgcttccctccctcgtttccagctcctgggcgaatcccacatctgtttcaactctccgccgagggcgagcaggagcgagagtgtgtcgagtgagtgtgcgtctgtgtgtcccggcgagggtgcgcgctcggcgccgggagcgcggccagccgagtccggaggcatcgggaggtcgagagccgccgggaccccagctctgcgttcactgccccgtccggagctggacttcggggccggggccggggccgtgcgccggggacaggcagggccgggtcgcgggccgcgcgtcccccaggccggaggtaaaagcgctagcgcgcggagggctcgaggagggcaccgcggctgggccccccgcgccccgggccccagccgtccgcggctcccggcccgacgctccccgccccggagcgcgcccgcctcccctgcgtggaggccggcgggcaggcgagcggggggcggtagcgccgtgccaaggggctggctggggcagcgtggccggccgggctggggcgatttaagagcggtccgggcggggtgcggagccggactttggctggggcggcgcgcggggagggggccgggggcggtggcggcggcgttggggggcggggaggaggcaggaggaggagcagcagcgctcgccgggggatgcagcagcggcagcggcggcggcggcggcggcagcggcagcggcggcgcggagtcccctgcgcccagcggcccggccgggctgcggcagaggcggcggcggcgccccgctccgggtgaggttgccggggccgtgcgcgctggtgagtggggcgtggggggcaggtgggtggctgggggacgcggggctcgggcgggggctcgcggcggccggagccttccccggcgtgagcccggccgcgagcgccgcccaggtgagccggggctggtccggaccgcccggctccagccccagcgctgcttgcggaggtgggtccgggcgggcgggagggaggctccggcgccggccgtccgcagagggatgacctgtttgaccccgctggctggcgggcgggcgaggacttcccgccgcgcccctgacccgcggacacggcacaccgagcacaggcggccccgggtaggggagcgcgcctgggccggccatccgcaggggcatggccttgttgacccttagggtttagacccaagggaccggtagatgccagcccacgtggggcttgtccgggcaggactcggggaagcagtgggccggatcttcagagtggttggaaactcgcagacaccgaaaggacaaacaggatcgaaaaggcagacttcctcccaggccagggcagaacgagtttccatcgcctggcggagggatgctcccctccccggctcctcggggtttcagaagtctagcggtgaattctaggagtgcacttttccaaacattccttatagtagttcgttcattcgttctacaagcatttctggagcaccccctcgtgccgggcaccgcgttctgttccagggaaacgcggctgaacaggatctggctcctgcgcgccagaagctgccggttcactgggagggcagcagggtagagagatgccgtctcggggtggaagatggaaagggaagcctgcaatcctagtttgcacactggcctcggtccgcaactcccccacctgcacgcagtaggcccagcacacagtaggaagagcaagccagacctgcctgtgacgaccctctcctcctcctcctcccccttgaaagctttgattcattccctgcccccctttctggaaagtcttcctgcagcttgttttaatcactttttgagttaaaagtcaatatttaattaaccaagtaattacattcagcttacgtttcaatctgggtatttgctcatctgtgcgtgttgggacacccgccctctcgcccctccatctgtcccctgcctgtttcccaccgggtccacccccacttttggggcagagaaggggaggctgcgctggagcaggttctcagggggagacagggagcaggagagacgggctttctctggaggacacccccggatctgcgcgctctccaaatttcagcttgtagtgaatagtgaaggtgatttcttgacagcctctgcctcccattacagaaccaccagagggttctaattaaattagagccaatcgttaagtataggaacggggtagggaggacagaacgaagggggccccttccctgtaagagatgttctccccagcttcgtctctcccacatcatagagaagagaaaactcatccagacagcctgtcggatgtgtaatttagcgttctaataagcagcttgaaaggcgaaggtggtgggcttggcagatggcatgttggacctttgtacatgaaggcctcttccttccccagctaaatttatatacataaaggccgtgatgttggcatcactgctgcagctgagggtcaatgtgggtttggggtttgggctttgtgtgtacttcttgggttttttatttgaatttatggctttttctgaaaccctaataacatgttaaattttcaaacttgagagtagagtgatgagttgactgtaaaagtctggtcttggaggaggacagcatagcagtgtgtgtgcatgcacgtgcatgtcccccagttcagctgctgtccaaagaacccagttgatatgcagtttcacacctgatttggacctgatttgggagataacatttccttctcactttttctggcactggttagtttatctgcttggacctgcctcaagagggcagctgggttaaccaggcagaatatcacccaactctgtcaagctttggccattatctgaccttagactttagtcctgcagaaggagtccagaagccctgtcctacagaaaaatatcagcatttctgaccagcttgtagttaaaagaaaaggtttagtccagacttaagataattggtaacacttaagtagttttgtatgggcctgatctgaggcattgatctaagcccttataccttactcattaaatccacacaaataccctgttaagtaagtactgccattgttgccatattaaagatgaggaaacaggcacagagaggattgtgacttgcctacagctggtcacaggtagagctgggattcaagaggccctcaagctccggggtccacttggaaccactggactctcctccatgaccttggcctttgtcccagatgtagaagaaacacatatgcaggggaagaaaacaccttcagacagtcaaactttgcaaagtaaaaggcccttaactttccataaacccccactgttccgacagagagtccgggtttgtatttgaggttttttgccccaaggaaaacatgtgtctgcctggtgctttttcttctgcttatgagcagacacactgtcccctcccccagtcaaaatgcaaagggaaacatcaaatgcagctgatggaaaagccaggtgaaccatggtgaagatttcagcccactcagagcacagtggccagagagcaaaagctctcctagaggtgagaccttcctgtggttggtgatggagtctcgatggcctggccctgggggtggtgccagggtgctctgtgtcaggcctgggcggatgtggaagatgggggcctctctcaatgctgatctgcaggtgagggggccctccctgaaacctgctttctctgggcctccttggaatgggccttggtggagatctacagacagccctggcccagccggattgaaggcactgtctaattgggagggcattaagatcgttataattaattggcatcccgataaatggcatggttgcctaattggggtggttgctagggaacgaggcctcacttggagcctaaaggggaagaagcgctgggctggccacagttgggtgtcagggtacagatccagcagtgaatggaccggaagggagagcagtccatccgtatctgctggtgtttactgagcagctgctgtgtgcaagttgcaaatggagtatcagttaggggtacttgcctagaagaactgtaaagtaatcaggttcctttctcttgcaagcaacggaaaaagagaagaaaaaaactcaagccagcttaaggagaaaagaagtggacttactggttttcataaccaaaagtcttaaggtgactaactctagcttcagacacagctggacccacagctcagattttgtaatgagaatccattcctatccaccgctcctctgccttccatgaggctgatgtctctccagctctggggcgggcagtccctggcagctgtgggcaccgtggctaggagagccagactgcctggctccctgcccagcagtgggatctggggcatgctacttaacctttctgtgccttgatgttcacatccaacaaatgatgatgatcatagcacctgtctcctgcttgtggtaagcatgaaatgagatgatcaatgtcaagtgcttagcagggcgtctgacccaggtgagccttcagtaggcattgactgttaccataacttaggtgtcaggacagatgtcatggagcagaggggtctcatcccctctggtttaagcccaaaaggaaagaacaagcctctgatctggcaatgcacacctgagccccatggttccctctgattggactgttttttgtccaaaccagtcactggctaaggaaatgagttgccaacaattggcttaagccaggctcacaggcctctccctggagctggatggaggctgactgctgagaccccaaagcctggaataaaacagcacggggagtccccagtgaaagggaagcccggttgctggagaggcagatggccagtgcctgcgatgatgggccactaatgtgagcaatgctggccagatggacccatcttcattttggccaaggtggagactggggaaacacgctgcctgggcaatgcctctcccttccaccagggccaggaggcatcaaaggcctgacttttctgccttactgtctgaaggatggggcctggccttgatcctgtgctttcggggggccaggggcagtgtttgtctaacctcccaccatgagaatcatctggctgtatttgtttaaaaaggcaaagaccagatcctgttgaatcaaacttctagggagggtcctggatgctggggggcatgaccaatatgtcatgtgtatattctatatcagcaggagggtttggcgaagagagctctggagcgtgggcctctttgtcttcctgcctaatgcaggggctgtcagaaggcggggaaaatgctctaggcctggcgtgctggctcatgcctataatcccagcactttgagaggccgaggtgggaggatcccttgaggtcaggagtttgagaccagcctggccaacatggcaaaaccctctctctactaaaaatacaaaaattagccaggtgtgatggtgcttgcctgtaattccagctacacaggaggctgaggcaccagaatcgcttgaacccaggagtcggaggttgcagtgagctgagatcgcactactgcactccagcctgggcaacaaagtgagactcagtctcaaaaaaaaatttaaaagaaaaatgactgcatgatgtgatggggtgggaggcaactttaggcaggctgtcagggaggcctctgtgaggatgtgacctttgaactgtgacctagattttaggaaggagtccgccttggaaagatctgggggaagagcatgccaggtagaaggaacagctagtgcaaaggcccagaggcggtgggaggggcctgtccaagacacctgccccaaacacaaatagaagtcaagtggggtaggccaggcgtggtggctcacgcctgaaatctcagcactttgggaggctgaggcagttagatcactggaggtcaggagttcaagaccagcctgaccaacacggtgaaacctcatctctgctaaaaatacaaacattagccaggtgtggtggcacgtgcctgtagtcccagctatttgggaggctgagacaggagaatcacttgaacccgggaggcaggggttgctgtgagccgggatcacacttctgcattccagcctgggcaacagagtcagactctgtctcaaaaaaaaaaaaaaaaaaagtcaactagggtagagggtcaggagtaagtgggggagggcacgtcagagatgagaaatacaggccatgctaagaaattttagactttattttaaataaaatggataactgtctggacgcggtggcttatgcctgtaatcgcaacactttgggaggccaaggcgggtggatcacctgaggtcaggagttcaagactagcctggccaacatggtgaaaccccatctctactaaaaatacaaaaattagccaggcacggtggcgcacacctgtaatcccagttactcgggaggctgcagcaggagaatcgtttgaacccaggaggtggaggttgcagtgagctgagattgtgccattgcactctagcctgagtgacagagcaagactccatctcaaaaataaattaaaaaataaaatggagaaccattggagggttttaagtcagagaatgatatgatttgtgtttcaagaagatcctgctggctcctgtgagaggcgtgctgtgcagatggaagtggtatcaccgggactgttaggcaacagagagggcccgagagtggcttggaccgtggtggtatcaatggagatggagtgaaatggggattggagatgtattttggaggtagggcccacaggacttcctagtggattggattacagagtgagggaaagggctttgattctcaaccgagggtgattttgacacccagaaaacattttaacactatccggagacagtataggttgtcccaactggggaagggttgctactggcatctagagggtagaggccagggatgctgcttaacctgcaatgtacgggatgaccccacagtgaaaaatgattcagcccaaatattcatgatgtatcctgccaaggagtcaaaggtgactaggcagcctggtgcgtggtgattgctaaatagggaagataggagagaaggttttggggaggaggagtgatctggaattccgacgtggaaatgttgggtttgagatgaaccccacctggatgtctgaaagctcagtgggtggtgaacgtggatgtctgcagccggtcggggctggcaacctaagtttgggagttatcggcatattgatgttattttaagctgtgggactggacacaattatccagagagaatgtgttttgttttctagtgtggttttctccccccagcctccccctagtgcctgtcatgaatctatttgatgaatatttttagcatatcccacatgctcacctctctgacatttccaagaagttcctgaaggctcgggctgagcctccccttcttcatcgcctggtttctcagtgattaacagacagagctaaatattcattgctctgccacagatgcccttgggaaattgcttaaggtcatgtgggatctcgggccttgtaggcagcacgatgccttctgggtggaacagctgttggcatggccttcagagcttctcctccagcccaggccagggcttcttggaattctctgtaaccagaatgttttgaattccccacgttctcttaatgtgattccaaagcacacgttgcccagtggccctggcctctgccatggagcgtcatcttacagaaggcctggcccactgctctgcacacctgggcccagcttgaatcttagataaattctatcccaaactcagagttgttatggccaggtcttgtgtgtgtaagttggtggacagggccatccccagggaccacaaatagtaccaaagatgtgtttggccatgtggaagccagatgtgttaggggaagaatgtggccaatagcttttcttattggctcatggtcaggaccccagcgggtgacttgacccaccccagtagccagagaagaggagcttttttgtttttgagacagggtcttgcactgtcatccaggctggagtgcagtggcacagtctcagttcactaccacctcaacctcccaagctcaagtgattctcccacctcagcctcccaagtaggtgggactataggcacaggccaccatacccagctaattttttttttttttttttggtagagatgagatcttgctatgttgcccaagctggtctcaaactcctgggctcaagtgaccctccaaaagtgctgggattacaggcgtgagccaccctgcctggcctggaactttttgaaaagagattgaaaaaactgttagctcacagaagccttggagatgttcctgcttggtgaaaatcagaccatctgaaagccacatttctggtctgctctcgagacagatactatccatagacttctgattgcaggccacttatctggatatttcagagaccaggaaagcctactataattcttagtagcttagagtcctgatcattttaatgtgaattgaaatggtttcattatgaggaatcacatttctgactgacagtggcttatgcaatagaaacatttaattctcacataacaccaagtccaaagcaggggagtccaggcgctggtttttcagtacaacagtgtcatccaaggtcccaggatctttcaagcctcttcttctgtcctcatcatgtctttggccttgttgcctcatagtctcaatatggctgccacagctccagacgtcgcatcaccctacaaagtgggactataggacaggactccttgctgtctctcttttaatcagagagtaaaatccttgccagaacactcccaccctagcagactttgctttctgtttcattggtccggagttgggttttgcactcacctctaaatcaaacactgggaaaggacctggctccttcctatgcttcggatctcagctgaaatgtcacctccctagaatgctggaaggacaacctgttttatgttttataacacttatcactctctggaattagcctggtttgcttatttgtcctttgtcttctctctcctcactaaaaagcaagctctgtgcttgtagggacattgtctgtcttgttcatcgctgtatccccagcactgagaaccagggtggcactctttggatactcagtaaatttttttttgaatgaaggaagcaagaaaagaaagaggcttggagagctacaggcacatctggctagcatgtttgctcgaaggtgactgctcagggcaaggatgtcaaaacctgttagtcatttgcaaaaagctaagcaggtggctgggaggattggtttcatacacactcacttgctccccagtgccagagctggggttttgtgctagcattgcttgcagaggaaggatcgtcccctttatgccacggcagggacctcacggccttgcagaagggctggtggaaccctccacttctgatgactctggggccaagctagtcttccaggtcagtggtgtgacattctaatgagggctcttgggttaaatatttctgcatgtgcccttgaaaagacaactcccttccctaaattgtcccttcctgaaagaacagcggtcacagcccaggagagcagcctctttaacctccactccccaacctaccctcctgaaagctcacatttaccgagcactttgtacaggctagtggtggtttaagtgcgcgctcctgtgaatgtggaataactcagcgatgtggggatcttccaaccccgttttacaaaggaggaaagagacacaacgaagtctctccttgctctgccatgctggtagaataggacatcacaggccacctaaccaggggctctgttcagctcgcagaaatgttttgtttgaaccttctaaaaagctgtcagatttgtaacaactacgagatttcacattttaaaaatctggattttcagcttctcctgaaaaatggggagatgtggtccccaccatcccctatagcctgacattgtgaaccaattcatttggcttttcattgcactttcccttctgtttttctcattgtggagcaatatttctctgttccatctctaccaaaagtggccagatgagagctggagaggaagtggggtgtggagttttcttatgcgtccacttcacccgtttacattatctgcctggcccacgtaggcatttgagtttgtctcccgttgtgacactttgtacccaatggctacacttccagggacattgcaagtgtccctggacacttacattgtgcattgcaagtgtgtagtaataataatgtctaatatctattgattactttttgcccagcatttcatcatcacagcaagcctttgaagcagggactaatatcatcttcactttatcagtaaggaaactgaggcactgtgtgtgatgccctcactagaacaggaggtcctgaagcttgttcatctttgtaccatctgtgctaggcttactggctgtttgaatgaatgactaaaggaatgaatgaatgatgttctcctccaagtgttcattagccgaagaggctgaaagtcttaacctcatagtcatttgtgacatttctgttgggggaatgggctctgatcagtgtcactgaggattcttgggttgtgtttctgctgtataacaaaccactccaaactcagtggtttaaggtaacaacattttattttggacgattctgtggtttgaccaggtggttcttcagcttcatgtgatatcagctggcaggtctaaaacaaccccattcaaatggctggcagctcttgctggtcaccagatgggagctcagttattctccatgtgggctctgccctatggctacttgggcttcctcgcagtatggcaggttcagggtagcctgacttctaagagtgcaaaaatgaaagctgccacggtctcttaaggcttaaccgcaaaaccggcacagcatcacttctgccaccttctcttggtcaaaacaggtcccaaagccagcccggtttcatgaggtggggcccacacaagggtttgaataccaggcagtgtggctttttggagtccaccaaagtacccattcatcacagactgcaagtagcagagcccaacacttactacctcaagctggaacaggatttactggggggctcaggaaaggacaggtcaggaactgaggaaattctggggaccttggcgcaggagttactagcagcctcctgaaggagagtttccatcccaatgcgacaaatgcacccctgctttttctttctgcccttgacactttatttgacagttggggacatggtaagaaagtctgattgaccttggtcacatgatcaccccttggcagagaggatgggggcatcttggcagaggggagggagtcctcaaaaggaagctggggtgctgtcaaaagaaggggaccagatggacaaaaattgttagaaatctctgcaccgcccctgcataggtgactccacccctggcagagcaatgaacattttaaaacgagtgaatggactttgaaagtccagtataagtagaatgcccaaacctgtgtggcagcttctccagctccagggccccatagctcaggtgctgctgggggtctggaagcttctctccactttacggggcaaagtcaactcctagaacccctgccatgcctcaatatccccctccagaagataggggcagtttgcttctggctcctgaaaggagagcatgcgcggtaatgagggacctgggctcaatgcctgcactccctcctcccagaccccgcctcaccagtgacactgccttccaccccaacacctggtgacacccagtgagtccccgcagcaggggaggctgctagtaggaaaaactgatccagactaatctcagctcgcagagcctctgacccgggctttcctcccacttgccggtctatttccggctgctaattagattgcacagcaagccacattgggaagccgacctgtcgttccaaaggcactccactcgcatctccaaatgtagcaggtgatttggtaaaagttgattctgactccttcccccagcttctaaaataattgtaagtgtcgggctgtttccaaggtgaactaatgaacagctcatctgctaatagcaggggcaagctggctgaggacggcacgctcgcctgtggattgggtgaaaaggaaagaagtaattggattattaataccaagccgtcaaaataccttttattccttttatattcttctggaaggaaacgacaatctctggaaacataaatacatgttctgtgggggtaagcagggctaagaaaatgtggggctgaaaaggaggagggggttaaaaaggtggaattgtcagtccccactgtggcagtctacactgagaaccagcccacagttaggcgtgaataatgactctgttcaagtcggactttattgcttttggccaaaggccttttgcagaaataactttgtaactccctgccagggaagcttttgtccacagctgagacaaaggaacaaagaacagaggtgggaatttctgtatctgatttctacttcctctaaacagccagaaaggacagcgggtgtggcctgcccagaaggcatgggctggggcaaaggggtgtccagcctcctgtgggccacactgccgtgctcggctgcaccatgttggtttcattgtgcacattcccaccccagggcctttgcacttacttcctccgttcatagaaagcattttgcccacaactggcttctcgcccgcctctgctctcagctcagatgccatttccttatgccacctcctcatgccagagaggcctttcccaatttactgtccatcctatcacctgacagcttcctccaaagctcttaagacaatcttcattcattcattttctcctccaccaaggtatcacagctccatgaggacagaggcctggcctgccttgtggccactgctgtttcttagcatgtggcacatagtaggtgctcaggaaagattggatagcttggaagagtcgcacatagctcccaggccaagctccagcggggctttatggagcccgctcagtgcttaaaataggttgaaagtttttactttggaaatggtgtttccggtgtagtccaggcgccaccccatctctatcctaaatctaggccactttactcactcaggtctcctgcccgacccttggatgcatttgcatatttgtccctgctttagacaaaggccactgcaaacatatctctctccaaaggtcaccagacaacatccagacttcttgcattgccaagtcttgtgccagaccggtggcctccaccaaccaggtcccattgactggatcaaggtgtagtcttcatcttagccgtccacgcacagggcgtaagtggcgttgatctcatcataagcaggtcatggcaggaggagggtcgggcaggagacctgagtgagtgaagtggcctagattcaggataagagacggggtagggcctggactacattggaaatgccatttccaacgtaaaaacctttaacttttcctttttccccttttccttttctgctctcctccaagcctctgggtcatcaaggagggaatcgcgtgaactcctcctttatggtcttcaaggagacctactcccaatgtaaggggaagcgcagaggccttggcaagcaagaatgtaaccacaatgtcattgcctttatactgttgccatctaagtatggcaggggttctcacctaggggcagttttgccccctagggggacatttggcagtgtctggagatatttttgattgtcacaactggggtaggtgctacttgcatctcatggacagaggcctgtgaacaccctgtgatacacagcacagtcccccatcgaagaatgatcctgcccacgcggcagtaatgccaaggttgagagacccaggtttatggcaatgggtgctggttcctccaagatagacttttctttctaaataaatttattgaaataagaaagggaatgaatgaatgaatttaggcccagatttgggtattctacttataccagacttttaaaaattcatttatttattctgagacgctggcatatgggatggagcacagaggttaacgatcagccctgtcatccctttcggagcagatcaggctgtaccatttgcctcaaatcaggagcccctgccctggaagctgccatcttgccagaaacttcctggggagctgcctgtaaaaaactctagcagcagttgattctggcccaggtggaaaagctgtgttatcccaggcggagttccggcaggttgggagatgtttccaggtctcctgcccagccaggcatgatgagcatccttccaagcttggccccggagccctggcccagcacccccatttgaagcctgcagagcctcatcatcactgcccccgcccccgccccatcctgccactgacaagccaatacctgcctgatgagaggggctcccagggacagcagccttccctcctggactccagggcaacctccatgttgttgggcggctttgagcacagggctcaagggcagaggctgagttggaaaatttcttgcctctgcagaagggaagagctgggggaggttggggcctttttccccaaacgaggtcttattcttctgtggggttttctgggtttgttaggtggcttcctttctacttaaaaataagctgggagtggttaaaaaatgggaagaaatcaatgtttctggcgtacatagaactgagcagatgtgttatctagaataaggaggagaggttgttgtgactctagctcctggtacgagcccttcagttcaccctcctgccctgctcagaaccccctggacctgacatcgtggctttaacacccttgggtcatgtgagaaggaagagtgcccacccaggactttccgaggctcacagattctttgaaatggacgtgagcacaaacgcccagccccgacagccagggatcagatcgggtttcacttcctaggagggaggatgtactgcaggggaggcccacgtggctgccccaggcctggccagcctctgtgacccagcaggactgactgttttacgggatggccacacggtaccctgcaggctcatccatggtgggaccttgatgctcctttgttgagatgtgggtctgtgtcccctccccttgaatctggccagacgtgcgtagccctggtggaaggaacaccatgggacagcagaaaagatgagccagctccccctggatcactgggaccctcgctgttgtgtaagaaatcagaccccactgcaaggccgccatgctgtgaggaagcccaagccacactgaggccacatggaggtgcccactccgcagcccctcccaagctcccaaccgactgccagcaacaactgccagacaagccaaggccctgctgagccttctcagcagtggcctcagacgttacaaagcagagaccagcccttcctgccatgtcctgcgcaagttcctgatcaggagcctctgagaataaaagaaagattttaattcaccactaagttttgcggtaaattgttacacagtattagtaactggagcattcagccaattccagtcttcccaccgtgcagttattcattcattcactgaacaatattcagaaaccgtccacctcttgccccttctttgctcccacctagtcatctcagtggcctccctgtgcctaccctcatgccctgcagtctgttcccctcacatagtcagaaggattctgttaaaacttacatcagggctgggcatggtggctcatgcttgtaatcccagctctttgggaggctgaggtgagaggattgtttgagtccaggagttcaacaccagcctgggcaacatagcaagacctcatctctaccaaaaatttaaaaagtaatcgggcatggttgtcctcacctgcagtcccagctgcttgggaggctgaggtgggaggattgcctgagcctgggaaatggaggttgcagtgagctatgttcgtgccgctgcactccagcctgggcgacagagcaggactctgtctcaaaaaaaaaaaaaaaaaaaaaaaaactacaccagatcacatcacccgcaagctagaaccccccagcccccttcactcagctccgtgccgccatgcgtgccccctttccggccctccctcaggcatcttcctacctcaggacagttgcgctttctgttccctgtgcctaggatgctcttcccctaaatatccacaaggcatgttccctcccctcctgcagggatccacccaactgtcatctctcaggccttcgctacccaacctatttaaagttacaccccctcactccctagcactccaacctccctccttaggacttgatctccttgggacacgttgcctcatatgttgtgtaatttattttggtgtctgatccatgaaggattgtttttcctgattcccagcactgaagaatagggccgggaacatagtaggtgctcaggaaatctcggctgcctatctggaagaattagcacctcggctctgccaggagctggggccgtggcgtcaggcaaccaagagacagcccctgcccatgcgagcttctggtggagggatgcccctctacaaaataaaaacccaggccaggtgcagcggttcacgcctgtaatcccagcacattgggaggccaaggtgggcagatcacttgaggtcaggagtttgagaccagcctggccaacatggtgaaaccctgtctctactaaaaaaaaaaaaaaaaaatacaaaaattaggcaggtgtggccgggcgcggtggctcacgcctgtagtcccagcactttgggaagccgaggcgggtggatcacaaggtcaggaaattgagaccattctggctaacacagtgaaagcccgtctctactaaaaatacaaaaaaattagcgggcgtggtggtgggcacctgtagttccagctactcaggaggcggaggcaggagaatcacttgaacccaggaggtggaggtatgcagtgagctgagatcacgctactgcactccagcctgggcgacagagtgaaactccgtctcaaaaaaaaaatgaggcaggcatggtggcgggtgcctgtaatcccagctactcaggaggctgaggcaggagaatcacttgaacctgggaggtggaggttgcagtgagccaaggtcatgccactgtactccagcctggatgtcagaggagactccatctcaaaaaaaaaaaaaaaaacacgcacacaaacacaaactcaggccagagagtaaatagaggaatcacaagttatgataagtgctctgaagagagcagtgctgggactgggggtgggggtgaccgagcagggcctgcttcagggacagagggccagggaaggcccaagtcacagccagggtggccgagtcaggtccagaatttgtgattcccacacccacgttccttccgcttttccacactaccttctcttatcagttgtcaaagaaggatgggcgagttggccctcagtaaggcggagagttgggcacaggccaaggaggcctagcgtgggctggtaggccgtgccctgaggcctctgttcacacaggcacgaggtggccaggaagccacgggagtcagccctctgcctccagcccgccccccaatttgggttcatttggttgcaagtgagagagcaactaggaatgacctaattgaaaaaagggaatttcacttctgatcttgaagagtcaaaagtatggggaaactgacctacaaagaaaacagaaactagttaaagaggaatttattgggcctgaaacaaagaacccaacccaaatcttcctctttcaggctgggctggatcccaggtgtccagtgctgttaagtcccaagtatggtgcatttcacagcactgctgtgttcggtgtgttggcttcattcccgaccccactcaagacaaagtggcgtcgctgtcttccctggtcctcacattggaaccacatggagtgagttagccagttgtaaagactggatgcctcttcctgaccagtcaggccaaagggcctggattactctggcccgtcactgaggcaaggggtggggaggctctgattggcccaggtctaggatcccacgatctagcattgtagctccagaactggagcctaatttgaactttgtggaccaagggtggggagaaaaggatcccccaatattttttttttttttttgagacagagtcttgctctgtcgcctaggctggagtgcagtggcgtgatctcagctcaattctcctgccttggcctcccgagtaactgagattacaggcacatgtcaccacacctggctaatttttgttgtttttgagacacggtcttgctctgtcacccaggctggagtgcagtagcgcaatctcggctcactgcaagctctgcctcctgggttcacgccattctcctgcctcagccttccaagtagctaggactacaggcatgtgccaccacacccagctaattttttatttttagtagagatggggtttcaccgcattaaccaggatggtctcgatctgacctcatgatccacctgccgcagcctcccaaagtgctgggataacaggcgtgagccactgtgcccagcctaatttttgtagttttagtagagatggggtttcaccatgttggctaagctgatctcaaactctggacctcaaatgatccacctgccttggcctcccaaagtgctgggattacaggtgtaagccgccacacccggcctcagactcccaagaaaattgggagctgttatagaaaggagataatcctgggtggcccaaacctagcagagaacacaagccagcatttattgggcacttgctgcatacagatctgttgaaagtctccgtgcatgttaaaccatccactctgtaggcaagtgcttgtaggtgtcctcactttccagatgaagtcactgagaagacaagaggttcagacacttgcccaacctctagtaagtgacggagctgagatccaaacccaggcaggctagctctagatcctaccctcctcctactcagcgtgttccctgtggcattttcccccaagtaagtatcaggctgtttgcttacctctgtccgctgtttgtcagctctctgagaatcgagagttttgtctgttctttttttttttttctactgatcatgaaacagtacaaagcaagtggcagatgctcaggtatttgagggtgtgaattatatggcctgtcaaacatctacccacttgacatacaaaacattttggtgctcagcttcctaagacttgaatacattgtttctaaatttcctttgtgctctaactttaatccatggccactctgttctcacagcttgccggtggtttgccattatttccagtcctcttttctgatcattctcacatgtagctggaatctttcaactccagcttttcctatgttgacttagagtatcacttccaggagggcagggagctttcttttcactgctttatccacagtgccaagaactgtgcctggcacacacgagccttcaggaatgtcttgttacatcaatagttaggcaggtaactgggttcctaagccctgcatttttgccctacaatctttatgccctaatttcctttccagatcctgagcctttgtcttgaaacctgatctttccctcctccctctgaatgacccttctattgtctcctgccctgttcttgagagccggcttggttctctgcctccatttggaattccaagaacaggcaaggagagccacaagatggcctgggctaggtaggggagacagggagaagctgtggcccataggttacaggagcttctgtcctttctttgacggccccaaagaggaggagagaaggctggagaaagcctgtagccaggaagaaagggagacacaggggagtgtaaagtttaacagatgtgcgtgtgtcatcccctgtctagacagcttctgggcttgtgaggtttgggaccacactttcccatccctccaggggcctctctctgtttcctctgcctgctctttgcccaaactgtttctcctgcctgaagcatcctgtcctccaccctcctcttcactggccatccaaatcctttggattcttcagaactttgctcctgttaggctgctcagtttatgctaagtactcctccaggaagccctccctgactgctcccaggccagcagtttcccctttcctcttgctgtttatacaacacacttaacctcagtcccttgtatcacttgttgctttccaagtcagcataagtgtcaaaagagtaggctctggggtcagaatgtctgtgtgcaaatagccatgctggcttgcttgttttgtctgtcacttggaggtggcacatccaagtgaacctcccaggggacagggaagagtggattactgttgtaatcgggcaggattctcctatcactgaacactgcctcacatatagcaggcccttaataaatatttgtaaagtaaatgaaggaagagagaaatgatcaggctccctggaccacctgaggaggccctcaggtctgttgctgggctctggccccagcccgtgggacatatctgcacacccacaatttcctttcttccctcctctcatgagtgtttcccgtctgaccaatgccgccttctgcctctggccccttcttcctctcccaccacctcaactgcctaattattaccaaacttctctctcctgtttttttttttttgttttgttttgtttttttttaaggcagtgtcgctctgtcacccaggctggagtacagtggctcgatctcggctcactgcaggctccacctctgagttcacgctattctcctgcctcagcctcccaagtagctgggactacaggcgcccgccaccacgcccagctaatttttttgtattttttttagtagagacggggtttcaccgtgttacccaggatggtctcgatctcctgacctcgtgatccgcccgccttggcctcccaaagtgctgggattacagacgtgagctgccgcgcccagccctctctcctcctcttgttggatttggaggtggagagaagatgggaagggaggaccaaagggacagtattcagcacccatgctgcacgacactgggcaggttctggaacctgtccgtgccttatcttccttgtctgtaaatggagcatcccaactcacaaggtggttgtaagggtggcgtgaggtcacacactaaaagtgcttagaattgtgcagggcccctgatgttagctatcattcattattgttcttctagggtgtttcctgtgttggtctgggtgctccctgttgcaaatgacagccctaattcggactctcttaagcagcaaagggcacttttttgagtctgtacctggctacaagatgcaacttggtccaccccattgtcaccagcatcctctctctcgggctccatccaatgggcggccaccatcagcaccatattcatgcctcctggcacccagcacagtctcctccagcctccaggactccctctcgcttattggccagacttgggtcacatgtctgccccaggaccaatcgctgaagctagagctggaattgctgattggctccacctggctcacatgcgctgccctgcagtcaaaccatatataagggggggtgggaaataagagcacttgtggcctcaaagcactaacaggggctgttaccaggagacaggagataattctttgttaagccagtaaatattttgaatgcctgctatgccgcaagcattgttttaattgttgaggatatagatctgaacaaaaatgacaaaaacctgtaccttcagggggctgatattctgctggaggacatccgcaaagaaataaaggagctagctgtgagaggtggtaagtgctactggggagggcagagatttcggttttaacctgccaaggtgaaatttgagcaaagacctgaggagggggaagaagggatggtgaagataacctgaatgaaggctccaggcagagggagcagcaagttcaagggccctggggtgggctgtgctagcatgtgcaaggaacagtacagagaccgtgtggctggaaccaggtgtgcaagggagagaggggaaggcaataaggtcggagaggtgatggagcaggttgggtgggttcttgtagcccctttggagggtttttgcgttttactctgcgtgggatggaagttattgaaggccgttcagtggaggaaggcaggcccttgcttttgttttaacaggatctgtctggctgcttgatggaagggacgaggtagaagcagggaaaccagttaggaggctgttggaatccaggcaggattctcctatcactgaacactgtgcctcataggaggtccttcatacgtatttgtaaagtgaaagaaggaagagagagaaatgatcaggttctctggaccacctggggaggccgctaggtctgttgcggggctctggccccagcccgtgggacgtatctgcacacccacagtttgctttcttcccgcctttcatggacatttaccatctgaccagtgcctccttctgcctctggccccttcttcctctcccaccacctcagctgcctgattgttcccaaacttctctctcctcctcttgttggatttggagatcctcagaggaaaacagcccatctgggtctttctaaacaggtctggatgaggtcccaggtgtttgttcaccgctgtggtttgtggcattgggaaggtgagggcatcagtcactcagacccgttcctcttggcagatcggcagagaaattgagaactaaaaatgatgtttctaaatgctcaggacgttagctgtttccagagatgtctcctgggctggcgagcctttgccaaggtcctggagaagactcaggatggagaggaggagccagagagacctggaaaggaactggtgggaaggagaggtgttgtccacagcagggatggagtggcaggcggctggtgctgcgtgagttcactgggtgctctctcggttcagccactttgaatattttaccaagaaaaaggaaaaaaaacaaggcagaatcccttgtgtcatctttaattgatttcttcagcatccggagagaaactggcatgaggccacgagaagtctgagccaggggaattcatcagaaatcgacccactgatgacttgatctgatgaaataattagctcctgttattctctggcttctggtgccggagctttgacttccatccagaggagagcgggtgatagccgcccaggagtggggggtgctctgaaaccaacatgggagccaggaacgaagtccagctgactgtgccccgggctccatctttacccagcccagggctcccaatgaagactgcccttcccagcccccctgtaccctggcatcacaggcccagggccaaaaaggccctcagagggcacctggccacctggcaaatgaggaaactgaggctgggagactcttaggaacttgttcaaagatctgcttctagggggtcctggttgagctgcccaaatcgggccagactaggtttgaaccccttctctgccacttacccatatgatcgggggaaagtgattttaactctctgtgcctcagcttcttcatccataaaatgggtgaaatattgatgggtgggtgtgcatattaattgggttgacacctgcaaacagctcagagcagagactggagtgtgctgcaagctttcagaaaggttttcctgtgattggtttctggtttcagagagttgctatttgtagggcaccccatcggaattctcccaatattagcactccacgtctgtctctctgaaggaacgtgaatgtgcatcttagaacgctggctgctgcaatcgtagtttcaagtgcaaagcatcccgtagtgtttcccgatggagggacatgggccactgataatgtattagtctgttttcacgctgctgataaagacatacccgagactgggtaatttaaaagaaaaagatttaatggactcattgttccatgtggctggggaggccttacaatcatggtggaaggtgaaaggcacgtcttatgtgatggcagacaaaagaagatgagaaccaagcaaaaggggaaaccctttataaaaccgtcagatctcatgagacttattcactaccatgagaacagtatgggggaaccacccccatgattcaattatctcccaccaggtccctcccacaacacgtgggaattatgggcgctacaagtcaagatgagatttgggtgaggacacagccaaaccatatcagatacacaacatagtttgaggattactctgatttggggtggttcagggactgattcgatggctagagtttgtctccttttcagctgtctggcagcctccagttacctccagcagaaagtctcagatggtgctaatgtgctttgactcctttcaacacctgctaatctcacttcaaaagagagtgcgagcgcgagggcacgcgaagcctgggaagctatttgcatcaagttccactgattcagctttctttgacttttatttgtacaattagctctacagggaagcgatgtccactttccatttatctttgggtaggaagttttcttttcccaaaacatgtgtttgtgtttttattttaaaatgaggccatttaaagaagcacgttaagcaaataatcactgaagggctctgcagattcagcagaaatcagggccgtggtccttgaacggaaagagttgggaaatccgagtttcgtgatgagaagcccacattgaacggtgagggagggcagaattcacatcccatccctgccatcttctgtctgggtggccttaggacagtaatgaaacctcagttttctctggggctaataatagtacttgcaggagggagccttggtggaggttgaaggagatttcagagtgcctgacgcaggacagctgcagcggtaggatcactctaataatggtttacattgtggaatatgtatcccagttagtactatggccaggctctagtcccagcacactgtatcaacacatttaatcctgcacacccatttcacagatgaggaaactgaggcacaaaggtgttaagttactagctcagggtctttcagcaagtaactccaaagtccacatccttaaccatcacaccacgtggcataaagcaggtgcccagcaggcagttgccgcagtggctctggctgtcatgaggtgtatgtttctgcagacgagagattgagaaggaaggtgttgttcaccctctggtcccatgaaactcacagttctcatgtcagacgactgcatcgagtgtgtccccagctcccctgaaattgtgactctcagagccacctgggaaggaggcattgagcggagcctgcttcctgctcccaggggaggtgctagaagggagacttgctgtcctggccagcctgacataggatacaggtccctgaatgaagtaaattagggtgcgcatcagggcagctgggagagttgattgaaagcactgttttcagaggcaggtgggcaaagggagcaaagaaatgatgctgcaccgaggaaccggtagcaacaggagcccttactttcccgagacttgatggggcaagaggagggagaggtgaactcagaactggggagacgctagagccaggaggggccccaggcaggagctgcatccacacacacagacacgaaggctactgcctggggagctactgcgtgcgggaggagaataaatgcacggacttcccaccacctcccatgctgcagcctcccagccggaagccagagagcagggacgtgccgaccgtgccatctgtagagctcagcctcccagggtgccaagcagagctgggggagaaatggagcaggagtgacccttcctggggtttttcaaccatagcgctgcccagagaacacagtggccagctcctcgttggtgtccatggagggtggctggggcaaggcatcagtgatggacgcctctgagccatgtagacccaagctatggcacggccctgccaagtccagcttccctcactctgcagaactcaaaggaccttagcagaacctccgttcctttatttatctatttctttgtgccaaggcctggagacagccatgaataacataagcctgtctctgtcctcagggagctgaccccctagtggggaagaattggacaataaataagaaattgcaggctgcagtagtgattacaagagaaataaaaccggttataaaatgcagagtgcctgggttgggggcccccgctttaaatagggtggccagggcaggcctctctgaggtgatgacgtttgttcttttgacagaaagagccaggagtacaaagcaggagtttgttgttgttgttgttgtttttgagacggagtctcactctgtcacccaggctggagtgcaatgacatgatctcggctcactgcaacctccatttcccaggttcaagcgattctcctgcctcagcctcccgagtagctgggattacaggcatgtgccaccatgcccagctaatttgcgtatttttagtagagatggggtttcaccatgttgatcaggctggtctcgaactcctgacctcaggtgatccacctgcctcagcctgccaaagtgctggaattacagatgtgagccactgcgcacagctgcgggagttatttttaaaagagcaggtgcaaagaccctggggcaaagagaagcttgacttgtccattcgacagaaagaagccagtagggctggaaaggagaggtcgaggagaagtgggcaggggccagatctcacgggccagggcagccctggcaagaagtttgcatcttatcctgtgagccatgagcagccagggaaggtgcggcaggtgagcacaggactggcactaaggtgaggcgagtgcctggcacttgtgcagcctgggagcgagcacccccttcagtctgtacctgcacgaggcactgtgccctcccctgcccagtgctgtgatctgatctgtattttaggaagattcctccggctgccctgggaaaatggaggatgggggcagggaagagggaggcgggagacccctcaggccaccttgcagtccccaggagagatgaagcaggcagcacatccccctgctgaacccggagaccttgctgagcctctgagtcatgactttgagctgatggctggggttccccatgaagggcaaggacaaacagaccctttcaaggtcacagcaacacagccacccccacagcacttggcttcctcccggcacatctgcaggctgtggctctctcgctcatgctctcttgttttaaataaatgataccaaaagtctatatctggacaggacttgaaggctcatttcctcaagaagtgaaaaaatgaccacggagagcaaagagcagggcgagattagagacctgcttgagccagagtcgcgtccccacctccccgcacccaccttcgctggtgacctagtctgacctggggccaggggggtgactgagggcacagtggcctgtggcaggtcttccccctccaccttttagcgctcaattttctctattgtcatttcatttattctgcaacttaaaactaataggctgggcacagtggctcacacctataaccccagcactttgggaggccagggcaggtggatcacctgagttcaggagttcaagaccagcctggccaacatggtgaaaccccatctctaccaaaaatacaaaaaattagccgggcgtggtggcaggcgcctgtaatcccagcttctctagaggctgaggcaggagaatcgcttgaacaccaggaggcagaggtcgcagtgagcccagatggcgtcattgcactccagcctgagcaacaagagcaaaactctgtctgggaaaaaaaaaaaaaaaaaaaaaggaatacttttttgcccaactacaagatcccttaacaaggggctttcacacgcatccccagcagactgaaatcttacaacagccctgtctactcattttgttcatggggaaaccgaggttccaaacgggcttgctcacgggaaaactgagccagtgagtggaagatctgccactcacacatgccagttgtccagcccaaaacatccagctccaggctctcgtttaaacccctgattgaatcccccgctgctggggagctggaacttcatctccctcacctctgtaccccacggtgcgggcagatgcaagaggacggcaaatattcaccccttgagaccagcccgctgctgttcctctccctggggacgatttgtctgtggagttgggtggattattcagagacggctgttatctgactcgggtcttgggctgccaccgacacatcagaggctcactggatccagggaagaaattgtttctgcagaagtggccacagaaggcttttctgccagtctgttgaccaagcaaactgtaaagactttgctaacttcagcggagttcggttttcactctgccatagccacccctgttcaaagaaactcccattgttcatgccagccgccatacaaatcattatgcaagaatgagcagccggcagccttgacataaatattgacctgattcttcctcctcctctagatctgcgagtgaagagggacgagggaaaagaaacaaagccacagacgcaacttgagactcccgcatcccaaaagaagcaccagatcagcaaaaaaagaagatgggccccccgagcctcgtgctgtgcttgctgtccgcaactgtgttctccctgctgggtggaagctcggccttcctgtcgcaccaccgcctgaaaggcaggtttcagagggaccgcaggaacatccgccccaacatcatcctggtgctgacggacgaccaggatgtggagctgggtaagcctcggggccccagggtggcacctcggcccctcggagcagggtccctgggttaggctgaggctcctgaggcaaggcggtggtgttgatgcgtcgtgctcacttttgagtacattgaaaccaagacacgggccacccacacgtgtttggggtcacaactgggtcctcaaggttaggggtctctacccttctccagttgcacaaccgttcctggatttctccaaagagttaaagagaacaggctgggcgctatggctcatgcttgtaatcccagcacgttgggaggccgaggcaggtggatcacctgaagtcaggggttcgagaccagcctggccaacgtggtgaaaccccgtctttactaaaactacagaaatgagccaggcatgatggcgcacacctgtaaccccagctactgaggagactggggcacaagaatcacttgaatccaggagaaggaggttgcagtgagtggaggtcatgccactacactccagcctgggtgacagagtgagactctgtctcaaaaaaaaaaaaaaaagatgagacatgagcctggagccaaattttggaggctcttgtgggttgtggcaaagactgtcaatcattgatcccgtgaagggtgatccctcagcctctgtccactcttaaaggataacagcgtgttgttggtggcaacaaatgtgaaggttgactaggttagccttgacaacctgaatttgtcttttagctaccaggaaaaggcaatttacataaaaccaagttgttccttgcaatgctttgtattaatgatcacaagtatagtttttttcctccgggagcttctcagtgcagaaagaatttgtagccaggaagcaatcagagcccagagcttttattgacaatttgacacataggatacctatctcctggcagcatttagaatgaggcgcatttgataactatggggagtctgcagactgtggccagagaggtgtgtttcgtttcttgaagaattttgcagaggggtcttgcaggcagcacctggacctcagagcttcttggtctcacattgtgtagccccgacgctgtttcggctatagtcatgcttagaatttccgatgccctgcacgtttgttcattcatccagcagatgtttattacgcatttgttgcattcagtgcactgtgtcaggagccagagaactaagggaggctcattccaggtgaggagaacaggaaattcaaagatactgagatagaaatgggctcggtggtttggagcaaaaaaaaaaagtgccagggagccggagtggagggagctggggccgtgatggagagagatgaagctgaggagctgacttggcccgggttgcaccaggccttgtggccatggtgggggctttgagtttgattcttagtaaaatagacatggatgagggggccttaagaagaggaaggccgtgacctcacttaggttctaacaggatcccccagctcttttgatgaaattaaatcgcaggggtaagggcagaaacaggacactcattcagaggccgatggggtgatagggcagtgatgatggaagctcagacccgggtgctgagatgcggtcccacctgatgtatatttgggaaataaactgatcaatgggttaggtatgtgggttatggaaaagatacgtttcaagggcagccgctagatttggggcccgaatcaacaggtgagtggctgaatacccactcttaggaacaacacatttttgcaacatgatccagctaagtctcatgtctgaatctgactgaattttgcatctgtgacttgtgaataaaaccaacagtgtatgcagataaaaagaaagcaaaggcatatgcagatataaggaaaccaacagcgtatgcagatacaaggaaaccaatagcaggtatgaagtagacacaggagagaggggaacaaagaaagccgtggctgacttaaaatacagagatttcttctctccatttgacagatggaaaaactgaggcagagagaagtcacttgtccaagtttgcacagctagaatgtgattaaacatgatttgagctgggtgcagtggctcacgcctgtaatcccagcattttgggagcctgaggatcacttgaggccaggagttcgagaccagcctgggcaacatagtgagaccccccccgtcttaacaaaaaatgtaaaaatcagccaaggatggtggcacacacctgtagtagcagctaatgggaggctgaggtggaggatcacttgagcccaagaggtcaaggctgcagtgagcctaggtcacaccactgttctctagcctgggcaatagaacaaaaccccatcttagaaaaaaagagaaaaacaagatttgaacccagaacgcgtgatcttagccactgctctatttagccagattcctgggatggatattgagttgttttcagattggtagcgtgtgcgtttgttagtttttcactgttacggatattgttgctggaaatttaaacaggcatcgttgcacagacaagggagtgcttctgaaggataaattctaggaggtggatgcggtgggtttagagcccctggtgttcagtggcctgtgtcagctcttgcccaatagcactacacagcatagattagggcctacaagtcttgccctctataaacaagccagacctcttccaccagcagcactgggttttgaaggaggcaagggatgggaaggtggttgtgggaggggcatgataggctttttataaaccactagacagacccagatcaataatgcatgtcccaaaaaagcccaatacattatctcacagtctctgctacaactggcatgcagcgggtggtcctaaaaaatttatcatttgctattttctgcccatccgtgcagcagttctgacagccctctgggctggagacttcttgactgagataatcccaggattctttccagtcccaggacagagaacagacgtccatcctcattagggtccggttgggaggactggtgccagatacacaagacgaggggcttgttctgtttcctaattgcaaggttggggggttcggggctgtaccacgtatattcaattttcctttccctgcacgcatttgactccctaagctgtcatttggaattatcaaatgcccaggggaactgcttccagggccatactagttcgtaagtggcctaaattatcattacatgtttaaagtagttggggacatccctgtgtctcaatggccctctgagaccaacggacttttgctggacttccgctccaaaagaataagagggaagcacatggaggtaaaggtctcgtttgcagacgtcctttgttcagggaggcagtagaatctttgggctctgccagggtttactgatttaatttgatctaaacctctggggagcctctggggctccagcaggctctgagacagcaagaggattaagacatggttctggcctggagcaagagaatttttgcagcatcccagttctgatctatgacttgagaatttctttaactggacttatttttgaagcttaaatattattttaaaaggaacctccaaattctgactgtaaaggaaaaaaccaatacccattgccttcggcaaaggatcactgtaaaaccaaacacagtgaaaaccaagtcgtgtttttaaatttcagcaagatgctgcctcccagaaagccagtgtgtctctactgtaatgagggtgacgggcagtttcagaagcggcattaaaggtgaagtagcacctgccaagactttcttcttggcctcatcagcaggatagagactagaaaagagaagaactttctcaagcttttgatgtgggggtcccacttacatggggaccacttggtggtggctcttgtatcagagggttaaggacacagccagactccaaaccccagaatatcagagcggattccccagtgctcattttcctgagtgttcacaccaggcagagatgggtgccttttcgaggcccctcagattgtcggatttgaagtgtgccccacgagactgcatccagtgtttgcatttcttttcttttctttctttttttttttttttttttttgagagagtctcactctgtcacccaggctggagtacagtggcgcaatctcggctcactgcaacctctgcctcctgggttcacgtgattctcctgcctcagcctcccaagtagctggaattacaggtgcccgctaccacacccagctaatttttgtatttttagtagattcagggtttcgccatgttggccaggttggcctcgaactcctgacctcaagcagtccgccgcctcggcctcccaaaatgctgggatcgcaggcgtgagccaccacacctggcctgatgtttgcatttcaaaagaattctttgcctctcagaacatctttatttttatttgtttatattttttgagacggggtctcgctctgtcacccaggatggaatgcagtggtgtgatcactactcactgcagcctcgacctcctgagcttaagcaatcctcttaccccagcccccgaagtagctgggactacaggtgcgcaccatcacactcagctaattttgggagtttttggggttttttttttttttttttagagatgggcttttgccatgttgctcaggctggttgcaaactcctgagctcaaacaatccgccccccattggcctcccaaagtgctggaattgcaggtgcgagccgctgcacccagcctatcagaacatctttaaatgaaaatactccgagtaaagttgcaagggtaagagctgtctcattagccaccaggttcaaatcctcactctaccattgaccatgtgtccttgggaaagatttgccctctctgtgcctcagtttactcatctataaagtggagatgatgatctgtttccctggcattcttgtgaggaatacctggcacctgtcatatgtgtgacagtttgctctcacttgggttgttaaagccatcctctgttagagcaccctgggccaatgccacagtgttgtttgtctacagcaagctttgcatatcaaaacgacattaaaatctaaatgtctcatggcactgaacagcaacattagagtctcctcccagctgacacagtggggtgagtgctgtccacgctcatgcaggtgagctggcacccactctgccaggtatgtgagcctggcatggttacataccccataatttgagtgacacttgtcaatcaagtttggcatgggttcttctgccattactgcctctgctgatgaacagagttgcaccatcatggctgttgaaaagcaactgagtggtggttttggggcctgcaaaagtgccatgggaaccagccttccactgggtgttaaaaacgcgtgtgtcacaaccactctctgtcagcctggattctctcagttacgagtgatgtaaacccaactcgagcaggattgaggaatcaaaaaggggactttattggactcatatgaataagtccaagtatacattgagcttcaggtgcggctggatctaggagctttgtctctgggtggcctctgtccctccatctccctgacctcagctttcctccaagttggctttactctcaggccagctctccaggcagcattcctggcatcactagacccacatgaacaccatacaggtgcaagccatccctgtggaaagagagcttctctcacctagaagagagtacccaaattgagtctttttggtctgacactgtctgggacttctggtcaaccagattcaggggaatggaacacagtggttggccagatggagtcaggtgcacattcctggagccaggactggagccaaccccacttgaaccatgaggactgggattgggatagagcagattccccaaaggaaaattcagaagctagtgccagaagaaggcaggtagctggtgtgcagtccagttagagagatgctcgtgacaccctcacatggcgctctctgaagcagctgctcaaactgtggaccagacttattcattcggcaggtgtttcctgagcacctactgtatgccaaaggagatccaacagcaaacaaactaaacagagcttacattctaatgcaagagttaacaagacacatcgaatctatagtacataaaagagcagaaagtgaggaggagaataaagccaggaggggaagccaggaggggcgatcaaccaggagaaaggtggagaaaagaatcgctgggattttctatagggtggtctcattgggaaggggaaatctgagcaaagaaggtaaggaaaccagtcaagggggatccctggggaagagcactccaggcagagggaacggtgtgtgctaaggccctgaggcagatgcggtctcagcaggctcagagccgcaaagaggccagagcagcgtgcacaagagcagcaggaagaatgaacggtaatagggaggtggtggttggatggaccgtgcaaggcatgagcctttgaatgggaggaagattttggctttctgagtgagatggacaccaatagaggacattgagcagaggaggacattgagcatctgatttgtgtcttcataggacccctctagaagaatagactgaataggtgtaatgagagcagggtgtccagtaaggagtctactgcaacagtccacgcatgagatgagcccaatgaggagtctattgcaatggtccaggcatgagatgatagcggttcagaccagagtgaggaaagtagtaagtgctggtcatatttcaaaggtagagctgatacaagtgctgatggaactgatgagggatggtaaagaagagttgagaatgactccaaggttgtggcctgaaaaactatgagaatggattttctgtgtacagagatggggaaaaccatggttagaagctgtgggccgggtgcggtggctcacacctgtgatcccagcgctttgggaggccaaggcacgcggatcaagaggtcaggagatcgagaccatcctggccaacatagtgaaaccccatctctactaaaaatacaaaaattagcggggcatggtggcacacgcctatagtcccagctactcgggaggctgaggcaggagatttggttgaacccaggaggcggaggttgcagtgagctgagatcgcgccactgcactccagcctggcgacagagcgagactctgtctcaatacatcaataaatcaataaataaagctcagttctggacctgggaagttgcaggtgcctgtgaaaagccaacaggaactgtccaataggcagccacatcagtcagacgttgaagagagaggcccaggcctgggtggacttagagtagggcacggtggggatcgtatacaaactgtgtgcttgtttgtgctttactgaatctgagaccctccccagatcctgaaagttgcaggaatacagcctggagaactgtccagtgggagaggcaggcttttgaaagaaagatgtagcagaggtctggccggcctcctgttttccactttccatctgtgaacacaaggaaaccacaccctgtgccacagcctgatatccaggagatcaattccaaatcgcaggctcaagtactctctgtaggggccagatggctggaagcccaggacaacatacccagattccagacaccagatcagtggtaacttccagctcagcctctctgagatcccacctcctggccttctagccgctgatcactagaggagaaaaaacatgtggatgcaggttatctcaggaagaagagaggctcattcggacccacactggtgttcagcttgccaagcacattcctgtaagatgattttttttcaattcagcaacatttgggagatcacttgagttctggaagttaagtgtatcaggattaggtttggctgcatgtaaaagaaaacataaaataacagtggcttaaacaagacagaattatacaaatgtctggaggtaggcagtctagggctggcttggtggcttcaaggttatcagggacccaagctccttctctgcctttctgttccatcatacttactgcgtagcttccatctgcaaagtcaccttgtggttagaacagctgctggagctccagctctcatagccacactctaggcagcaagaagaaggaagcagaggcagaagggcaggaaaaagaaaaaaaaaaaaaccacttcagaagtcacatgcaacacgaatagatcttatttacttagccacatgatctcagcgagaattataaagcacatgcaaatttgaatcattggaagacggtttaagtgttttttgctaaggtgtgagcaagtgcgaggaaaccactagggatagggcagtgccccaggctaattagcaacagtgggacaagaggttactggaacccagggacacagagggtcaccccacaagagctgtcaccctctgttggcaccacagagaggaaggtggaggaatctgtccaccaacctcactctcttctttctccgatctcctgccaggggcccttgtcagtcaaatccaacccaaagcccagagagcgaaggggcttgttgaaccagcacctccaggccagtgccctggggtggagaactggacagagagcagggctggaaggcggcaggcaggctcctggcacatctttggccataagggaatctgggaaatgtttcctagctgggtgcattgaaaataaagtcacagcctgatcagaggaagaaggagaaagagatatttgtgggcaactgagggtctcagcaacaccagagatcaggagcaagggtcccagtgagggcagctcccctagcagtgggaagtggggttgtgtggcctaacactggggagacctgtgtcatgaggagacattcatgtggaaacccgaggcaggagcactgcaggcagaagcacggcacgtgcaagagccctgtggcaggaacaggtttcccaggacgttggaggagggcagcaggacatgggaatgaaggggaggaggatggggaagagggcggcagagagcagacaggggagacctggtggtccccagcaggccatgcagcagggtctggatttgattgcatgcccgatggaaggtccccagaatgttctgagctggtcagctatgcgtgcatgttctcagaggcacaccccggctgtaggtgaagagggtggcccagggacaagagcggaagcagggagatcaggtggtgtttgcagcagtccaggtgggagatgctggtggtacggagcaggacggggcactgcagagcgagagaggtgggtggattccggtgctgcttggaaggtcggcagggtttgctttatggatcgtgagtgggtgggtgagggaagaggaatcggggatgactcctaggtttttggctgagccgttgggcagatggcagtgccatttacagagatgggaaggcgggggcaggaggaacagattgggagaggtggggaagggggggacattaggttgctttgcaaacatcacccaccaggcctgtggctgggcagcagctctgcgtagccccttctgaaaagtggggaaaacaccctggaagccctgccccattgaataaatatcccctcccagggatggtgattgtagcattttgagttagaggaatatttctgggtggagtttctcagagaggaaatgaccaatcattgcagagcctcgtcaattacacccaagccctgccctttcccacgtgtgctctgccacctctctgctatggttgacgatgaccatagcagaattttctcccaggaacttctgcaaccagaggcagcagaaagcaacggagaaaaaattaactgcatggtctctctgacaacccgatgcttattaatagaatctcagtcctgcctcctcgacatctgcctaattgattttgggtttaggaaccgatttggagccttggcttttcgtagctgaaaccagcaataacatttgtctttattttgtaatgtccaagagtcaggaatggttcacctttgcaccaacaaaagaaaaacaacaacctctgagcaacaggtctccagaatccagtgtaattattctggattgagttacaggcacagcaagagttgccaccagcagcagtgagcacatctatactaggtgaaaaataagagattccctttttatgtgtgtgtgtgtgtatatatatatatatatatatatatttttttttttttatttatttaagttctagggtacatgtgcacaacgtgcagttttgttacatatgtatatgtgtgccatgttggtgtgctgcacccgttaactcgtcatttacattaggtatatctcctaatgctatccctcccctctccccccaccccacaacaggccccagtgtgtgatgttccccttcctgtgtccaagtgttctcattgttcaattcccacctatgagtgagaacgtgcagtgtttggtcttttgtccttgtgataatttgctgagaatgatggtttcgagcttcatccatgtccctacaaaggacatgaactcatccttcttttgcccaagtgtggctcccgatttctgctgtttgtgccccaggcctttctctcccctctgctggagacagagctattctggggcagttggtcaggtctgatggagcccagcctgctgcagcccattagcaggtgttgccttggtcatggcagggagctcacaagctgatcctacagcactgcggacattccagggacatttgagggccaggagagggctgctgaatgagttccagcctgttaggtggacaccagtagccagaggtcagtgcaggacacaggttctttcccgcctgtggctcgacctcatagccctcttcatcccccacctgtccaggtcaagactctgttccaacctgtacctgaccccacagcctctcttccccactgaatgcctgttctctgcaggtctctgggccccagtagagcgttacctttgcagatttatttagctgctcccttcacttggaattgaatcagctaagggttgcaaactccatgcccacagggctaggcacgtgctggcaaggaggaagtcggcatggtaggggtggtggaagaccagaggaggaccttgtcaagtgggccttcgctactcaggtccagcccactgtgggcccatcaaagccaggtctttgcatttttcaagcaaagccagaaagctgaattgatgtgaaatctcgcaattaaagaaaaaggccattcaatttttaaaatcctttccttttgggcagacctaaatcaaacacacatgcagacaagatttagtctagagggactccgttttttaactccgcgtgagacgatacttgttgaaaagctgacatgtggccgggcacagtggctcactcctgtaatcccagcactttgggaggtcaaggcaggtggatcacttaaggccaggagttcaagaacagcctggctaacatggtgaaaccccatctctactaaaaataaaaaaaattagccgggaatgatagtgggagcctgtaatcccagctactcaggaggctgaggcaggagaatcacttgaacccaggaggcagaggttgcaatgaaccgagatggtgccattgcactccagcctgggtgacaagagagaaactctgtctcaaataagtaaataaataaataaaagctggcatgcattaagtgctttctgtatgtcaagcattgaactaaaaaagtgtgtgtgtatgtgtatatatatatatatatatatatatatatatatatatatatatatatttttttttttttttttttttttttttttccctcaaaactcagaacaaccctgagaaggaggcactgttattctcccgctttgcagatggggaaactgaggtgcagggtggctaaatcatttgcacaaggtacctggttaataggaagtggcagaaatcaagatttggaatcaggccttctgactgaaaacctttttcatcctattgagtatggtgacatagcgataggttctagaatctatcctagaatttcatagtcaaaccttatacctaaagttatttatgggctgtgtttttacagacagggaagctgaagctcaaagtcagtgatttacggcagttcacacctcattcttggcctctcaattcagtgctctttggcacccaaagtctacagatgaaaaaggacctggtgattcagtctaggactgaagtgtatatgtgcatctgtttgtgtgtgtgttatacacacacacacatattcatttgtagcagctgaacccttttaacatacaaaacaaaacaggtaagagaggaatcaggagaaggacgcggcctggagaggggtgtgtggtgcccccttcatcctcagcctgccccatgccaggtggactttaatgcccctctcctcaaggaaagaaagcacagcttgggggcccctgggagcagactggccccaggtagagtgtagcaggtgatatgtggccacaacagtggccacagtggataacagtgttatcccaacactgggaggccaaggcaggaggatcacttgagccctggagttcaagaccatctatagatttttcggtcatctatagaaagcccactgtgtgccctcttcccctaaatcccagggcctgcttcacataggggtagcacacagacaggcctgcagacccgtgcaggaatgccaagtgccaaatcctgccctctcccattgttctagaaacctgtggccctcttgctgcatttatttattttttatttattcaggagttcaagaccagcctggtcaacatggtgtaaccctgtctctactaaaaatacacaccaaaaaaaatagctgggcatggtggtacttgcctgtaatcccagctgctcgggaggctgaggcaggagaatcgcttgaacccaggaggtagaggttgcagtgagccgagatcgcgccgctgcactccagcctgaaagacagagggagactccatctcaaaacaatcaataaaattacacaagcaaaactttaaaatatccaagtaatgcaaagcagagatagcccttgactccccacccaccgtgtaccccactcaccccaaaggcacctgcatgtcccctaagaatctgtagcctgcatgtcccctaagaatgtttactcttcatttactcacacggaagcaccaggaagagcagcaaaaggcaagaaggaaggggagggcatgattctaatcagcacagtccagagaaagccttgctgagaaagtgatatttgcagaaacctgaaggcaatgagggactgagtctgggctgaggagtggcaggtgcaaaggtcctgaggcagaagcgtgcttggtgtgttcgaggaacaacaaggaggaggtcaatgtgactggagcagaggaagcttagagagagagcgcacagtaggagttgtagttggggcgagtgagcatccggatcactgaggaccttgtaggacagagggaggactttgatttttactctgagtgaggcgggcagtcactggaagacaaagagcaacgaatatgatgatttcactgactgttttaaaagaagtcctggccaggcaggcatggtggctcatgcctgttatcccaacactttgggaggccaaggaaggaggatcacttgagcccagcagttcaagaccagcccgggcaacgtggtgaagccccacctgtacaaaaaatacaaaaattagctgagtgtggtagtgtacacctgtaattccagctactcaggaggtggaggtgggaggatcacctgaacctggggaggtcgaggctgcagtgagccgtgatcacactactgcactccagcctgggtacagagtgagaccctgtctcaaaagaaaaagcctctggccaccaaacggagaatagaacagcttgggagcctactgcaatagtccaggcagagaaaacagtgattagagtgaatttaagtcaaggtcctgtgtttactgactccgcctttatttttctccctgccccattcttccttctgctgctttccctaggaggccctgccatcacagactctaataatatctataattttaagaaactagccataggaaggcatctcactagttatacatcaaaatcacccaagttgagggccgcagggatttgtctgggaggggtacagggttcccctgctcccagctgaagcaggcctccaacagataggagccacctaagcctcaggaatggcaaaaaaaaaaaaaaaaaaaaaaaaaaaaaatcatgttttgaatcctgaaactccctggcaccttgctaagtccccatagatagtgtttgctctgacttagacctttagaagagcaaattcattcagcatttcctatgacactggcaacgtcgtcatctgtggcaggtcagcaaaatattgattttatcaacgatggacttactggatggtgcatccaaaaatatatatatataactcacaccttaattctctaactcgacgtagttaacttggattgagattaaagggttttttcttaaatcacgttaaatacaaatatcaaacaaatcatagcacagtggtacacaggcccccaaaaagccaccgtgaatggggaggcagttcaggagtgtcatgggagaaactgcattctagcagttgggtggtttgggcccccaagtttaaatcccaacagatgggcctgggggtgaggcctctccagcccatcagagtcacagaggtgtcagagtgacctcaccctcaacccagtatggtgggaaggtttggtcatggaaagaaaccgggtctgtttttgtctgcatgtccccaggtttatgttggacgaaagaagttgaggttggctggcccagctgcattgaaaagcttgaaaactggccttttcatttctgtgtggccgtgtcgttcaggtccttccctcccgtcggagctgtccttctgcattagggctggggctgggcaaggggatgagatcatatgtttttgtgttacagaggtaggtttacacagcctcgtcgctatggcagttttaataaagcaggttactgtccccaaggggaggcttagcacatagcactgcccatgcacagatgctgctgtcattccggggcactgttgtcctttactcgtggattgacacagcgctcctccgccagctgatttgggaagggtgagtgctggccaagagcacctcacagctcgcttcctctggaatgaggaggaaggagatctaagcatttcgagaccctggatctgagcccattaaaaacaagaaatggttctggaggctgttcactgtttgccaaggcagcactgggggctgcggagtgcaggtgatttcatcaggtgacggcctgccctgcgttcccttccaggagaagggtctgaccagttaggtgggtggccagcttttgtcctttctgcagggtctggagaccgagagaggctgagctctcactaccagctgcttcgtcctttctccttcgtgtttgggactagggagcaaaggatcgattccacttggggtgccctggactcgtgcatttaagaaatatttatgagcacccactgcgtgccaggcactgttctaggctgagctgtggagccatcaaaagtcacagggaacagcaaacgggatcagtagataaaaacataaaagtatatcatgtgttagatgatgagtgcagggttgaaaatgtcaggcaaggaagggagtagaaaatattgggggccagggaagactccacggagaagggaacttttgagtaaagacaagaagggggtgagggcaccgctgcggggctccgggggagaggtcttccaggcagaaggaacagcagggcacaggttctgggatgggagcacgcctggtcagtctgtggacagagcaggggaccctgtggctgcagagagtgggcggagagggggatggggttagggaggggaggggattgggtcccaccacactctgtggatggccagaaagatttgggctcctctgagtgagcaggagccccggagagtgtcaggagaggagactctggctacaccgtggggaataagtgactggagtccaatcaggaagcaactggcctgatttcagggagagaggatgatcgcctgacccacgggggaggtggcaagggtacgatcgtgggtgtttacgttgaagagagggcaacaggctttgctgatggattggatgtgggaactgaaagatgggaggaaccgtagccaagatgattgcccaagtacccggaggaaaggggagtggcttcgggaggagcaggagggacggtgacatcagggcttggctgtgggtgtggcacctgaggtctaatcgacagccgaatgacatcaatggatgtcagggttgtaccaagccacacatcaagggatgtcaggtccgggttttaccaagccaatgattgccaaattctaatcattccctcacaattttcatcatatatctgtgtgccacttgtacgattatttactttttaaaaatcggctgcaattgtttgttgttgttgttgttttaagaggatttccaccaccctaaaggaaaagctaaggttacttgccctaagtagaaggaaaccaagccacgcaattaatctaaggcaatgccaccccctgcctggagctcccagtggcctttcacaccaccagcatccctggtgtttggtgatgtgaccctgggccacccccacccctggtgtgcctgatgaagtcaccactagaggacccccttctgggtcaccaagggaccattctgagcttaactgaagccaagagtggaccaagagcatggggacctctatgcacttcctcaggacactgttaccacctcccgtgtgactgtgacattttgtgaacgtgaaactcagcaccccgcctctgctaggcttgagtcttcactgccttcccagctgtgcagccttagccagtcattcagctccccaggttcagttccctcttctgtcaaatgggccattgggagaattaagtgatgaatgtcttcagcccagccataagcattcagccagtgatagtcgccactattaattataatgattattactggcatagaagactgccctcttccccaggaataagttggagtgctctcagttccttagctatatcagaaggttgcaacacccaagccttcaggggtcgggcaggtaatgagagtgggtgcaggtggtgtaagactgtagggagcacgggggagtgtggcaaactggagagcacatatcctgtgtgatgctatttaatgtcacatttttaaaacccactctacaagacaccaacacacaggtctgtggacaccaactggtttggattcctgagatatgaaaacccgagtgtaagatagtattttatatgttaatttagctggtctctgttgagcacattatgtgccaggcactgtgctaggcagtgaacaaagtaggctgagtctctgcccttgtggtgaaggcagcaacatacaaataagtgaaatcaaaatgacttatgtttgaggacagtaactgctgtggagagacacggagcggggaagcagagtggagagtgctatgggttgcgggaggtggtttcaatacaggccagggaaggcctctccaagaaggtggtgtctgatcaataacttgaaggagacagaggtagccctgtgattggaggagtgagagcatcccaggctgggggtacggctgaggcaggggccaggaggtgggagggcggccaatgtgcaatactgggacctcaggggcacgaccttggtgccttgattggtggtaaaaatttaaagtagaagcagctgattgctgagcagagggccttccccagatcccaggaggctgcagtgggtctgatgcttgttttcaggtttctagggggttgctaggtgattgggatcacagccttcacatgcctggtagaccctgttttggtttcccactgctgtcctaacagatcacaaactgggtggcttaaaacaacagaaatttactctctcaacagttctggaggccggaagtccaaaatcaaggtgttagcatggctgtgcttcctcagaaggctctaggggagagcccttccttgcctcttccagccctggggaccctaggagttccttgttccttggcttgtatgtgcatccctccagtctctgcttccctttgaatgtggccttcccctctgtgcctgtgcgtcttctccactttgtgtcctatgtggacacttgtcactggatttagggcccacctggggaatccagaacaaatctcatttcagtagcctcaatttaattacatctgcaaagacaccctgtattggtctgtcttcatgctgctgataaagatatacccgagactgggtaatttagaaagaaaaagaggtttaatggacttagttccatgtggctggggaggcctcaggatcatggcagaaggtgaaaggcacatcttacatggcggtaggcaagagagaatgagaaccaagcaagagggaaaacctttataaaaccatcaaatctcgtgagacttattcactaccaagagaacagtatgggggaaacaacccccatgattcaactgtctcccatcagatccctctcacaacacgtgggaaatatgggagccacaattcaagatgagatttgggtggggacacagccaaaccatatcaccctctttccaaatatggtcacattcacagcttccagaaattaggacatggtcttatctttaggggacgggggcaccgttcaacccactgcacaccttaagaactgcaaggaaaaggggaaaaaccaaggatggccatagaagaaggagagagggtttccatggaatatttccatcaaatcactaagggtctgggtaccaaccacagcatacaattgagcatgcactcgtcacacctatgttgagtacccactgtgtgtcacacacggcagcagtgctgaggattcagcgctgagcggagcacacagcctttgccctcctgggaccttggcctgcacgcagtagggctcccacacacgttcatttgcttccttccttccttcttgcctttcttcctaagtgtcttgctctgcttacagcttggttgagaaacaagagcaggcatggccaggcaaggtggttcatgactgtaatgacagcactttgggaggcagaggcaggcggatcacttgaggtcagaaattccagaccagcctggccaacatggcgaaacgtcatctctactaaaaatacagaaactagctgcgtataggggctacttgggaggctgaggcaggggaatcgcttgaacccgggaagcagagattgcagtgagtcaagatcacaccactgcactccagcctgggcaacagagcaagactctgtctcaaaaaaaaaaaaaaaaaaaaaaaaacaaagaaaagaaagaaacaagagcaggcatgaccgaaacctcgaagcctggggtatgatcagtactcaggacacatgctgcaagactgctcagagctctcaagcccagggtggtgccagaggctccctacgagagggtactaggccgatgggttggatttggggtgaggggtggtgggttccaggctcgaagaaaagtgtggacaagaggccagcagggtttgtggctgatggcagagcacctcagccagggaatactcagggagaaggtttgccaccaggttggcatgaccagatttcagtaagagcaaacaattattgggaaagttccaaagaaaagaaagtataatcttccctcaatttacatggtggttggtttccaaaagaaaaaacaaaacaatgtatattaataccctgcaaaaacaatgttgtgtttaaaatttgtaaaacagtttgattccagtctcaggtcatttataaacaggtttttacctgccttgcaggtagagatgcaattacagtaccggacagtgacagtacagtcacttacagtcactcacctccagcaccattgcaaaatcctccagactccagacctggacctcaggagtgtccaggtggactcgggacccagggtccttcctgattatgcaggacagtcccaccgtgcagcagtggcccctgccccgtctgccccgtaggtctgcagaatgtgcccactccagacctagggatgccacgtgctgagagccccctggtgccggtgccgcccgggtctcctgccctgcgccttacttccacccttgacttgcaggttccatgcaggtgatgaacaagacccggcgcatcatggagcagggcggggcgcacttcatcaacgccttcgtgaccacacccatgtgctgcccctcacgctcctccatcctcactggcaagtacgtccacaaccacaacacctacaccaacaatgagaactgctcctcgccctcctggcaggcacagcacgagagccgcacctttgccgtgtacctcaatagcactggctaccggacaggtgagcagggacgggggcaggtgcaggaagggagtgacagccagggcgggcgtccctaggtgtggtctgcacaccactgcggtacccaagttgattctggatagcccctagagcaactctcttataatttcagagttgtgcatttatttctgtgtgtattaaagaaatacagatttatttgcctacagtagtgatgtaaagtgaccttgtcaaaggaatttgagtcccccaaaaaagtgagtcttttcaaactatgaatcatagtgtggagaggccataaggtgcccatgcatgagtttgcatcctctgttaatagttattaagcccatcagggactgtttcgttgacttcaaaccattagcttggaagaaggttccaaaacataggggtgggggatgggaattcatggaggggaacagataatggggctgtgtggtcgctttctacgtggcagtaaccaaggtggtgcagaaactgacatggtggttgactgtccacactcacccgtgtcatcctgggtggagggcgacccagttcctgtttgcttatccttcaggaggtctttggtgggctctgaaggctcacctgccaggctggttgtctgaggtagagatgcaattacagtatagtcacttacctgtagcgccattgcaaaaccctccagactcaattcatttaacttgctttaattaaaaataaataaatactccccgccttgggtaagaagccgcggcggttgtgaaatcaagatattgtggctcagatgttgcaaccccaggaagttgcatccaagtgacaaggggtttgtttgggtgggagtgccgcaagggaaggatggactcctcctccagccctgtccgcagtgctggacctgcagccctcgaggctgggcagcttcctctcagatacacagtgtgggctggcagggatgctttggtgtggggagcaagccagtaaggtgtgtcttcttacagcctcatcccatagccagaatcacctagaaagtatgttctgctgagaactaggaaggcctcgttcctataccttgttcctgtgtattgtgcgtgccattatgcagaatcaaccacctgttggttcccctgagcctctgcagaaagccacatgtgtcagaagttaccatggccaccaccctagatgattggcgggggcctggatgttgctagcagaagcaggacaggcaggcccgcagcacagcagtgggcccttattgaagatgcacctgcaacttggctctagaaagtacagccatgcactcaagagtgaccagccttgaaatgttttaaagtctgaatatttcactgaaaatcttattttaaaatatgccggcacagcttattttttctttaatgtatactgggggccaaagaaaatatgtctgaggagtgagtgtgtggctcacagactctcttttcacaacctctgggtgaaaggtctgtacagaaacctttcgttttggatgctggaagatcagtaaagaccctagacctgttctcatcaatccccctcatttcacagccagggccactgcagcccaaaaaagagacctgcccagagtcaaagtgaggtgtttgtggcataatcaaaatggaatgcaagatcatgggaattcagagggggcatggaaatagtattcatcagactgaaaggaaactcatatattctgtgccattttgagggctcagggtgggagctaaaggctagtgtttcaaaatcttacaggcgacatgagaaaatcaatcatttcaagaataaacattctctaaagtggatttcccaaacttgtccttgaatgtatgcaaatcaccaaaaagctgtctccctaaataagtgcttttattcaactatgattcattattataccctcatgaagactgggagcgtaatgtcaagtgtaaagagccagataccgagaacatttacgtttttgtaaaactgccactgagaattttattcattatatttagaatgccactctgtacaaagaatcccattccagccttactttcagaactcaggaccctgaaaacacctgtttagtctgatgaactggtgtactccttgttattacataataagagccacataccctgtatagtttccctctttgccctggcagctaggaagctcaggtttgagttttatattgagttgttgtttaaagtggaaatgtttttaaagatccaactgcgtgatatgttatactgatcagtgttgactaagaaaaatgacaaaaatctataatgaattcaaaaccttttagattattttttccttttagattgatttgtacatacatattagaatatactgtaaatttttaatcccccaaggaccaaaagtaaattgttcctgctgagtcttcagccatgttaaaccctgtgttcacgtggccacctagcaaagttggttcagttggatttaagtttggctgtgtgtgtgagagagaccggggatgtcaaataaaattccaagttgttctggtggccctgctctatgaagtggtcagagactccgactccatttctccttatttcccattggtgagaaacaagtcatatggccatgcatggcagcaaaggggcctgggaaatgtagtcttattctaggtggacatttgcccagatgaaagttattttactgtgggagaagaagaaaacggatactgaaggacaagtgaagtctaggccaccctaacagttattagccatttgtgtttgtgatactcgtttgaatagaggagatcagcccaaactgaggaagactgaccccagaaaaatgctacttaagtggaccaacatttcataataaatagtgcttttaatgtatttagtaaggtatttgatcttgaaatgaaactacaatgtttcgagaataactctgttatgttacatctctttttttctttttctgagacagagtcttgctctgtcacccagactggagtgcagtggcacagtctcagctcactacaacctctgcctcctgggttcaagcgattctcctgtctcagcctcctgaatagctgagattacagacgcctgccactacgcctgactaatttttgtattttttgtagagatggggttttgccatgttggccaagctggtctcaaactcctggcctcaagtgatccacctgccttggccttccaaagtgctgggattacatgcatgagccaacgcacccggccctctgttaggttgcatctaatgatatttaacaaatattgggctctagttgcaactaatgagttgattcttcaagcaagtgaattgacgaagtgtagggaggaatataatgtgtttcacaaattgaaatggatggcacaagatgatatcctttacttcactagggacatttttgcaaaagtatttgaggatttgatcaattttttcaagggcctctcctaattctctgacatctgaatcttcccctgtgaagtgcatctcatacttcatcatccttctcaatagtctcttctccttcatgtagtatctttatagaccaggtaattattcgtcagtggatttgcatgtgttttttgagctatcttccagcgtcattttaattaattttacaaaccctgcatcttttaaaatatttgcaatttcattttgcagtgatcttgctttgcatggccccatgtttgcagtggagattgacaaaagacaaaatgagagaagctaagtttaagcaggataaatatcaatttgttcatgaatatttctctgtatggcttcttacaacttgagggacttggatctcagatatgaatacccttggaaggatcaattgcatcctcaggttttttgttttctttgtttttttgtttgtttttgagacagggtctcactctgttgcccacgctggagtgcagtggcgtaatctcagctcactgcaacctccacctcccgggttcaagcgattctcctgcctcagcctccccactaactaggattacaggtgcgtgccaccacgcccagctaattttttgtatttttaatagagacggggtttcaccatgttggccaggctgacctcgaactcctgacctcaagcgatccaccctcctcggcctcccaaagggctaggattacaggtgtgagccactgcacctcgccacatcctcagtttttacaaaggttttatagtcatcctttaacacagttcagcagttgaagtgctgttgccctgcctgtgatcacttatatatccacaagtcaaagttgtacagtgttcccagaatgagacacctcccagctctctgcagagtggttgagggcattagctttgcctgggtttgaatccagtctctgctgctttctgcctgcatgaacttggacaagttatttagcttctgtgtcttggcctcctcaaccacagttaataatgtcacttaactcatagagttttgtgaagattaaatacattagaacagtgtctggtacatggtcgtggtaggcacttgggaaatttagcaatgatggctgggtgcagtggctcacacctgtaattccaacattttggggggccaaagtggaaggatcacctgaggccaggggttcgagaccagcttgggcaaaatagtgagatcccttctcaatttttaaaaaacagtaataaaaaaaagttagcaatgacgatgacgatttgcacaatagcacaacatcacacagcccacctcaggccagtgttctgatgaatgtcatggtaagttgcactcatggatcaaaatgtggcagcatgtgctcagcctctggtaatcagcaaaatgcaaacgcagccaacagtgcattatcacatcccagccatgaccacagcaaatatgaagaggtcccatcgcaccaaatgttggtgagaatgtaggaaaacaggaaatcatatgcgccagcagcatgatggtaaattgttccctccactttgaagaacagtttgccaatttctggcaaagctgaaaatggacatctccttctactcagcaattttactctggctgtgtccccctcggttctgaggaggtgatgttgatgtgtgagttctgcttgagcaagggaacacacttcctggctgccctgtttgctcttgaagatgtgtgatgctcatggcaatagattccctttagatccaacggacaggaaccccgactgcagctggcttcaaaaacattgaattttttgctccctaaacaggccaggcacggtgactgaagcctgtgatcccagcactttgggaggcagggatgggcggatcacctgaggtcaggagttcaagaccagcctgaccaacatggtgaaaccccgtctctactaaaaatacaaaaattagccaggcatggtgatgtacacctgtaatcccagctacaggggaggctgagacaggagaattgcttgaacctgggaggcggaggttgcagtgagccgagatcgcaccactgcactctagcctgggtgacagagtaagactctgtctcaaaaaaaaaaaaaaaaaaaaaaagagaagatacaggtgagtagcaggcagagtcggatcttgtggtttacgagtatcatgatcatatcacgaggctggaggtctggacatggtggctggcactccagcagctgtgtgcctccttgtccacatctggcaggagcaagagagcatccttttccagaatgctcaaggcatgagatcccttctgattggaccaccctgagtcacatgccagcccctgagccaatcatcatataaagcacatggtttgtgccaacttgcccagcgtggatcacctgctctgcagcagctggctgagtccctttttccccagcacttggactgccaggtagaaatcaagggctgctggaaagaataaggaaaagcatactggagtgccgatcacaattttactacactgcctttggcaaacaaaaaacaaaaaaaaagtaacatcagctggccgggcacagtggctcacgcctgtaatcccagcactctgggaagccgaggagggtggatcacaaggtcaggagtttgagactagcctggccaacatagtgaaacccgtctctactaaaaatacaaaaattagctgagtgtggtggtgggcgcctgtaatcccagctactagggaggctgaggtatgagaatcacttgaacccaggaggcggaggttgcagtgagccgagattgcaccactgcactccagcctggtgacagaatgagactccatctcaaaaaaaaagtaacaacaacaaaaaggcaaccttttccagctctttctggtgaactagattggagtgccattttctccccattgggataatgcctttctccttccacacctgaatctggcagttctgaagttgtttcccagccccagcttctgccatccggtccagactttcgcagagatggtggcgggccctctgcccttctgcatcatgttctaaaatgcgtcaggggagcagggggtacatgctccttacaagaccaggccttgccagggctctcagttggagcctgttttggggtttggccctgagcgccccagttattttcactcttctcgcacaaagctgggtagagaggtcagctgaggaccagaacctggccatcagccttgggcagctaccctcaccagggtctggggggcctctgtgtcctgatgaccccaccccatctacactacactacacttggggcaccccatcgccctctcacacaggaggatggaaaggcgcccgctaggcattttggcatccccaacaaatgagacttgttttttccctaaagcggtttcattcaggaccgcaggggcaggagggctgctgcgtgggccgtcctcctctgcaatgctataaagtggcccaatgcccctctttccctgccactctctggatctacccttagccccttgccctgaaccccatccaccctggcccctctgcctcctggccatcgccccagagctctccccagcacatcaagcatgagtccagcatcacttcctggtcccccgcctccccggcgcctctcacaggcttctcctcggcacctccagttttccagttgctcaggccaaaaccttagcaccattcttgattttttttttcctattcctttcacactccacattcagttcatcagcaaaccctgtcagctctgccttcaaaatatgcccagagtcccctctgctgccaccagcccatccgcgccactgtcttccccgcctgccctgttccaggtttctcctgggatcccccagcttctgcgtttatgaccccttggtctgttttcaatgcagcagccagaggggtctggtcagaacctagttcagatgctctttctcctctgggcagagccctccttggctcccacctactcagggtagaggccccgacagccacctcagggtcccagtgatccttcccttctctctgaaccctctcagcctcctggtctcccctcagtcactgtcctccagccacagcttctcaagcagtcagccacacctgacatgcacccactcacagtgctttgcacttctttccttttctcaaaacttctacacgtctgcactttcctcgtgtctgtgttccaatgctgcctcctcaaagaagccttccttgactaccccatgcctcctgttcatcccagttttttcccaccagtgcccccatcaccactgaacaccactgactgtgtattctgcccatttgtctcattgattgtctcgtttctaaaatgccagctctcaggctgggcgtggtggctcacgccagtaattctaacactttgggaggctgaggcgggtggatcacttgaggtcaggagtttgagactagcctagccaacatggtgaaaccccatctctactaaaaatacaaaaattagctggatgtggtggcgcaagcctgtaatctcagctactcgggaggctgaggcaggagaaccactggaaccagggaggtggaggttgcagtgagccgagatcacaccactacactctgtcgcttgggtgacagaatgagactctatctcaaaaataaataaataaaatgccagctccctggaagcagcggcctctgttctgtgccctcgcgggttgccaggcctagagagtgcccaccccatcgtaggtgctcaggagaccttcccaggatgactggtgactaagtctccacattctgtccccgccagcagcccacccccatctcttccacactcctttctcctctcccgtttctctcctctccacccccactcccaccatctcagcctttcctcctctttcttctcagcctctctgcacacacagggaagagaagactgaaattattcccgggatgccgtccctgggcccctggtgcagctgtccctgccttcacaatggcagccttctctttgcttggctcttctcctgggtttgctccctgctctcttcctctctccttgagtgcacacaagtgtgcacgcacgcacgcacacacacagctcccttcttccctcggtccagctgcctctcatctgcccatcttccctccccctctccggcctgtggggggacagcagagcctctccattcaccccgtggagtgtatccactgctcacagcaggtagccttcctgtctctctgcagcgaacacccagccttccccactgtggggatccgagtatccacgggaattgcacagcccctcctgggacccaggctgacccagcgtgtcctcgagaggcacggatttgccgcctccgtgcacatcttcaagcgaaatttcttcctctaatttgatagtcacttcctttctctaagacctcagatttcaaaataagtgaagcacttgttttgagcaagagtctaaagaattagactccgccttaagcgcccttgtgaccttgagctgagacctcatcccctctgggcgtcagtctctccatctgtgcagcagtgttgtgacatctaagcactagtcacccagtgcctgtgataagacgccaccctgagtgatacgtgacctgtgcccacaaacccaggaggagaggttccctgcgccgtaagaggaagtggccacggggaaagaggaagctgatgtgaggccgatggggcagggtttccgattgtttccaggcgacaccctctctgtcccacccccttagcaggtgtatccacttccctagtggaccacagactgggtggcttagaacaaaaggcgattttcacagttccgggagccagaaccccaaaatcaagcatcatcagggccacgctttccctgcaggcttcaggggagggtcctttgcccttgagttcctgggggttgctgggaatcttggcaccccttggcttgtggccacatcactccagcctctgccttcatcttcatgcggcctcctccctgtgggtccctctcttcccgtggcctgctcctctctgaatcagtgtccaaatttccctcttctgtcaggacaccagtgattggactagagcccgctctgatccagcgtaacttcatcttacaacaccatgttacaaacacggtcaccctcacaggtacctgggcaaggacttgagcatatattttggggaacacattcatctcgtgacggctggtttctttcacacattaaaccccgcccccccccataaaggctgcagagccgatgtcaaactgagcaaacctgccgctcttcccctcttcactgccccagctgtggtcctgggtggggagcagtgtggccgccctgaagatcagctccatgcgtagccttcccttcccaaccatggtttctctcaaggaatctccacctgcagtgggcgttgaaacagctgcagggtcaaaagtgagggaagggtgactgtggtgacagacaggcacaccctgtctcctgggcctcaagaggcttccgggggtttcagagtgcatgagaccttttgtagtcctctcctaggtgctagctgtgactccctgaacattctggaatgagttaggctggagccaaatggcccagtaccgttgccactagccacagggagctatttaactttacgttaattacaattagcatttcagtttctcaggtgcactagccatggttcaggtattcagtaggcgcacatgggttctgtactggataatgcacatagagaatgtttccattggcacagaaaggactcttggacagcaggagaatagagcctatggctgggcctgtaatcccggcacttggaaaggtcgaggcaggaggatctcttgaggccaggagtttgagaccagcctgggcaacatagtaagacctgtatctttacaaaaaatttgaaaaaaaaaaaattagctggacatggtagtccatgcttgtagtcccagctacttgggaggctgaggcaggaggatcacttgagcctaggagtttgaggctgcagtaagccatgatcacaccactgtacttcggcctgggcaacagagtgagaccttgtctctaaaaaagaaagaagaataaagcctaatcaaacaaaatcttttgggagtggggagtgacacacagcactgagaaggggcaataaaaacgcagggggtggtggctgtcgaactttaggtgagtgctttccgtgattcctcatctgtaatccaatctcctcctcctcatccctgcactcacttccccttatgctcccagtaccttgatctgtcttcccaaaccttcctgggtctcgggtcagggtctcaggacaggttcctgttctccgagcagcagacaccatccatcccggggccagcaggttgtgccagcccacacagcgagtcctttgggaatccatccgtgtcgcaggggatttgagcaaatgaagggaaaccgagttcctacaccgaggccgggagcggggcttcctctgtcatccctgtgtgaacccgttctagcctgggggctccaaatgcatagagggctggcaggtagcccaaagcagagaggcaggctgggtggggagggggtgcccagatttcaactgtggactgttcactctactttttaagaatgagcaactgaaaacaccgggcaggcccacagcaaacacacctgagggatggattggtctgcaggccaccggcttgcaaacttctttctaagctggtggttctcaagggagcacaccgccccctaggggttaaactctgtgactgcattgccggtgatggtgaaggatttgactttgctggcttcctgggggcggagactaagaaggactttgatgtcctgctctgcacagcagagtccacgtggcccccacattgcattgtattccacatagcttctgagtttcctaccacatcactcatatgggtagattattttatgtttattgtcatctgagtcttgaacctacgtctattttatatgtaaatactggagggtttttgcatattcccaggaatgtacggaataagaaaatggaggcaatattatacttgagtgcaaaactttcccaagagtcattccttatttctgaaagtcccatccccgatgacagtgctacgccaaaggatttgaatggcaaatgtcgcccgcccacccagctgcccttgtaattgtcacattcccagtgaatctgtgtctaggtgcaggcgtctgcctgactactgtgttgtgccttcttgatggatgtgctgggggaatttcatattgaaatttatcttcattataaattgctttccttttattttccctgtagattgcagttagagcattatattgattttgtggaaatgacatgcataggtagcttttgttacctataaatttcctttcaagaaaacaagggcgctctacaaaatatttgtcatagaaatgggaggtcagtctgatggcgctgagaacagctctttgaaaggtgcaagtagtgtcagattcctccaaggcgataattaaatatccattgagtgacaggccttgttctgagggtctgttgtggattttctccccctcctctagtccatccctctgaacaaaaccacactttaaaaggcacaagacagatatttaagacacagcttgtcctcgtggtgactcagcaggcaataaaacctgtcactagagatggagccctccatacccagctaattgagtttccagggaatgaatgggcctcatcctcatttgcaggagctgcaagacccttctagggagcggatggctggagccagcatttaattaggcacaggcagcccgccctccatgccaccaacacccagagctccgcctggccctgctacaaccagtcagcagggccttggtgtcccccgcagcccagtcttcctcaatagccacagcctcactaaaaacaggcaggcggaagacaggaatgcatggagtggcaagacagaagcagctctcgcctctcgccctggcgatctgcttgtccctgtttgtccccagcaactggccattccttctccccacccacagccggaggacacttttaaaaattgtaaacctgaccacatcacttccggctgaaaacctcctacggctgcccactgctttttggataaactggcatctcctcgccagggctgccaagaccttgtttggcctgggtgtgctcacctctctgtccacatctcctatctgtcccttccttggtgacagcactcaggctgcctagcctctttgttcctcagaacttccaaggtccattcctgccccaggccctttgtatgtgcagttacctctgtctggagcactggcccacaaccattctggtacaagcaaccggtttcgtggaagacagtttttccacggactgggggtgagggatgttttgggatgattcaagcgcatttcatttagtgtgcactttatttctaatattatcacattataatatgtaatgaaataattatacatctcactataatgtagaatcagtgggagcccgagcttgttttcctgcaaccagatggtctcacccgggggcaatgggagacagtgacagatcatcaggcattagattgtcataaggagtgcacaacctagatcccccgcatgcacagttcacaacggggttcacgctcctatgataatctgctgctgatctgataggaggcagagctcaggcagtgatgcaagtgatgggaagcggctgtaaatacagatgaagtttgctcactcgcctgccactcacctcctgctatgcagcccagttcctaacaggccacagaccgctacctgtctacctgtctgcagcccaggggttggggatccctggtctagagcgttgttcacacactgcggagaacttcctccatccattctctcttccttcctgcccttcctgtgtcggttagtactcctcaaccctctcattctcgaccatgacacccggctttatgttcttcttaggacttctcgcccccttgaaattatcttgcatgtttgtgaacttttttttttttcttttttttgagatggactgtcactctgccacccaggctggagtacagtggcatgatcttgactcactgcaacctccaactcccaggttcaagcaattcccctgcctctgcttcccaagtagctggaactacaggcacccaccactacactcagctaattttcgttttttgttttggtttttttttgagacggagtcttgctctgtcgcccagcctggagtgctgtgccacgatcttggttcactgcagcctccacctcccaggttcaagcgattctcctgcctcagcctcccaagtagctggcattacagttgcatgccaccacaaccggctaattttttacatttttggtagagatggggtttcaccatgttggccaggctggtcttgaactcctgacctcaagtgatccacctgcctcagcctcccaaagtgctgggattacaggcatgagccaccgcacccagccaatttttgtactttagtagagacagggtttcaccatattggccaggctggtctcgaactcctgacctcaagtgatctgcctgcctcggcctcccaaagtgctgggattacaggcgtgagccactgcacctggcgagtgaacttgttttttacatgttttgtttgctgcccatccaaaaatagcaccaggcaggtattgggtactcagtaaagatttgaacaaggccaggcacggtggctcacacgtgtaatcccagcacttcgggaggctgtggtgggaggatcacttgagcccaggagttcaaaaccagcctgggcaacatagagagaccctgtctctacaaataattttaaaaactggccaggcatagtggcacacacctgtggtcccagctctttgagaggctaagatgggaggatcacttaagcccaggcctttaaggccgcagggagccatgatcgtgccactgcattacaacctgggcaagtgaaacctcaactcaaacgaataaaaaaaatgaacagatggagaactcttgggccttaggcttgaagtcagcaaaaaaataaaaacaaaatggaatttagattactatctcatttatccagcatgaagaaacataatcgaaattagttcaggcaaactttgccaggtcccagtgctcaaacgctgtcagaaccctgtctttctgcttcttgcgttttctgtcattgggttggctttattaggaaggttccctctttgtgatggcaagatggcccccacaggtccatctccccagtgtggtgaccccagctgaaagagaggcctctttccaagggctccagcaaaagttccagggaaagctctcattggctcatctagggtcttatgtctctttcacccaatcacagcagccaggcaaaaggagataccctgattgtccaggccaacctcatgggcctggtccaggattcagagctagaaagagcctcatcagaacatgtaaggctgagaaaggggaaagattggttccctccctctttggtgactgaaggcacaattatgaaaagacaggagaatggattctgggcagaaaaataaaacagatatccactatagaaacccacatgcaggccgggcgcagtagctcacgcctgtaatcccagcactttgggaggctgaggcgggtggatcagttgaggtcaggagttcgagaccagcctgaccaacgtggtgaaaccccgtctctactaaaaaaatacaaaattagccaggcgtggtagcgcatgcctgtagtcccaggtactggggaggttgaggtaggagaatctcttgaacccgggaggcagaggttgcagtgagccaagataatgccactgcactgcagtctgggtaacgagtgaaattctgtctcataaaaaaaaaaaaaaatagcttcttcttaaagggcaagtgggaggagagcatttctcccagcccccagctcgctctgcttccaacataagatgcctctttcgtgcggaatcatgaccccaccttcctcatttgttttcacacagctttcagttcagcaagatcccatctctggcatccagaacttttatagcattgatttatcacttcgtgcagtgatttgcatttggtattttttttttcaaaagcagaagaactcgactcaggctgtaaccttgcaaagcagcacaaagttaaaaggatccagttacagaatatcagaaataccccagccctgagagctgtggagctctgggtttatttaatgcatttcttgccagccctgcctcctcagccaatttgtctgccaaaaaaacaaagacttcagtcctgtggcatttcacatctaatatttatgctgttctagagtttgcaaaagggcttccttttcatttatcactgttcctcaggaacctccagctcccctgctaggttaatgggattgttctctgctgcccagaccgggagccccaggaagccaaatgacagatcatgaaagtggcccagtggaggactcttctactggtgtcaggggtaggatcaaaactcagcctgaaccagctcagtttctattttgtgaccctgggggccaaatatggatcttgcaaaatggcagctggcagcctgagtctacacttcaaccccaaatttctgtcagagttacaagatgctttttaaaatctggaaatttaaccaaaaatacccagattacaaacttctctttaaaaaaaaaaaaaaaaagattatgataggcctgtaatcccagcactttgggaggccaaggtgggtggatcacttgaggccaggagttcaagaccagcctggccaacatggtgaaaccctgtctctactaaaaatacaaaagaattagccgggcgtggtggtgtgcacctgtactcccaactactcaggaggctaaggtgggagaatcacttgaaccaggaggcagtggttgcagtgagccaagatcatgtcactgcactccagcctgggtggcaaagtgagaccctgtctcaaaaaaaataaaataaaataaaggccaggtgcagtggctcaagcctgtaattccagcactttcagaggccaaagcaggtgaatcatgaggtcaggagatcgagaccatcctggctaacaccgtgaaaccccgtctctaataaaaaatacaagaacaaaattagccggtcgtggtggcaggtgcctgcagtccgagctactcgggaggctgaggtgggagaatggcgtgaacctgggaggtggagcttgcagtgagtgcagtggcactccatcctgggcaacagagcaagactctgtctcaaaaaataaaacaaaaatttgaaaaagataataatgataatgatggtattgccattactggtaacattcctgcatggtggagattagtaaactgtggcctacaggagtctgctgccaggttttacaaagttttctggaacacagccacacccattagtgtatgtactgtctgtagctgctttggctctacggtggcagaattgaatcattgcaatagagaccttatggctgcatagctgaaaacacatagtctggccctttgcagaaatagtttgctgagccctcctaagtggcgccagcccactggatttgtgccacagatacccccaggatttattagaatataggtggagttgagggtacttcagtccctaattaacagcggattagagatgataggtgcttatttctctcccatttgacagtttgggcataaacagcctagagatgatgtggcaggcatggtgttggctcccaggctcctgatgggtgatggtcagatggcgttccatcatcctgggcgatcgtccttatctaaagcagcatcccatcctgtctgcatccaaccagcaggacacagaaactataagggaagctcacttcccttcctggaggggagtttccagaagtcacacaccacctggtgtacccctccagttcatagaaaatacagagaattacaaaggaagccagttatatgaaaacatatttatcaaaatattttataaactgtgatatgtatgcttctttacacataaaatggcacgatgaagcagttatttaatggacaatggataggtctgataacttccatgatttcgaagtagcgctggctcaaatgatattttaagaagtccatgttgactacaatgtgatatgaaaatatccgtaattcccattggtgacaaagtcccagggaccatcattcataattgaaggggatgctagttataggttaatgaaaataaacaaatacatacttttgccattcaatttcaggaaattatatcttgggacaacagattaagaacctcttcctcaggtgatctgattcgattccatggcattaagtgccatctaaatgcttacagctcctcagtttgtaattccgtagcttttctgtgaacctggtctgtttccacctgaatgtctaacctgagtctcgaggttaatgtgtctgatttctttatcaacccccatccccaactctgcccctcccagtgtccctttcctaaataagggcaaatctgtcctcctcattgcttggaccaaaaaccttgagttatccttgactctctttacttctttcgcatgccacatcagcaaatcccattggttccacctttaaaaatagcctggaaccaaccacccaagcccttcgcctgccacgattgtggtcatcacagtctgtctcctgaatgactgtgagagtctccaaacattccagttccctgcctcggactggccttaattctaggacagaagctccaggaagatgcaggttttttgctgctttaattttttctgttttgttcactggtatccccagtgcctagagccatcccagccacacaggagtcctcctttaatgtttactgattgaatgaatgaatatataacatcatgatcaataatattatgataaaaacagtaaccatttagaggcagttaacatattttctcattgaatctttcccagcaactttgtcatgtagggatattattattattcctattttgcagttgagaaaactgagctggaaggcagaggtagctgaacttaaatgcaagctgttggctccagagcccatgcccagccctcagacctgcctgcctcggaggataaaaatcatttctgaggccaggccaggtggctcacgcctgtaatcctagcactttgggaggccgaggcaggtggatcacgaggtcaggagatcaagaccatcctaaccaacaaggtgaaatcccatctctactaaaaatacaaaaaattagctgggcatggtggtggcgcatgcctgtaatcccagctactcgggaggctgaggcaggagaatcgcttgaacctggcaggcggaggtttgcagtgagccgagatcgcagcactgaactccagcctgggtgacagagcgagactccatctcaaaaaaaaaaaaaaaaaattatctctgaaaccctacacttctggaaagactgatctggataacgactatggctcctacctgtgtcccccacctatgcttcaagaaaggcaaagtgcccgggtcctgggaatgaccttccttcaaaagcccacggccggatgaattctgggaggatgcagcatgggaagataacctcagtgtggaaattccctttgcctggaattctggcagaaagcacttcggagatagtctgagccacatcggagaggaggagctctcggaggctgagtcccatttgtgtgtgtccccacctttagccatggggcagtccctctgctgttccctcttccctgcctctctgcgtccccgtggatgggaagagctccagtctgtggtcgctggagtcctgctgagaggctgaacagggtagtcaccaaaaggcaggtggagacagacaacctgggattgagcctcatttcagctctgacacttggcagttgtgggatgttcggtgaaaaggggactttgcctctctgtgcctcagtttctccatctgtaaaatagggaccaaaaaaaggatctacctcactgggatgttgtaggtcatcgtctaaaccagtggctctcaaagcgtggtcccaggatctctagactcaaaactattttcatgataataccaggacactgtttacctttttaccgtcattttccttctggtagacagtggagttttctagcaggtacatagcatatctagttatctaaaaaggattaaaatactcttcccttttccatctgcatacccattttattttattttttagaaatagggtctcgcttgtcacccaggctgaagtgcagtggcacaatcacagctcattgcagcctcgaactcctgggtccaagtgatcctgccacctcagcctctcgagtagctgggaatacaggcacacaccaccacgactggctatatttatatatatttattttttagtttttgtagagatgaggtctcactttgtcacgcaggctggtctcaaactttttgcttcaagcaatcctcctgccttggcctcccgaagtgctgggattacagacgtgagccactgtccctggcctgcatgtctgtgtgaggctggatttttcatgttaaacaaccaaaacaatatatctcagcagattgaatgccaaaacagatttaagaatcctgctgccttccagtaaacaagacattgaagagattggcaaaaatgtaaaacaatgcaactcttctcattaattgtattttgtttgggaaaaatatagttatttatctttttttctccccaagacagagtcttgctctgtcactcaggctggagtgcagtggtgcaatctcagcttactgcaacctccacctcctgggttcaagcagttctcctgcctcagcctcccaagtagctgggattacaggcgcccgccaccacacccggctaatttttgtatttttagtagagacagggtttcaccacattggccaggctggtcctgaactcctgaccacataagtcatcacgcccagcctctatttatcattttttaaatgtatgctaacaagtagtgagtttattatttaaatgagtgaacaaatatgttttaaatttctcagttttcatctctaatataataactatcactagatataaccaacatacacaggactctgggttccttaataaattttgaccatattgaaaagcactgctgttgccttacactgaccttgagtgcttttttggttttataaagcacatccacaaatggaagtcatgtcccgtgtgggccaaatagatccaagttcagccagccaaacaccatacaagcaaataggaagacaagaatttaacaattctacccactcctccactcacagagggtgtgcaccggatgataaaaaaacaaatctacgttctcagccaggcgcagtggctcacgcctgtaatcccagcactttgggaggccaaggcgggtggatcacttgaggtcagctcaagaccagcctggccaacatggtgaaaccctgtctctactaacaatacaaaaattagccaggcatggtggcgaacacctgtaatcccagccagtcgggaggctgaggcaagagaatcactggaacccgggaggcagaggttgcagtgagccgagatcgtgccattgcgccccagcctgggtgacagtgtgggactccatctcaaaaaaaaaaaaaaaaatcgacattccctcactcagctgtgtctcccacaggcctcccattacgaggtgttcgttggttcagttgtttacccatttattccacaaacgttcatcgaggtctcgtcactgaccaagctctgttctagatgtgaggacacaggggacaagggactcagaaagccgctgccctcatggggctggtactctggtgggagaagcacgtgataaaaactagaagacagataaatatgaccagtgaataaatatgtggagaagcaatgtcgggggaaaggggagagcctgggcggtgtggggagatgccatttgaataggagggttaggattgagccccagtaagttaacatttgaggctggacatggtgactcacacctgtaatcccagaactgagagaggccaaggtgggcagatcgcttgagcccaggcattgagaccagcctgggcaacataatgaaaccctgtctctacaaaaaaaaaaaaaaaaaaatacaaaagttatctgggcatggtggcttgtgcctgtggtcccagctacttggaaggctgaggtgggaggatagcttgagcctggggaggttgagggtacagtgagccacgaccgcaccactgcactccagcctgggtgacagagtgcgaccctgtattggaaaaaaattaaaagctttgagcaaatagctgggaaaggtgaggaagcagcccatgcaggtatctgaggaaggtgatttctttcaggtaacagcaagggcaaaggccctggggcaggtatgagctttggggttggggtgctggtaggatagagggagaccccaggacaggaggctggggggaaagtgggggcagatgcagtcacggagcaggacaggagacagttataggactttgtagggcatggcaaggactttggattttagttgaggtggatgtggagccactgaagggctttgcacagagtggggggcttgatcaaatttgtgatttaatgggatccttctggctgctgtggaagatgggctgaaggtggaggcaggaggaccagggacgaggttccagcaaggtccaggcagaggcagtggtggcttggaccaagatggtgacaggcggatgatgggaagtggtcagacctggatgtgtcctgagggtgaagctgctgggacatatgtgagggaggacagaggagctgaagtcccctccatggtgcgtagccttgacccactggcattgacggatgtatggatcacagggcgaaaatcaagaggccggtgtgaagtgctgatttgacaccaaatgaagtgatttgaaggaaattactaagtatgcagcggtccaaatgatacataaaaacggccaaacgtgtgtgagaggcacgcggacaactggaattgagatgatgccacgaagggcaaagaccccgttttgttttcgcagactccgtgcctgcgaaatggcgcgggtctgttttgggaaggacggactttccacaggcttctgcttcatctttcgccgacctctctgaattgctttggcaaacactgtttattgtcattggctcggctccgcgctccagcccatctctgctgatagatgtgtgtcatgctcagccgacttcactgtgcggcatgaacactcctccccaagctcattactggagtctcggaggggccttgccattttccaaaacggtgtcacatctggtttctaacaaccatttttatttctccagaggtccaagttttcatccccctccctgaaaacggaaagcagactgtattttgggaactcacagttcttttttgtttctgtttttttgttttttattattttttttttttcagagacagaatctcactccgttgcccaggctggagtgcagtggcacaatcatggctcactgcagacctaaactcctgggctcaagtgatcctcctactttggcctcccaaagtgcttggattacaggcatgagccaccacgcctggccctttttcagagttctttatgcacaatctcatttgttgctgcccccatttttatagaagaattcactgaggctcagacaggagcactcgcttgcccaaggagtcagagtcctctgactctgcaaaccaagctctttaaagccacactgcaaccctgtcgttaatggtacatttggacaactttttaaactgtgcactttacacagagtttcacaacctcggcactggtgacactttggggctggatcattctttacggggggaggagggccatcccatgcactggaagatggtcagcagcatccctggcctctgcccgatagatgcctgtagcacattcccccaccccgccaggtcatagcagtgaaaaatgtctccacacactgcccagtgtcccctgcagggcaaaatcacccctggttcagtgtattctgcacacagatgtgcttcaggttggcagccctgcctgctccgttgacccatttttttcagcatgtagcactgtgctgcagacactataatagaaatcccttcctttctttttctccccccacccctgccccccagacagggtctggctctgttacccaggctggagtgcagtggcaggatcttggtccactgcagcctccgcctccacttcctgggctcaagcgattctcccaccccagcctcccaagtagctggaacgacaggcgtgcagcaccacacctggctaattttttggttttttggtagagacagggcttctccgtgttgcccaggctggcctcaaactcctgagctcaagcaatctgcccatcttggcctcccaaagtgctgggattacaggcgtgagccaccacaccaggcctagaatccctttcagtaagacatgcagttgccacctctcctgcactcctgggcgaggggtgtgacgcttaacattagagggcgctgccccaccttgcacagctgtgtacctcaatcaggtgcacctacccagccctcctgtcggccactgctcaccgtgtgcacactctgggccaggtactgcgctggggctacagtgcagcacggctcctgccttacggaccccacaccctagttggggaaatgaggataaacaagaaaacaaatgcatctataggataatttcagagagtgcagagtgctgtagaggaaataaacagcccggtgactatagagggatgggtgaccagggacaacttctcatctgacctgaggtgccacggtgaggaggaggcaggcgtcccaggcagaaggaagagcaggtgccaatgctcggtggggtagagagcttggctcctagggagcgtgagacctagagaagttgaaacagagtgagctcagcagtgcgtccctgaagggagacggcctgatggctcttggactcagaagggccctctggccatttggggaagtctgggctctgggaaggctgcggaggcagaagtccagttggaagttggctgtgagaaggaaacaggtgaagaagcaagatgcatttctgtcttttttgggattttatatcctgtgtatatgtgtatgttgtgtattcgtgtatgtgtgtatatgtgcttttactgtattttcctgcatcgtgtatatgtacatatgtacctgtatattcatgcattgtgtatatgtgaatgttgtatatctatgcatgtgcgtatgtgtgccatatattaatgcatatgtgtatttttatatgtcatgtattcactcgtgtgtatatgtgtgttgtatattcatgtatgtatatgtagtgtatttgtgcttgtgtatatgtattcatgcatgtgtgtatatgtatgtgttgtatatttatgcaggtgcgtagatgtgtttgtgtgctggttccaaaatatgaggacaaattgccaaatcaaagtgaataaatatttaatgaaatggtgttgcatgattcagcgagtcagctctggaacatttggactcttagagagctgtttgtcgattacctttaatgtagtgtgtgggtggaaatggtgtgggatgaacatgtaccgaaagttgctgatgtccttaaagaagccctgttggtatttccagccagatggcccgtcgtgggggagagaaagtcctccgaaagcagcgggtgctttctgtcctgctggctgcctcttgggaggcccctaggacagatcaggtcctgtttcacccttcgcatgcctgtcagttcatccacgtgcatagcagtgggtgggggtgcactgtcgtttcattgccaacaaccacaggggacaaagtcctttgtggtcccacagctaggaggtggcagatccaggattcaaacccagacagtctgactgcagagacgctttgggcactctgccacattaccacctgtgttactgggaaaagggagaactgatgctgggaggaacagcgtgttcctacgccggcccggcatggcggggacatgtctgcagcagggagaggtggccgaggttcccagtggtttctggttgcaggagccctctgtctcccccattgtccgtggcttgcttagtatccccagtgatgccgtgtgtgcccctgtgccaggtttttcaccagctaatctcagtccctggtcgccacgagacacagctttcacagaccacaaatgcaattattacaaggcaatttcagttagatttggggctgggagagaaaacagaagggtctcctcctcccatcaggctccgaatcgttccccaggagcacttaactcagacaaatggggaagcagccgcgtggagcctccaccgtagagctgcctgcaggggaagtggccgacctgctgggccacgaagcagggtgcaggaaggatatggggagctagtgatcctctccaagggggcagggggactccattaaaccagatgttaacagcaagaagttggctataacaggggacgggcccattggtggataatgaaaatataacccttagtaggcacttgctatgtgccagttccaagcaatgtacagtcgtgtgtcacgtaacaatggggatacatgctgagaaacgtgtcgttaggtgattctgtcattgtgcgaacatcatggagtgcattacacgcctggatggcatagcctactacacacctaggctctgtggcgtgacctattactcctaggctacaaacccccctacagcatgtgaccatactgaatcctgtaggcggtggtaacacaatgggaagtatttgtgtatctaaacatacgtgaacatgttaatagagtacagtaaaaatatggtgggcatggtggctcatgcgtgtattcccagcaccttgggaggccaaggcgggaggatcacttgagcccaggagttccagaccagcgtgagcaacatagtgacaccccatctctactaaaaattaaaacattaggctgggcacggtggctcacgcctgtaattctggcactttgggaggctgaggcgggcagatcacctcaggtcaggagttcaaggccagcctggccaacatggtgaaacctggtctctactaaaaattaaaaaattagctgggcgtggtgttggacacctgtagtcccagctactcgagaggctgaggcgggagaatcgcttgaactcaggaggcagaggttgcagtgagctgagatcatgccactgcactccagcctgggagacagagtgagactccatctcaaaaaaaaaaaaaaaaagtggtttcaggtaagagtggatccccagggcctcaaaccagcatctctctatctctctatctcttgtatctctctatctcttctgtctctctgtctctatctttcccacctccgcatttttccatattgctttacacacacacacacagactcttccctcttggtggcaagatggctgccagcagcttcagttatgtatcccaccagttccaagccttgaggaagaagaccttctcttttctagtagctccctaaaaatcccagggctgactcgctgcagttggcccagcttgggtcacatgcctttgcctcaactaaccagtttgtgcatgatcaccaggggaatgcggtcctcatgggagtcaaggatttgcacacattcctggagtcaacagtcaaggtcagcccgtgcaacttaaataaggaagtgttggtgcccaaaggatgacagagccaggcaggtgaagcttccacctagtgctgggcacacaggaggcagtaagtgctctggcctttcagcagatgccagccctgctgcccaggggcagtcgccagccagctcattgtcaatggcctttcctggcctgccattaattcctcttaatctgcctgccaaattttcccacccccacgccagcccccagcttgcccctcctcttgtgctgtccttgcctcgaaagctcagcgaatccaagcttcccaggcaccagccacctgccacaatttgggctgggcttttaatcttggttttaattccagctcattctcttggctgtatctcccagcccaggagccccggggcccatgctaatttgcttctcccacctccactggtgccggaataaccatttttaaaagtgccttggggaaatataatcaaatgagagcaaaatctaatttggcactaaaagcctctgactgaagccctgttttctagggcctggtggagactgaataatacaccctttttgggtttttaagggttgggggttggagaaaggaaagagacgtgaaaggggagatgctagcagaggaaacagcttgcattaagctgacatccgtggcactgaaaagaatgggcaggaggaggacccccacccactccctatgaagaaattcatatcccagcagccaagccaagaagctaaactccagcattcatcagaaagaccttggcccaagtcttcaagaaccagtaggttcactggctggagatttggaagatgtgggagtgtagcgggaaacccagttccccagtggggagttcagtgaagcctttttctctgactttcagttcacttttctgcaaactgagggggtgaaaatctgtgcttcttaaatgacttgtgatctgggctcctttcagaatgtgtcaaaagctgtggacttgtttccaggaaaatgcacaaaaggcaaaatctggcatgcaatgttccaggagcggtacgaaccctgccactcctcatgacagtctccaggaccctatgggatctgtcccctcttccccgtgatgtcatttcctccctccctcactgtcccccttgggttctgcgatgcccccacgtttgtactggcttcagggactttgtacctgccaattccctctgcctggaacagttttcctcctatcccctctgactcttgctcttcagcccagcgaggcctctcacagcactgcgtggggccactctgtcctatcattctcctttattttcttcatcgcatttgtcatcattccccactagaacatcaactgcacgagggcagaagggatcctggtggtcttgttcactcctgtgattccagtgcctgggaagctccctgcataccgtaggtgtttaatcaacacttgccgaatggatacaggcatgcataccttccctagggcagtgggaccccaaattcagcaatttcgagtgccaccatcatgaggtgtaccatgcccaggtacactgattctgttaacattttaccctagattgtttcactctggacttcagttgtttcaaaaggaatcttttacatcactgacagtattgtttgccacgagtagaaagtgtcggggctctgtaggggtgtaacaaaaacgcaggtaataagagcgagatctggtataaagaaagtgattttttattccaaagctagcttaggggaagaagtacagtcttcctgccttaagggtactgctttgcttttaggagcagaaaggagttgctttttaaaagggggcctggcatgaatggcacacaggggaggaattgagtgctgggggggtccgcatatctcactcgagtacttcatctaccgggaagtcagctggcagccactggtgcctttgtgggtggaactaggttgtaagggtggccagaagctctccacctgggagggagtttcgcagcaggcatactttgggttgtagtggaccattgtctctcgaggcaacctcccagtgagtgagagttccgctccagagcctctaagcacgtgattagatgaacttgccctgaagagagtgtctggtgtaggggagataaaaggttataattgcatttctaaagggcgaagtggggcacggggaaaatggagaaaaaagaagaataaaaaataataaaactgccggacagggtggctcacacctgtaatcccagcactttgggaggctgagatgggtggatcacctgaggtcaggagttaaagaccaccttggccaacatggtgaaaccctatctctactaaaaatacaaaaattagccaggtgtggtggccatgcctgtaatcccagctactcaggaggctgaggcacaagaattacttgaacctgggaggcagaggttgcagtgagctgagattacaccactgccctccagactgggtgacaagagcaagactccatctcaaaaaataataataataataataaaactcatctttttcttagaaaaaatgggaataccgatttatgtgggggcttattaaattttaccctcttccttgttgaggtcctgagccgattaagaaatcagacccaagagtcagctgatgaaagtcaacactgcactctgatgaatctggtgaaggctgggtttgagggcatggcttccttctgagagcatttgggcttcctgactaaactccagagtgtgacagacttcccactgatgcaggtccacacctctcctccccgcgcagacaggacaagcctcctgaaaactagccctccccgggggcagctcagtccccagaggaaaagcaagggaagggattgggctatgcatgcccacttcggcccttcaaatccactaggcacatgctaggggtcagcaaaccacagccaatggacctaaccaggccctccatttgttttagtaaataaagttttattggaacatacccgcccacttgtttatgtcttgtctgtgacttcttttttttctttctaacaatagggtttagcagttgtcacagagaccctttgaccctctggcccacaaagcctaaaatactgactatctggcttttacaggaaaggtttggtgacctctgctgtatattgtccccctcggaggaggtacgggagagcatggagagaggccaggagtgttacagaagtggagcccccccgcatggagggcagcgttagaggtgggggtcaaggtcacaaggtttaggaaatcttgtttcctgaactacacttggtctccaggggccttcctggctctcacaatatggctccaaagacctgaggggtgagatgctggagggttggaccataggcaggtttatttaaataagatagggtttctcagcgacgtatggtggctcacatctgtagtcccagaactttgggaggccgaggcaggtggatcacttgaggtcaggagttcgagaccagcctggccaacatgatgaaacctcatctctactaaaaatacaaaaattagccgggcatcatggtgcacgcttgtagtcccagctactcgggatgctgaggcaggagaatcccttggacccaggaggcaaaggttgctgtgaggcgacatcacgccattgcactccagcctggaaaacagcgagaccctctctcaaaaaaaaaaaaaagaaaagaaaagaaaaggtttcttggattaggcgctgctgacattttgtcctggctcagtctttgtagcgtgggggctgtcacgtgcgtcggcgaatattgagcagcatccttggcctccacccaccagatatcaacagcacaccaagttgtgatgaaaccaaaaatgtctccagacattgccaagtgtctcctggggacagaaattaccccctttctggccaagagccactgctttgaggagctggatgcattgaggcatctccaacattccaggtcccagagaaagagaagtgcaggcctttagcttgcccgggaatctcatgctgcctccactccatcagttactccctgacacctagccagggacgcccagtcgctgtttaattaggcacccaccacctaattacatttcactctgtgaaaactggatatgactcagactcagagactgcagccggttccccgcctcctcctctgcagaacgccaggttcttcccgtttatttttgctccatcctcccacacaaagggaggttccatcccggaccttacccctgaggctgctgggggatcctcccttcctattttcacctcccctgtgtacccagacccttacaggaggtgtttcatcagctcctccctctggagcggtcacctcccggccctgcatgatgggcaagtcatttaatgaagtgctcccctttgccttgtattttgggggtttcagaatccagccgcttgggttcctaaggggttttcccactcctggaaagtgtcagccatctgccaggtcaccaggaaaaccgctgcagagggagccagctccatcacagctcccccagggccaggtggctctgtgctttctccaaggacactggtggataggttgtcctctcctctaggggcaccagagccccatcccacccactctcctccttcctctgggggttcacctccctggcctttctctcttcatcctggcttctcggccaagcactcacgtgcacaaggcccagcgctgagctgtctgttagcaagatctccttacatccctacaacctcctggaacgctcatattctgtgctctcagcaatactcgtcagaaatttcagaaccgcagtgtcctcatctagaaagagacgactagaataggattgctgtctctagactcaaattttcccatttcttaaatatggctttatagattataattattaaaaattatacatgcaagccagacacggtggctctcgcctgtcatctcagcaccttgggaggctgaggcaggcagatcgcttgagctcaggagttcaagaacagcctgtgcagcatggcgagaccccttctctacaaaaactacaaaaataagccaggcatggtggcatgcgcctgtagtcccagctactcgggaggatgaggtgggaggatcacttgagcctgggaggttgaggctgcagtgagccgtgatggtgccactacactccagcctgggtggcagagtgtgacgtgtctcaaagaaaaaaaaaatgtacatgcaaaataaaaacagaagaggatcatgaagaggtcttgtctgtctccttatcacagagcttttaggcacatccccttcctgatgaattagggtgattttctttaagctttgttgttgatgtaaagcgtgcatgtggaaaagtgcatggctcccaaatctccaggccaatgaggtgtcaccaactgaaccacctgctccagcaagaaatagaacaagatcatcacccgagaaactccccttgctgctcccagccaccctcccccagtctccaggatacccactgtttttattctaacatcatagattagtttggcctgttctcaaatttcacatagatgacgtcatatggcatgtattcttttgtatctggtttatctctcttaacattcttaggttgttgagatgcatccctgttcttgaatgtagcactaggtctttcgttcaagtttcaatgtagccttccgttctgtaaatatgcaacaatttctttacccatccttttgttgataaacatttcatttgtttctacctatttactattacaaatgtgctgtcatgtcttgtacctgagtttaggtgagtgtatgaatacttttctgttgggtaaatacccaagatttaaattgttgggtagaagttaccaatgcattcaaatttagcagacacagccaaagagttccccaccgtggttggaccggttggggcagccactcagtgtgtgagggctcaagttgtcccacatccccacccatactaggtgttgcccatttctttaatgttagccattctggttgctgtatagcagacagaatccaagggatccacaaacttcaatgggaaaaaaagtgacactctggttttcactaacctacagctgagacttagcatttgcttccaatatgagcataagccataaaccacagtatgttggcagaatctgtagctttgtcatctgtagaaatcaccagtatttaatatcccattgcagtttttgcagatactgcaaaatataatattttcactcataactattctgaaatgatcgctctctacaaggttttaaaagacacagtaggccaggtatggtggctcacgcctgtaatcccaacactttggtcaggagttcaagaccagcccggccaacatggtgaaaccctgtctctactaaaaatacaaaaaattagccaggcatggtggcagacgcctgtaatcccagctgaggattactcgggaggctgaggcaggagaattgcttgaaacctgggaggcagaggttgcaatgagccaagatcgtaccattgcactccagcctgggtaacagagcaagactccatctcaaaaataaaaaataaaagacacactgtatcgcaaatgtgtttagtattttgataaccgtatttccaaacaattgattttctctgtaatcctatatcttgtattcaatgcacgtaataacattggagaagggatccattgctctgtgtgccagagggctccatggcagagcaggtgtgcatgctcaggcctcggacacacaatagtttaataaacatcgtcaggcactttctcacgtggcctcctgatccatctccctccgcagctttcttcgggaagtatcttaatgaatacaacggctcctacgtgccacccggctggaaggagtgggtcggactccttaaaaactcccgcttttataactacacgctgtgtcggaacggggtgaaagagaagcacggctccgactactccaaggtaagctgcaacctttccagcctgggagtggctgtgtggcccagcagttagaggcccaactcaggagccagactacttgggttcagattgtgactcaggcacttaaaagtgtgaccttgagcattttacatacacctcctcctcagtttttcatctctcagccagggacagtggctcacgcctgtaatcccagcactttgggaggctaaggcaggtgaatcacttgagtccaggagttcaagaccagcctgggcaacatgacgagaccctgtctgtacgaaaaaaatacaaaacttagccgggtgtggtggcacatgcctgtggacccagctactagagaggctgaaatgggaggattgcttaagcccgggagtttgaggctgcagtgagccaggatcttcccactgctcttcggcctaggtgacggagcaagactctgtctttaaaaaagaaaagaaaaatgtattcatttctcaaaaaatagtgtctgtttccaagagtttggttttttaacattttgccgagacagaatattcttacagaaagtacatacacagagtgtaccattcaaaggcttgccgcacactgaacggacatgtgtaatgagcacccgggtaggccaagaagagaatgtcaccaccgcccgcagcagtcccctcacggaattcccccgactcgacacccctcccgcgaggataacgatgattcagactcttagcgttacagattcactctgcatctggcttctcctgcttagtattatgttgagttcattcttgctgcccagcattccatcatgcgcttataccacaatttgtttatttcttctacttttattgggcatttaggtatttccagtttggggttattacaaatagcgctgctgagcactgtctagaacctagctcctggtgagcatagaggctcatttctgttatacccgttcctcacagcagcgttgctgagcacagggcgtgtgcatgttcggagtgagtgggtgctgcctgagcacctgcagcagtggttgatcctcagtcgtagttttttctgtttttaacataagatgaattgacatgaggtaacatgcacagatcttaagtggaccgctggatgaattttcacatacgtgtgcatctgtttcaccgcgcatctcttccacatatgcgtgcatccatttcaccgcggctccgatcaagacatagagcacttccagaagactccctgagacccctctccagtcatgaccccccaccctggggatgacgtctactctgacttctgacagcgtggattatttttgcctattctagaacttcacctaaatggaatcgtatagtctgttctcttctgcatctgccttttttcacccagcgcaatgtctgtgagatctgtattatttattcattcaacaactcatggacattttggttgtctccagtttgggtctattataaactaagctgccgtgaacatctttgtccatggcttttagtggacatatgcacccatttcttttggttatacacccaaagaaggattgctgggacataggatgtgttaagatgttgcgcccggccaggcgcagtggctcacacctgtaatcccagtactttgggagactgaggcgggtggatcactttaggtcaggagttcgaggccagcctggccaacatggtgaaaccccgtctccactaagaatacaaaaattagccctgcgtggtggcgggcgcctgtaatcccagttactcgggaggctgaggcaggagaatggtgtgaacccgggaggcagaggttgcagtgagccgagatcacatcactgctctccagcctgggagacagagcgagactccatctcaaaaaagaaaaaaaaaaaaaaaaaaagatgttgcaccagtttacactccagccggaaatgggagttgccctgcatcccttatcagcacttggtgttgtcttttttgtcagggctgctttgttgggcatgtagcggtgtttcattatggttttaccacaaaggtttttgaggatcacgtgagttagtacatgtagaacattagaagcgccccttgcacgtagtaaatactcagtatgtagtagcttagatcagggcaacaaatattttctgtaaagggccagatactaaatattttaggctttacaaggcttacagtcctgttaccactgcagaagtctgccgttatagtgtgaaagcagccatagataatatacaaacaagcatggccatgctctaaggaagctttgtttacaaaaacaggcagtcgacctgcttggctgtagtttgctgacccctggcttagatgatgaggaggagaaggaggagaggctgacagtgatgtttcatccagatgtcccattttaaaagaaatatggaaatgaacaaatcttcctgccccatctgaatcctcagagtcagctctgacatccccccacagctggtacattctttccccagaccagctgccaaatccatccctctttctcttttcccatccccactgccaccagtcctgggccctgcctactgtgacttcccaggttaaagtcactagagaacaggcagtcactgaaagagggtagcaagccaggagtgtgtggacaatagggagtggtggagacggtggagaaggtgtctgtccaaaaggggcagatcaggcccaggtagaactgtgggcccagatggccacttttcctgatttttcaacagaagccacaaatttgtattttttacctatgaaatctcctgattggtaaatattggcaactaattcagacttttctaaaatcttgcatcaattgagcatgcctgacccatgggcctgcagcccttcagcccaccatgtcgttcttctgccagcaccctccggggactgtacggtgagtttcacatttggagtcagtgggatcaagttgagagccccaaccttgacacatattacgtgaccttggacatgctacgtactcctaagagcctcaactcccaaatctgaaaaacaagcatacccttgcatacttaatcatgtgtacttccatttactgagcacctactgtgtacccctgagcacctactatgtagtgctcaggggtacacagtagtacttctgataacatgtagtacttctgatattcacaacaatcatatgaggggagtggactagtcacatttggttccattattcattcaccacccccaacaagtattcattgagagcctgctgtgtaccaggtaccatgccaagtgctggctattccaaggtgaatgaaaacagatgacccaatcatggtcctcctggagctcacagtctggcacatgaagatatgatataaactgttaagtgatgtgcacacatcattaatgcacacacacacagtcacatcacacccgtctattttgtcatccccagtatgagccatttcaacctccaagcttgctagttattacagtcatctcagttttgttttgttttttgagacagagttttgtgcttgttgcccagactggagtgcaatggtatgatcttggcttaccacaacctctgtctcctgggttcatgtgattctcctgcctcagcctcctgagtagctgggattacaggcatgcaccaccacgcccagctaattttgtatttttagtagagatggggtttctccgtgttggtcaggctggtctcgaactcccaatctcaggtgatccacccacctcagcctcccaaagtgctgggattacaggtgtgagccatggcacccagccactatagggtaattttttttaatcagactaggctcttgaagttgtttgtgaacagaaatttaactcccagtggcttaatcaaagaggaaatatattcacctatttaactgaaaaccagctataggggtatcaggcatgggtggatccaggagttcaaatgaacccccaaggagttgatttctctctactgtcagctctgtttttgtctgctcgactgtattcacagaagctctctctcctcctggtagcagtgcggccttccttatatcctcccagcttcctggccagctgcaagcatgggagtctctttcccaggagtcccagagagtctcagtgcatctcattggctctggatcagtcccatgtctgtccctgagccaatcagagtggccaggaggatgcctggttccctggactataagtcacatgctccactcctgagccagacatgggggtagcaggagctctacgctggaacgttggctgggaatagagccccaaataagaatggagtttccaccaggagaaggctgactaggtgctcaacggccaaaaaacactctgtcccacttctgttctggaaaccccggcacacatggagatccctctgcctccgacaggtcatcctgggctccctgtaagtctgatgggtccaggcccaagtggcagaagccgcccccggcctgccctcaagtctcattctgcacatagtaggcctccagcctcccaagtgaattaattccaaagttctgatgaggcagtccggcatggactccttggaatataaattccagtcccagggctaagcacgctgtttccctcctcccagcctcagtgcaggcggattctctaaatatcctgaaaaatacattccctcctttttaaaattcttcaccacatccacgcctcatctcagagcagcccgataatcaagttatcccggggtgctcaggattcttttggggctaagcatggggacatagaacgtccgtccttttgccctgtttcctgcccacacacatctccccctgtgaatgagaacagccctgtgagggaggcgtgagaggattcctggccccccagttaccaggggcctgggaacagagatgctctaacagggacgtgggcagagggcggggcggtgaagtcagaactggctcaggtccagggttcaaatcctgagggtagcagtgggcagcaggagcccaagcgtcaagggaacaggggtgagcccggggtttccagccaaggcagagctcaggagccctgtgccctgggccctagatcaggcagtaagatgcctctggcaaggcagaatgtcactgctggcctcgggcgggccttgttgggaggcccaggcagggaggaagcggcaacccttcgtaagcccccctcagaaggcctctgaggactctgtcccaagtcactaatccacagatgggcacatgccaccaaaggggtccagatgtcaagggcagaaagagaggcagtggtgatgagaaaagagtgatacaggacaagcgctaatggcagaagagggttggagaggggaagacagttgttagtgggaagggaagtgagaatgacctagagttgagtccacccgaaaagaggcttccaggtagctggcaaaagtgggcctgggtgttgggtggctctgcagggaggtgatggcagtgcacggccagtgtgggggcgacctggcagattctatgaacttcatgtgccccgccccttgccgcagcgtgtacacttctctgtctatctggagaagcctcagtcataggcaggagacggcgtgatggagcagctggttgtagctctgtttattactgaaagaaattagcaaagtccaccaatacacgaaataactaaatgaccgtgaagcatccctcctctggaagatcctcggcaaaggatgaggccggtctgccttatgtcctgagcccatcaggcagagtgggaaaagcaagttccagaactcctgaggtccttattcaaatgtcacctcactttagccttcctggaccaccttgtataagggcacccccaccacactccttactgcaacaaatcaccatctggtgcattacaccctgtgtatattactgattcatttgttaagtatctgtctcttctcataagaatataagccccatgaaggcaggaatgctcatttgttttgttcactgctgtatttgtcagatagataaatgaatatgtacagtatgatgtgattaataatataaaaagatgcataaagtgatactataatgtacctaacaaaacactggaaaggttattcccagtaggggacagaagagccaaggttatgggggtgggggggtggtaaggagtaatctaatcaaatgagacttcactgtcctttgtactattttaattttcacaaagaaaatgtaggcatatggttcttgaggaataatgactaacactcatttagacataccatgtaccagatactgtttgaatcattttacacaaattaacccatgcatttctcatcatagtctgtgaggtatatactgtgtctattcccaactgtcagatgagaaaactgaggcccagagaggctaagtaatgtaaccgggccacatagcctagtaagtgataaagcagaattcgaacccaggccatctggcttcaaagtccatgcactaaaccacagcccgtgggcccagactggtggtttttgtatggcccctgagctaagaatggtttttacattttcaactaattgaagaaacaatcaaaagaagagcatttttcacatggtatatacaaaaatgaatgtcattcagcctttaaaaaggaaatccggccaggcgcagtggttcatgcctgtaatcccagcactttgggaggccaaaccaggcggatcacttgaggccaggagttcgagaccagcctggccaacatggggaaaccccatctctactaaaaatacaaaaattagctggacatggtggcacatgcctgtagtccagctacttgggaggctgaggcaggagaatcgcttgaacccaggaggcagaggctgcagtgagcccaggtagcaccactgcactccagcctggccgacagagcgagactctgtctcaaaataataaaataaggaaatcctatcatatgcagcaacatggatgaaccttgagaacattatgctaagtgaaataaaccagacacagaaggacaaatactgcatgattcccttacatgaggcatctaaattagtcagacaatagcagcaaaaaggagaatggtggttggcagggctgaggggagggggaactggggagttcctgttcaagatgtatgaggtttcagttatgcaagatgaaacagttccagagatctgctgtacaacatggtgcttagagttaacagtactctacttcacagataaaactttgttaaaaagcatacagctcattttttttttaccacaataaagcttttaagagtaattttcatgacatgtgaaaaatacatgaaattaaaactgcatccatacataaagctttactggagcacggacatgcccattcattttcctgatagctgctttcaagctgcaatggcagtaatgagtagttgcaacagagacagggggcctgcagagtctaaaatatttactgtctggccctttacaggaacggtttgtgcatacttgctctaaaccactatgtatgcttctcattaataatgttatctgtggcggggagaaaaagatggacctgacccaaaaatacaaaggccttggctccagctctggatgcatggcttatttgtttggggacctcacttccttatctgtaaaatgggtataatgtccacttgtcaaagttgctgtgacgatcagctgagctaaggtatttgataacatgaagagcctatgatcattcattacgagttgtctggagcctgtggagctgctgccacccacacgcactgccttggccttggagggaagcccggtgcggagtgcccactcgagggaaacacgcttttgcctagggctgaggctggcagtctccgcagacactagctactcagtcggtgaagcttgtggatgcctgcaggaatcacctgaggctcagagggtgcttgccagagggggccggttgcacctcggggtcccagctgtggcttctcagccctgtggagctgtgcaggccagcagcacctgggtagagcctgactcctgggcgccgggttctggaaaatgcacctgggcctgtggacctccacccatctcaccctcctgctcacaggtctgaatttcagagttcttcctcatggcttgacccgggcaccccaaacacagtttgcccatctctgaactcagcctttcccccggcccaggccttctctacccttccctcaactgcccaaaccagagaccaacaggggtgggggtcacccgcccctcccgcaccccacatccacccagtggctgtcctggctgcccctgagcatcgctggatgctgcccccgccaccctggcccaggcctcctgttctctccctcagagagaacagggcatggctgaagccctgtggccggagggatgggtggctcttgttggctggcctggcactaactgcccactggtggagcagggtggcagctttggaggcaggtgtgtcatgtggcattgcggagctagcagagatcggggaagacttagccgaggagtggccactgaggaggatggataaggaggggagctctcagacatggagaaatctgcccagccaccaagacagtcctgattcttagctgaatggtggcagagagctggctgtgcacaggacactatggcaagagcttcacatctattggtgctttaacctgcctgtcagcctcaagaggcaggtactgtaatcaccccccacacactttgaaacattagactgtgggagcccctgacccaccctcctgggtctcattcctgccccggcctgagccctcccctggaggtagccagtatcctggagcttctacccacacatacctttattctttcatcccataggtggatatctcaaacaatgtacgatgctgtgtttgtgtccttagactttttataaatgatatcatatcatacacatccttccacaacctgcttttctcacccgatataacattgtaagatttatccacgtttgatccgtgttcatccacgtagctctgttctttttcactgctttagaatcccattgtatatcttctcctaggaatggaggttaatggtagctttatttttaaaaaagtttaaccacggccaaacaggcatatagttctaagatgaagtagtgaagatgagtctgttatgaagagcaacggtggcttcccaccccaccccactggcgggtggcagcaagtgtccaccactggcggttccatctcattctcatgccatttcctgacttgaccccttcaggccctgactgttgatgtcagggtacagagctttgcaccatttttagatccattgtaaattacctttgtcattttaagaacttttctaatacctttatatcacgttccaaaactatagcagcagctctttgatttatataacatatattatttttatgtaataaattctgtagagcccccttataaaattgtttttactccccaaaattaatccataaataatattcaaggagcaatatataaagaagcaagtaactttctccgcttctctcctcttcccagtcttcaatcagcattttgatatccttccagatttttccttgatgctcaaaaatatatgaggttagagtttggtttctcctcttcaccttcccttccctctgcccccacaaaaaatagaatgtttctgagtttgactctgttgcttgctcttacccttaaccatgtatcttggacaactttacacatgcctttttaatgtctgcacagcattgcatagtatggaagcaatgccaccaggtgtgttggctcatgccttaatacctacactttgggaggctgaggcaggaggattgcttgagaccaggagttgaagatcagcctgggcggccacttgctagctgtatctacttgggctaaccactgttagatactcaagactctgtctgtagagaccctgtctctacaaaataagaataaaaatgaaaaattagctgggtgtggtggcacatgcctatagtcctagctacttagaaggctgaggcaggaggatcacttgagctgaggacctcagggttacactgagctatgattgtgccactgcaccccagcctgacagagcaagaccttgtctctaatatgtatgtgtgtgtataatatatatacatgcatactgttaaacatatatcctcctgctggtcactgcaatgtttttgttttataaacaatattgcagtggccattcttgtgcatatggatatagtggatgagtgtacctgaaagagtgtctgtagatatatgaatacatcatggtatgtatatatgttgtatacttcagggtggaagctgtagacacctcttcacctttttttcttgaaaataatcactttttgaaagtaattgttttgggcagagctgctttctagcagagggtatatttcaagaagtcattaccttgaagaaagattagcagctaaatatttactaaattcaggaagagttgtatgggtgctgtggctcacgcctgtaatcccagcactttgggaggccaaggtgggaggatcacttgagcctgggagatggaggctgcagtgagccatgatttcaccactgcactccagtctaggcaatggagcaagaccattgctccattttttgctccatgaccaaaaaaaaattaaagagtataggcaaacctcaacttcttagctgagcttttaaagcctccagttctggccatttacttttcctccaactcttctctcctcttgcccaatatgtaagtcagttccttattttcctggagacattactgcatccccatcccttttttgtgtgtgtgctgctccttatatcatttctgcattttaccctctgacattttatcctctttccaaggagccagttgccatctgccctctcttctatttttagagcacatggcaagcacattcctgcctcagaccccgttatctctgcctggaactctttcctggatcagtgattctcaatcctgagtacccattagaatcccctggggagttttttaaaagtctgatacctgggccaaaccgcaggccaatccaaccagaatctctgggggtgggcccaggtatcagtaagctctccaggggattctggcaaaatccagtgatacatatcttcctatgcccagctccttctcatcattcaggtctcaactcaaatgtcacctcctcagagaggacctccctgactgccccagctaaaatatgcccctcacctcagctcccagttactctttgttacatctctctgttttatgatatttccttcatctgtcataacttttaactaccttggttctttatttatacatgtgtctgctcctgccccagtgtaggcaccccagggacttagggatatacccaccctgcatgacagtgtccccagagccttgaaaaaacttcagacttaggagccaagactatgtagtgctgggtccaacatttactagctgtgtgccattgggcaatttacttagcttctctgtgccttaatttcctgttctggaaaataaggattatcatcatacgtactttctatagttatgtcagaattaagcgagcaaatacaggtaaacacagaacagtccttggcacatcgtaagcactcaatagtgttagctattattcttttaatatctttttttttttttttgagtcagagtcttgctttgtcacccaggctggagtgcaatcatgcagtcgtggctcactgcagcctccacctcctgtgttcaagcgattctcctgcctcagccttctgagtagctgggctacaggtgtttaccaccacgcctggctaatttttgtatttttagtagagatggtgtttcaccgtgttggccaggctggtctcaaactgacctcaggtgatctgctcacctcagcctcccaaagtgctgggatcacaggtgtgagccatcccacccagcctattttaatatctatctaaagtgatctattgcaattcctgccctgttctccctatccacttctctgctttatgtccaattagcttagcaccatttgcatcatttgtctggcatttcatttattttacttgcttatttcttgtctgtctgctccctagactgtcagctccagaagggcagaaattgttttgttcactattgtgtccccagtgcctagcagggtgcctggcacgtagtggacaccagtatgaatacctggctcctcacctgttctcctgtctctccccaccccccaggattacctcacagacctcatcaccaatgacagcgtgagcttcttccgcacgtccaagaagatgtacccgcacaggccagtcctcatggtcatcagccatgcagccccccacggccctgaggattcagccccacaatattcacgcctcttcccaaacgcatctcagcacatgtaagcctcagcactctgcctgccagaggcactgcttagcatgaagggggagggtcaggctttagcaacagtactgtcaccaccatgacttcactgtgcctcctctctaatcctcctggtttaaagaccccaagaacatactgcttgtccatggtgaaactgggatgcaactccagacagcctgggcaacagaccaaggcaggagaatttttaacttgggatacacggcctcccaccaagaggtgtgtggatggaactgcatagaataggtttccttttaatgccatgtgtattttatttaagacatctaaaaacattcttttgaggagggggtctatagttttaccagactaattatttgccaccatttattgagctgtgggctatgtagcaggtgctgtgctaagcccttggcattattgtccagtccctgaatattcacagtgacccttggtgtaccagttatctattgccatgtaacaaatcatcccagaatctagcaacttaaaacaacaaacacaaattatctcacggtgtctgtgagtcaggaatctgggagtggctgttctgagcttctggcccagggtctcctgaggttgcaatcaaggtgtcagctggggctgcagtcacctgaggcttgactggggctcagtcccatggctgggtcttgccacaggagcctctgtccatagggtgtttgagtgtcctcacagcatgatagctggcctcacccagagcaaatgatcagagagagagtaaggccaagaaggaagccacagtgtcttttacaacctaatctcggaagtggcaccatcactgtgccacattctattggtcacacagaccggtccttctacaatgtggagggtctacgcaggggtgtgaaggccaggaagtagagattatcaagggccatcttggaggctgcctgtcacacttggtattcccattttacagatgaagaaactgaggcacagagaggtaaggtaacttacctgaggtcacccagctctaagtggcagagccaggattcaagtccagccccccacttctgcttcccatgcctctgcccacccctgtagtactctatccagctggctgggaaacttcctggaaagttctcctgcttctctctgcctcagaccaccccctgcttagcagtgactcagcagcccttactgtgacattctggggctgcaaggatggggtggtttggaatctgcctgaatattcagggtgtttggcttcattacaatctgaatacattgccctcctcaagcccctcctgtaattactttttgacagacctcgaagcagctcagagagggtaccgaaggcactgttcaccttcccatcccctgatctctggggaggaggctttgacagaagacgatgagctgcgtcccaggggctgcagcattgctgctgtgcacatctgtctggctccccctccaaacccaagcccactcctctccacccaagaaggccagcctcccccagcagccggcaccccgccctaccgccacttagaactcatccctgcagcgggtggaggccactcagccctgtctaagggagaagccgtgggtgagggaagggacgctttgcttcggcagcatctctaaaagaggtgccggcttcaccccaaacagcagcgagcggtgccggaatttcatgatgaaattgtttggcattgcctgctggtttattttccctttgaaatgaaaattacagaaattgaaaatgagcagtgtctgctcttatgtggagaagccccctttgccttcttaggggcatgtttggaaggctgtctcatctctggagtataatcatttccgaaagaaaccaaaaaagagaaagtcctgcagctaggatgttaaatgatgacagtcaagaaggggtggagaggggacagagccggggcgcacggttagagcactggatctttctgttaggggtctcctatcccatctctcccctagaaagccggcacatgccctttcctggggcaggccttgtgtactctggcaaaagttggtagatggtggtaccatccaccccgcagaccccagggccctgcaccctccccatgcacccccccacacacacagtcacatacatacagacacacacaaagacatgcaaatacacacaggcacacaaagacataccacacaagcagatacacacaatgaaacacacacaagcctgggcaacttagtgagactctgtctctacagaaaatttaaaatcagccaggggtggtggtgcacacctgtagtcccagttactggaaaggctgaagcagaaggatcacttgggcccaagaggtcgaggctgcagtgagctatgattgcgccactacactccagcctgagtgacagagtgagaccctgtctcgaaaaaaaaaaacacacacatgcagacacacaaaaatacacagttacagacacacacaaagacatacacacacgcaaacaaagacataggcagagatacaaagatacacacaggcgtgcccacagacacagcccaccagccctcagagcttcccttcaaagggcgctgattgtggcttcaagggctttggggcgagggatgttggggctgctgctgatggccccagacacacagtggaggggctgtgaggacaccaccatcttcccgccatttccccagcagaagggaagggggatggtcttcttcacgcccttttgtgaacgcaccagatattcctcggatgctggaggaggtgaagttttcagatgtttgttgaacaggcagctgggcccatgggaagatgccgacatcctccctgggggagcctggcttgacacaggcaaccagcaagctggcgtcgaccccaagcaccacccggctctgctgccttctggcctcagtgtccttctccaaaagcgctctctccgagccggggctgcagaaatcatcatcctctgaacagtcacccctcactgttctcgagggccgatgtcagcctaacttctcatggattcagggatgattgctgaaaattgcatcctggaatccgggcccttgggcctgcgggaccaattttcccacacgctcgctgctctgagagcgtctctgtccgactgctgcccccagcagccccctttcagttcctcggtgggagagatctgagaggggagctgagcttgttcctgggaatgttctacatggcgggtcaggccctgagacagcagagccagcccacaggagagcctggccgttctgtaatgaaaggaagcatgggccctgatggattcagtggcatgaggctgcagatcagccaggggctgagaaagccgagtccaggggagccttggagacagtgactcacctcccgccttacatagcaacggtgtccacagctgccaagctaccccagcggcagcgtcacaatttctgccccggacgattgtgatatctgagacgctgctgaagtcccgacgtaccaggccagagggagacatgtctgtgcccctctgaccaggcttgtttttcctcctcttcttcgcgggagctccttgcccccagaacacccactgtgaaaagcagtggaaactcaccctttacttcagccttgactgggaagagaggccagatttgcagggaacctggccttcaagaaccatcaggcccagggcgaggaagcccacgttttgtgaggccttaaacagtgcctcctgtcaatggtgcaccccacccaggagactcccccatgctgcggttttcagtagctcggagccaggggcccggcataaactgaggtgacaaggaggtgctcttggtttgctcacaatgtttcctctggttttggtttaatctcccattgactaaccaggaaatagagaggatcagagaagtttggggacctgcccgctgtctcacggagtgagtgacagacccagtgtacctgacttctgccgtggagtcacccgtgattactaatgacaaagggacacaccaatgataacctctcccaagcagtcatcacgcactggccatggttagaagggttccccttacagcctctccctcagtgctcacaaccttcctgggaactggcactgtctgtattctccttgggtaggaaatgagggaactgatgccttgggaggggactaactggccaaagacagaactggggctcgaaccccagcagctggtatagtcaaccactgccatgatatcatcatagatacctgcttggggtccctccatccctcacatcacaggtgctcagacagaactttgcccaacacactcctgctgcacgattaagcagcatgccaggtgcagtggctcatgcttgtaatgccaaaactttgggaggccaaggtgggtggatcacctgaggtcaggagttcaagaccagcctggccaacatggcaaaaccccatctctactaaaactacaagaattagccaggtgtgttgacacaagcccgtagtcccagctactaaagaggctgaggcaggagaatcacttgaacccaggaggcaaaggctgcagtgagctgagatcccaccactgcactccagcctggaccacagcaagactccatctcaaaacaaagaggccaggtgcagtggctcatgcctgtaatcccaacactttgggaggccaaggtgggcagatgacgaggtcaggagatcgagaccatcctggctaacatggtgaaaccccatttctactaaaaatacaaaaaaattagccaggtgtggtggcacgcgcctgtagtcccagctacttgggaggctgaggcgggagaatcactcatactgggaggtggaggttgcagtgagctgagattgcgcccctgcactccagcctgagcgacagagcgagactgtctcaaaaaataaaaaagaatgtggcatgtcccaaatgtgcacattcaggtgccttcctcacaattctggccttacacataaaactatgacttatttcatttttaaatccatttctattatttcaaactaaaatctattgcaaaaggatattccgtggtcctaccttaaccacaataactgccacctgccattcaccaaaggtaactgccatctaccaataataggtacaaggcacacaaagcaatgctatggaatttgagttgggtactggttcccgatgaaggctctgaacttgactttcttcccttttttcaaaaggaagacgagcaaagtctagagaggtgttaaagaaacactagcaccaaacagactttgccctgagagagccgacaagggactggctgtctcactttgtcactcaaggtcactgaatgctgtgcctcttaggagcttcccaagtgcacacttcacacgtggagaaacgctgaaacagggtttggataagcccctgacatgccaatgtcccctttcccaccaggagatcacacctggccctgggctgcagacacagcacagggtggctgctcatccgggcgggtctggcgggggccaggcagggtccaggctgtccctgggtttgaccgatgtgtatgtccttgcccaccagcacgccgagctacaactacgcgcccaacccggacaaacactggatcatgcgctacacggggcccatgaagcccatccacatggaattcaccaacatgctccagcggaagcgcttgcagaccctcatgtcggtggacgactccatggagacggtaggcgcccgctgcatgcctcttggtgggcgtggctccgaacccccagccaggccagggccgagacctcctggcccttcagggttttcctggaggaatagaaatcaaaggcagaatgaagaggccccatgtgctagacctggggaacagcttggagcaatccagacaaaagcctcttccttcatgaaacattttctagatctgtgttgcccaatacggtaaccatatatgctagttatattttttcctgctatttacatttttgaacacatttattgggatgtaattcacataccatacaattcccccaattaaagtgtgcaattctgtggttttaatatgcccagagttgtataaccatcaccacatccatgttaggacatttttcttaccccaaagagaaacctcacagcccttagatggcccactaaatctccctcacccccagccccagacaactggtgatctctttctgtctctatagatttggtgttctgcacacttcctataaatggaatcgtacacgctgtggccttctgtgcccagcgcctttctttcacttagcgccacgtgttcaagcttcacccctggtgtcgcatgaatcagtccccctcattccctgttattgctgaataatatcgcattgtatgggtattgtcacattttatttagccatggctatttaaactgaatgcagtaacattataaagtcagttcttctgtcacacaagcctcatttcacatgctcagtaggttcgtgtggctggagccaatatgtgtccatatcggacagtgcagacattaacacggccaccaatgcagaaagttctgccacacggcgcccttccagatcgcaagatcctgccataggctgcagcccaagtttcactcattcattcattcacctgacagcattattgagtgccagtgtacgtgggatacagcaggcagggaacaaaatgacaaaagtgtctgccctaatggaggcagcatgccaaggcagggacacagatgatccacagataagtaaaagagatggatgccaagaagggccatgaagaaccgtggaggggagggcgggccaggggtgacaagaggcaggaaggtgcagtgacaaaggggacagcccctgggaaagttgagcaaagacctgaagcaggggagggacggggcctgagatctcaagcgcctgtcaccccgggtcggagacgggccaggcacccagtccccactgtcccttgcctcctcgcccgtgttgcagatttacaacatgctggttgagacgggcgagctggacaacacgtacatcgtatacaccgccgaccacggttaccacatcggccagtttggcctggtgaaagggaaatccatgccatatgagtttgacatcagggtcccgttctacgtgaggggccccaacgtggaagccggctgtctgtaagtgtgtcatcccccagggacccagggaggcccctgggcccagctcagggcttcaaccatgcagcccaaacccaagcccaccctgggtggcacacagttttcgcagatgtaccccagggccagcggaaagcaattatgtcatgcatgttatatccctctgctggggaaggagaggccgggagctgttagcacctgtggaaacaggtgtggtggggccgtatgccaggaaatccagggagctgggctgtatacgtgtgtgcgcgcacatgcatgtcaccagcgggtgggaatggtgcttggatttctgttctgggctgggcagtctttgagcctggaggttgtcagggaggaaccccggaccacagcacaggcagctggttgtcagctgggatcagctgagccaactctgggcagcagcacaaagggaaatgctcttccctcccatccttcctggaggaccacgtgggccgcagccctcagccagccattctcctcgggctaacctttgagttgacatgttctggcagcgaacatgctgcgtctggggcaggggagcggacaggccactgttcccggcagcagcttccttggatcggctgggatattatggaggctggctcaaatgaggtttttgaaaagcagatgtgttgctattaagactgtcatttggtctgccttctgctcatgcccagatgtgggaacacacacccagcactcacacagggctggctgcggaattcctcctgaaaaggcgttgacagtgcagtgtggaattccagactgacatgttcccactgccttggacattttgcgagaattccaggaggcaggctgcatgagttcaaggccagagaaagtgatgactgactgttgaccttatcagatcacgcccgtctttggctcttagcgtccccattggactaagagctgtaataacgacagtccacacgtatggagtgtctactcttcagggcctggtctaagaactacataataattcattgcaagccgggccctgtggctcatgcctgtaatcccagcactttgggaggcccaggtgggcagatcatttgaggtcaggagttcaagaccagcctggccaacatggtgaaaccctgcctctactaaaaatacaaagattagctggacatggtggcgtacacctgtaatcccagcactcaggaggctgaggcaggagaatcgcttgaacctgggaggtggaggttgcagtgagccgagatcatgccactgcactcgtctgggcgacacagtgagactccatctcaaaaacaattaataattcgtttcagcatcacaactgccctgtgacgtggatgctcatagtagccccattttacacccaaggccactgaggcacggagaggttaagttgcctgagtttacagcaagtaagggaaggggctggggcttgaaaccaggcagtctctattcccatctgccacgcctctcagaaacttcaaaccatccctgtgaacagaaagaatctgacccactgagggctctacaaacactgacattgggggtttggtcagcctcggaatctgtgatctgactcatagggcccaaaaccacatcccacatggtcaagaaaaagagagtgctcatgtcaggtttgggaccaaagacacacggtatctgtcagccaggactcctttggttgcaagcagaaatgacctttgaaccagataaggcatgtaagataaaaggaacacagtaactatagttactgaaaagtccatgcacagctccagcctcaggcatggctggatccagcagtcttacaatgccattggaaagctctcatttcttatctctcagtcccacttccgccgaattggcttcattctcaggtgggtttttctccttgtggcagggtcagcagctccagattttcagccatcctgtttaggaagccaaactgctttgaacagaagacctgaggctgactcccactggcctgacttaggtcacgtgtccttccctgaaccattcactgtagccagaggtgacagaaacccttgagtaaccaggctgagtacattgggcaggggactctgaatggggccaggtagttcctacagaattagaagctgtgacacagagcaaggcattggtgctggccaggaaaagcaaccactgtcctccttcccctgagcctgggggagcgggaccactggacaagctcagccccattagctgccggttgctgggttctgcagagcgcccgtcgctcagcagtcttcccagctccctcgcctctggattcagttgtagcgcctcacgctggccttcgagccccccatgacacagccccatcttcagcagctgcacacatgcttggcagcctgcccgacgttcacagggcactggactggggagagatgaggggttaaagatgacggaaaccctaggacccaggccctgccctggtccccagggaactagcggggaaggcactcagatgctctgacgggactgtccaccattcaacaggtcctgggtcctgtgctgggcacaccccttaagtcccttaccctacattgggaatgccatcagccagaaacaagagccaggagaggtggctcatgcctgtaatcccagcactttgggaggctgaggcggatgtatcacctgaggtcaggagttcaagagtagcctggccaacatggtgaaaccccacctctactaaaagtacaaaaattatgggtgtgatggcgcatgcctgtaatcccagctactcgggaggctgaggcatgagaatcgcttgaacccaggaggtggaggttgcagtgagccaggatcatgccaccacactgcatcctgggtgacagagcaagacacctctcaaaaaaagaaacaggagccaggaaaggtggcagatgtatgggaattcacttagccaatatttactgagtagctcctctgtgttctaagggtataagtcctggagatacagaagtgaccacctgagccagccttcctgcagcttagagtctaactgggcaatagacaataagccagagaaataagtaaattatatagcatatgagatggtgataagtcttcaggagaaagataaagcagggagggtggggagggggcgcagttccgaatagggtcctcaggaggggccttgtgttgggtatctgtgctgcagaacaaactgccacaaactcagcagcttaagacaacacacatgtacaaactcacagtgtctgagggtcagaagcctgggcctagccctgcagggtcgtctgcttaggctgaaatcaaggtgccggccagggctgtggtctcatccagaggcttgactggggagcatctgcgtccctgctcatggggcaggtcaagtgcaagcagaggacttgaacccatgcagtctgcctcccagactgctcacagtctagctgctgatttagagtggcttgcttcttcaaagccagcaaggggagaaagaaaccagagccagactgctagcaggatagtagttgactatctcataacacaaccacgggagtgacagcccatcaccttcacaacccactggttggcagcaggtgcaggttggtccacacccaaggtgagggggtcacattaaggtgtgatcaccagggacagggattctggggaccactgaggcctgtcacgggcctccttggtcatagagcaaagaactaaaggggtgagggacggtggcccctgatctccagggaaaggacattccaggcagagaggatggtaaagaagaaggccctgaggctgcactgtgcctgggctgtcaaggaacagcgaggagccagtgtctgccccagaggttcaggggaagggttcaggaagggccaggatttgggctggctgtaaagggggggtcgccttcactcaggaagtggggacaggaagggcaggagggggacagggtgaggctgtcagctcacggcatgagctgagacacagaaactaagggggggcgagcacagagtgggggttcagctgaatctgggccgcagaggggagctgctgaggttgaggtgccagactgcagcttccatacctgcagatgtcagcctcccacaaactgctgcccacctaccgctccccaccccccacgcgaggctgaggcaccaccacctgagtgactgagtccccgatctcctgcctcccccaggaatccccacatcgtcctcaacattgacctggcccccaccatcctggacattgcaggcctggacatacctgcggatatggacgggaaatccatcctcaagctgctggacacggagcggccggtgaatcggtgaggacggagcagggcaggtgttgagggggccgggacattgacctgcgggaactcagagcaaaaccctgtgggtctagaacgtggggtctccaagggtcgggagctggggttctcaggtcccgccatgccaaccacttacctgctgtgggagagaagcatggtcccctctccgagattctgtcttcccatctggaatgtggccaaggtgaccagttggggaccttctctgagctaaaattacccaaagcttgaaatgatagcagcagtgatggtaggagatggtgctaactgcacggcgcttgtgtgtgaggccctattctaagtactgtgcagggaaatctaggaatttgatcctcacagtaacccagcgaggtggacattatcatcatccccattttaccagtttggaatctgaatcccaaagcgattgagtgacgtgtcggaggtatcccagcaagtctggatgtagctctgggaattcagatgctgactcaccacgccccataactttaatgctggagggtgtgatgggaacatattcctaggtgtccagagaggcagaataggaaccgtgagggtgagcaagtcagacaggtgggaggtgggctgagtcagggcggggaggctggtgtggccgcagcgacatctggtggccagcgctcttaacagccaccaggttcctggcctccaggtgctacttcaactcctggcttgcacctctggcagcggagcccttcccctgtggcctcccagaggctccagccaggcgagcactgtgtgcccacatctggctgccctgtagggggaccgtgtccattgaggctcctcccctgactgtgaggccaggcaagctgtaatggtataaaatggacatgtttggggacactggcctgggagccaggacacctgggggtcaggggacagggtggaagcttcccctctcagcttcagagtccccatctaggaaatggaaatgaccaggtggcactggatgaaacatacaaattacatacatgcaactgcaaagcaccaaagaagaaaatactcccaaaacccaatgcaattaacctgacatcaaggcaaccactgcgcctgacactgagctcaagacagagctcaagacgccaaaccactgcgcctgatgctgaaccactgcgcctgacgctgaactcgagatagagctcgtctagtgccgggggagttgctgggcttcctgggaggggcttgagatgtgtgtgcgcgcacacacacacacacacacacacacacacagttacttgggtgggacttacagtgattttgacctgggtcatttctactgtgtgtgtctccagacccaagtctctggggaaggggtggctcaactcagaggagggtgggcaatgctctagtgcccagctgggcacactcaccacaattgctgtccaggctgaccgtaaaccaaggctgactcctggtgccgtccctgctcctgggggaacggggggtcgtgggaagccctcatgttgctgagaagcaggagccgtgcttttttccaggtttcacttgaaaaagaagatgagggtctggcgggactccttcttggtggagagagggtgagtgccgggtcctgggagggacacccctgcccacctccctccctctgcccaggaagcttctgtagccccaccgcatcatgctattcaggagctgcccatggctctgaagttggtccaaaggcccctaaacacaaagcccattcactgctcctatagacacagaattggggtctgaggtcacgtgtacgcttttggcatgctttgtccagcctctacaatgtcttcaatttatttaatttattgccaactcatgcaatttgggaagtttcttataaaattccaatgtcttaagtttcctaaacatcagaagacccgggcaggtggccctgcgccctccactgtgaggaaaagccggagccgagggggcacccctctaggtgggcacacatgcctccggggctcctccagagctgagaggccggccccgcggctcctgctctctgccccatagcaagctgctacacaagagagacaatgacaaggtggacgcccaggaggagaactttctgcccaagtaccagcgtgtgaaggacctgtgtcagcgtgctgagtaccagacggcgtgtgagcagctgggacaggtaagaaggctcccttccctcccaacggctccccctcctgactgcagccggccctgacctgcgaggctctgagagccgctgagccagcagggccagggcctcccaacgggtagtcctttgctgccgtgtggtgcccaagatgctgtttggtggtgcaggatgatgctcacaataagtgattcatttctcagcagcctttggaccctgaccgtgtcagaggccaagtgtcccgtgggtgtgtgtatgcccttagcgcctctctagcccttgccgatctctcttgcacgaaggccccagcaggagttaaattattttattttcaccatattcactttgacagtatcctctttgtgactggttttccttttataggagtaataagacatggctttttaaaataaatataggtaaggttttaaaaagtgaattgattgcaagagaaatattaaggaaattatggccaggaacagtccgtggctcatgcctgaggtcccagctactccagagctgaggcgggaggatggcttgagcccacgtgttggaggctgcagtgagctatgattgcgccactgcactccagcttgggtgacagaataagaccctgtctctaaaaacataagaaaaaagaaaattatctgggaagtatcagagatagccagaaactgacatgtttgggaaagcctgaaggaggcttttctgaggctggaaagccagggcaggcttggagaggagggtcgggggcggggcagggcagggaggggagtgggatggaaactctgccttggctggcccaaggggtgccggaggtgtgtccctgccctgcctgtcaaaggctgggactttgagctggggctggagctgtgtgcctgtttcacctatgagaaaaagcaaaaccagggccctggtattgaaggccaaggcctgaagtggatgcgtttctgatggactgcatttgaatgactccatcttaacactgcacacagaattagtacaggcccatacaggcctgactgtgcctccccacccagtgtgtgtttgtaaacccacagacccctcttagtcacacaattaacccgtatctgccaccgggcaggagctgtggatttcatccctccgttgtacagcatgaatgcgtccccccgcttgccaggcactgtcctaggcgcagggccacagcctcgaacatgctcaacagaagctcctgccctcccagagctgatgttctggagagagttcagccttgactttgtaccgagatcccagaagtggttctgattttagttctgggctaaaaggagtgaaatgaggaggccaggaagtctttgcccctcgacgagggaacgttgtcaagtcccccactggttctttctgatgtctcccctgacccagatcagggcttgggcagccagaatgacctctttgctggggccaagaaagaggaggtatcagcattttccaaacaatcagagcacaccactgaagccaaaggaagagagtgctgagggcggagtttggggcacttagcctaggccagctgggaggcagcaacccacggcccccgacccagccccggagctttggggacctcaggctcagacgtctgccccccatcccaggcaacggccctgctcacaagccggtactccccgagtgccgttgccatgtccctgcttgtgccgtgccttctggaatgccctgcccagtgtagaagctgtaccctgtggcccgaggacgtctcttaggggcctcacacccagccatagcattgtcttgggtaccttgtccgtgctaccccacgtggtagatgtttttttgtcatttgctgaacaaacgtgcccaggaaccgagctcatgtgcatctgtctgtctcccggtgacacggggacatcctaagggcagggcccggctagaattcatgtcatcattgccaaagcccagaccagggcccaggccgggcaggagtaaatgtgccctgggcacctcgtaatgatgatcatcacgggcaacacgtgagtgtaagctctacctccagccaccctatctggcaggtatgttctgtacacggggaaactgaggcccagggctcaggcaaactgcccacagcctcacagcttcaagtggtggaggcaggatttgaacccaggtagttgggctgcgggaccttcgttctcagcagctgtagggaccccaagtcaagccgacactggcccagccctgtggggctcaggcgccgcccccgccaggacagcctcgggacgggccatgtggacacggcttctacatgagtagttgcaggggcagcaaaccctttccgcacaagatcagacagtaaatagtttgggctttgcaggccacatatttgtttttgttcttgctttttacaactctgaaaacgtacaatgtaaaaaccgtccttggtttgcaggccatacaaaaacaggctgtgggctggagttgactagcaagagggctgctgtttgccgacccctcaagtcgtgccccagctgagtttgttgggttggagcggggagcaggcagtggggaaggagaattccaggcagagagagctaagtggacaggaggctgctcgccagcgcacacagctcagggcttcacgcagaactcagagccctggcttttcttgaaaaatcagacctgggcttctgggcctgtgctcccctctggcgacagtcagatgggtatagccggtcacagtgcccactttagcctccccaggtcccccaggcgcttctgggctggcctcattcagggccatgcctgctggcccatcagtctacttctgcactaaggaatccaggttgctggaagggcctgcatgcattgaaggggatgggagggtggcagggcgctgtgaatgcaattagattcagcctccaggtgagaacagatgggcgggacaggggcaagatgagcaggtgaaaggcaccagggccttcaacggcagcgggcgggggcagacggtgcagcagagggttgggggggatggtggcaccagactccacacttttccttacagctcttgcacctcccagttgtgtgacccaggacacatctctctacctccgtgtgcctcatcttgaatcggcacagtaatgacagcacctgcctcgtagggtagcgtgaggtgtagtaagcaagttaatatattaacacacagtgcttggcacatgctaagtgctggagagacacagggaacagatctgacccatggcctggaaaggtcactttggcacagaataggccctaaagagtcactgggtcaatgggctggagcagctgtggacagaagggaagagaatccagtttacaggtggttgcagaatcccgtgaggggatccaggaggctggaactggggaagagcagaaggatcaacacgagagatttggacagtgattctatctacattcagcgtctgaccacaggcctggagttgagtgcacacgtggagcctctgcacacactgcactgattgagtctgggaaggtggtcaggggagacctccttgcgctggagcagacgggaaggaagagaagcctccagcagcaggaagggctggagaaaaggcattctaggcagaaggaacagtgagcgccaagtccctggggcagcagcccacaggggatactggagagagggctgagggagaggaggaccgatgggtaggccagggccagattgcagaggatgttcaaagactagtatcaggagcttgggtcttgtcttaaagacagtgggagccattgaagggttttaagtaggagagtaatatgatccaacttgccctttaaaaagattcctctagctgccatgtgggtggattttaggagcagacagaagcaggtaaccgtgagagtggtggctgtcggaggcatctcgctgggggatgatggtagctctgcccaaggttcaagcagtggcagtggagagaagcggcattggagatagcagaggtggggctcggtaacagctggatgcaagcagggagagggatgtctccagggtggatgggggtggcaggggagaggcgggtttaggggagcagatgagcagctggccgaggccctggcatgtctttcagaagtggcagtgtgtggaggacgccacggggaagctgaagctgcataagtgcaagggccccatgcggctgggcggcagcagagccctctccaacctcgtgcccaagtactacgggcagggcagcgaggcctgcacctgtgacagcggggactacaagctcagcctggccggacgccggaaaaaactcttcaagaagagtaagtgtcacaacctggctgagtgggacaggaggagagagaccatgcctggggggccccattcattcactccgacagttccacagagactgtcactttgccaggtggtgatctaggggctggggacacagccacatctcctcacgagccacccattctagtggggagcagtagtaataaacagataaggccaggcgcaatggctcacgcctgtaatcccagtactttgggagtccgaggcaggcagatcacctgaggtcaggagctccagaccagcctggccaacatggtaaaaccccgtctaaaaatacaacaattagccagatgtggtggctcacgcttgtaatcccagctacttgggaggctgaggcatgagaatcgcttgaacccaggaggcagaggctgcagtgacccgagattgtgccactgcactccagcctgggcaacagagcgagatccatctcaaaaaaaaggaagaaacacacatacaaggttctgtattgattggctggtgaaaatgctaggaccagaggttcacaggaacccagctctgtgcttcccctaggagccatgtttcagcgttcaattagtcagtgtttgtggtgagtttatagaactaccctgggctgggcgcggtggctcacacctgtaatcccagcactttgagaggccgaggtggacagatcacttgaggtcaggagttcaagaccagcctggccaacatggtgaaaccccatctctactaaaaatacaaaaaattagttgggcgtgtggtgtggcagcagagtcgcttgaacccgggagcagaggttgcagatagctgagatcacgccattgtgctccagcctgggcgacagagtgagactcggtctcaaaaaaaataaaaaataaactaccctgaagaacaaaaatagactatagttgagtggggaaaagcctcactcagctgaagaagtgtctacaccttcacacctcattctcggcaagggccgaggagaggacagtcagacagaagccagggagcaggcgaagtggagagagggactcttctagacccagccagaaggctcagccgccaccctgggccatcgcttcaccattctgaggctcagctcccaccatcaaacaggaagaatggtccctgcatgactttaaaacaagaatgagcctgtgccctgaaaatgtgtggaggcgtcggggtccgccggctagaagtgtgccctccaaggctgggcagcttcccacgtagcccatttctctggcctaaggacagccaaagcctaatgagagattttaggtgttgtttttaaaaaaaattatggtgaaattcccataaaatttatcatcttaaccatttttaagtatccagtagtgtcaactatattcccactagtacgcaacctatctgctaaatgaactcttcatcttgcaaaactacaactgtccccattcaacgttatctccccattctcccaccccgctcccacccccaccccgttctcccaccccgctctcccaccctgctgtcaccccattctcccacccgttctcagcaaccactcttcttctctatgagcttgactgctttaggggcctcatgtaagtggaattgtacagtatttgtccttctgtggctggcttatttctcttcgcataatgttctccgggttcatccacatggtagcctgtgttggaatctccttcctgatcgggcacagtggctcacgcctgtaatcccagcatttcgggaggccaaggcaggcggattgcctgagctcagaagttcgagaccagtctggccaacaaggtgaaacccgtgtctactaaaaatacaaaaattagccaggcatggtggtgggcgcctgtagtccctgctactcaggaggctgaggcactagaatggcttgaacctgggagcgggaggttgcagtgaactgagatcatgccacttcactccagcctgggtgacagagcaagactgtctcaaaaaaaacaaaaagtctccattctttataagacggatgatattgtaccacagactagttagagattgaggtctctgacggcaggcgcagtgatctcctctggtccagccagccaggcagcaaatgtcttcatcgtggagcagataagtctctctccataacagcccagccactgcctgaaacaccgtttcccagctgatgaccctccgttacatttcctcaccagctgattaggaactactacattaacttttctagctgaacagaatgattggtttccagattggattacacagccagcatctccttgcttcaatatgtggcacagtcgataatctttaaataatacaagatctggcagggagaaattcagctcttttccccttattaatgcttagaggaaagaaaaatacctaaaagtagctgagagtcagctcagccctggtcagaatcctcatgtgagtgtaatgtcagagccgggacctgcacctctcaacagccctgtgagcagggcaggggtgatcatcaggggatgatggacaggaaagactgggtcacgtggctgatttggggactccagccccatctcctgcctggcattcttccccctgctagagtctccgacaagacactctgtccctcttttctgagcagtcagcctagagcaggctgaactgggggctttctgtcccccaggggacacttggcaatgtttggagacagttttggctgtcacaattgtgtgtgatggaggggtgctgctggcgtctagtgagcagaggctatggatgcggcaaaacatcttgcaacgcacaggacggcccccaccacagagtttgatctgaccccaaagtgtccgcagtggtaaggttgggaagccctggcccaccttgatccacggggatcctggctgtggcgtggggaggttaggcagagccagccagctcacagcagaagggggacccaggaacaggagaaggggacgaggactcgggggatgggcccagctgactggggttcattcatttcttgaactttgtgcaagacactgagattagagttgacctggagagacacggacttggacctcatggatgaaacaagatgtgaacaagtgaacaaagggccacttccgctggtgaaaaacgcatgaaggagacgcagcggtggcgggactagcagagaggggtggcggctccagaatggcgctcaatggacatttaatgagaacaaagtacagaaaggagcaggtcttgtgaccagccagagagcaagtgttctgaggaggaggaagatggagtacaaagaccctgtgctcagaatcagggcggtgagtcccagtcacagagaggtgaccggtgtggccgagggtggtgagaagcaccatgggcatgggcagccacatcacacaggcggtcaccggcgtggagaggcagggagtgggcccagggttgtcaccttaggtgaggacgtcagctgcaggcagagtccccaccccctgcagtagctggtccacaccagctcatcaggcatgaatgcttcactagttccgtttcgtgccatcctccaaggagcctttgtagggtaggcaccatcctgagaagttacccaaatcgccggggccacacatgtgctcaggggtttgcacctgagccatctgattgcagagtcaaagctcttggccgccgggttatgaagtcctgtcccattccctgttggtgtggcaggaagggtacctccaggactctggacatgaacacagagtgatggggagagcaggtagtgtggcttcagtccaggaaaggattcacacagggctggcataccgcttctgtgaagagccagagagtaaaggtcttgggctttgcaactcagccctgcgactgcagaggtataagggaatgcgagcagctgtacccagtgaaactgtattcacaaagacagatggaggctggcctgggcccttaggccatggtttagggacccctgaatctagagctgggagatggagggtggaaagaggcaaagcagctcacttatgagccgactgagacaaaaggagtggagaggacacgctgggtctatttcctgagcctctcggggcaggacctgcttggcacagggaccatcctcggcaatttgtgtacttgcatcgggagactaaaccgagggagagaagtgcccaggagaaggctgccctgtgtcagaaaaggcccaaggctctgctggagaggggaggcctttcccggcccctcaggatccttcggcccttgtgactctgatgcaaggtgtctgagaactgaaagatacaaaacatcccccaagagtgggggtggcacccgggccacgtgagaagggagccctttcctccctccttccactgccttccgccaccacctgcctccagctggtcctctttggtcaccatctcggggtcacttgggatccaacaaaacctgggtcactaactggctccaggcccttctctttaaatgaggcacatctggagaaggatgacaactgcagtgcgtgcctgctggggccagacatgtgtcaggtgggcagaggttttaaaacaggaaggagtggcgggggctgtggccaacagggaagacagtgggcagccaaaggggccgcccatccccggcccgtcctgaccatatggaactgtgggcccgtgagacatctgtttcctttctggaagctggaaatctggatccctacatcaccgccaccacctcccctttttctttaatgttaccaactcagatttgtttttgagacatagaagatacaggctacctggggtgtcacttcagcctgcacccctgagttttcagcgtcagggcgtatgcaaaagcccccctcagccttgttgccggcccacctgggtgtagcacctgcctaccacctggtgggcagcctccagctctctgggactcaaagaagctaagtggcttccccagtccccgtccatttctacccagagacaggcactgcagggcccctttttcccagtttaaatcaacatttttacatccatgatactttttttcctttttaattgaggtgaagttcagataacatcaaactcaccatttttacaattatatacaatgcagaggcatttaataggttcacagtgttgcacacctctacctagttccaaaacatttcatcaccccaaaagggaaccccgtacccacaaagcagtcactcctcactaccctctcccccagcccctggcaatcaccaatcttctttctgccgctatagatttacctattctgggtagttcctataaatagaatgtaacaatacgagcccgctttgtgtctggctggtttcactccgcctgcttttgacattcatccacgctctagcgtgaatcagaacctcgctcctggttctggtcgcatattccgttgtacagatgatgtaccgccatttgtttacccgcaagcagctctcgcttgaaatcctcttgagtcagtggcttcttggctccaggacttccgtcttgccggtgtgatcacctcgaggccctcccctgcggtccaggatctgcgagcaggcgggtagattccacgacccctcgagtcgcaggcaaagctgagcctcatgcttggaagcccggccctatcttgatgaaggacccactgccctgggagcctggccagcctttcctgcctccctaactctgccactcctctaatgcccacagagtacaaggccagctatgtccgcagtcgctccatccgctcagtggccatcgaggtggacggcagggtgtaccacgtaggcctgggtgatgccgcccagccccgaaacctcaccaagcggcactggccaggggcccctgaggaccaagatgacaaggatggtggggacttcagtggcactggaggccttcccgactactcagccgccaaccccattaaagtgacacatcggtgagtgtccaggtggaagtcgagggtgaaggggacaggacagacctcggcaaagggcttcccacacctcttgggcccctgaggaccaagatgacaaggatggtggggacttcagtggcactggaggccttcccgactattcagccgccaaccccattaaagtgacacatcggtgagtgtccaggtggaagtcgagggtgaaggggacaggacagacctcggcaagggcttcccacacctcttgggcacctgggctgctccccctccaccacctccgagccacacgtgatcccttctctcaagcaggtgctacatcctagagaacgacacagtccagtgtgacctggacctgtacaagtccctgcaggcctggaaagaccacaagctgcacatcgaccacgaggtgagtggagagcgggagaggagcatgctctcggccaccacgggcctggcaggacccccggttcacagtgggagggcagtgaggccagacccagggaagaggctggagaggtgaagtgaggtccccacagattcctcaacgcggggataggtgtcagtcccagcatgagacagatagcttcctgcccaggccgtctgagggacgatggcttagccacgttgtcccccttttgacttacaagaagtctacgctacaggaggcctttcatcaaacccaggggagacactggaggcctcagtgggctcagcgggttcctgcgcaggccaggccggaaaaatgactcggttcccttgcaagggctggctggaggagaaggcgggcttccttcaggcagaacaagtacctcctccccacccagacatgccggtgcttgccctggggcccggggagtgcaggctgccgctgctgagcacagacacggcagcgtgggggcagtcaccaggccaagtctttgttgtccagccttgaaggtttcaaggcctcctcttctgcccctccctcagattgaaaccctgcagaacaaaattaagaacctgagggaagtccgaggtcacctgaagaaaaagcggccagaagaatgtgactgtcacaaaatcaggtgaggcagtagcaaagggacctccctaagaccccactctcctacaggacagttcagttcatcccctctcgtgattgacccctttcattttttatttttatctttatcttctcccctcatggcattaaaaaaatccgtaatttacctccctgttgtcagccagtgtggcacacggacctgctcctcagccaggctggcgcccagattccagtactgctagcaagagacccgtgctggctgcgcagagccggctccaggccggaaaagtgcctctgccgattgccctttcagaaatcccccatgtggtttgaggtccatgttcccggcttaggggtcccctggcccaaaggactgaactctagaacagctctaatagaacattctgtgctgacggaaatgggctatatctgcactacaccacacgtggctggtgcatacttaaaattttggctagtgtcactaaggagccaaattttttattttgcttaattcaaattgaagtagccacctgtggccagtggctaccatactggacagcacagctgtagaagccctgctgtctttccagaaagtgttgcaaaacacaggcttccctgtgttgaccccgaccaagtgtgagtaggcagggtggtgagggaaccaacctcaagatgctgaggctttgacatgtaaaattaaccatcaaaaaagaaaggaaaaaggatgctgaggctgatgcacctaaagccaggcccagcttctagtcgtggctaaattacaattaacccaacctgctaaagtctagcaaaagtccaggcagagtcctggctcatgcttggagaaagaagccactcaggcaggcacctgctgccctgaggatagggtcatgccctacccaccaccaccccagaaggagggacaggggtggggcagcagcaacacatgggagtcccagaaatcacagcttgcacctgccagcggagccctctgagccactcctgaagcctggggctgggggggtctgttacagctaccacacccagcacaaaggccgcctcaagcacagaggctccagtctgcatcctttcaggtaagagcagcttgaggtcctggggaagagatgcagaggcctgcatgaggaggtggccctcccttaagctaaaactcagaagaaaaggaaagaagtccaggcccttccctgggaagtccacggtagccctcgaagaggccttacttcccaatcaacactgagcgggcctccgacgcccccttgtggctaaatggggttaccgcaactccaccaagcagggcaggacacaggaaggaggggaaaggggtgtcaacaggagtcccagtagctgcctggttctgtccccagcttgtgcccccttgggagttaaagtagaatgacaagacccaggttctggtcccggctctgccttggagcagcactgggacttgggaccctgaattgctatgcccatggctctctgttggagaagcctcagcgaagcccttaggtggacaggaagagcagagacatggggtcactgatccctcagaggcccaaggtgtgtgtggccctctgcgcccataggaagggcctgcaagagaaggacaaggtgtggctgttgcgggagcagaagcgcaagaagaaactccgcaagctgctcaagcgcctgcagaacaacgacacgtgcagcatgccaggcctcacgtgcttcacccacgacaaccagcactggcagacggcgcctttctggacacgtgagcaagcccagggcaggggtggacaggctgaggcccaggggttcaagaaacttctccacttagtgacccagacctctctcagaaagggggtccccaacaccaggggtccacggtgctcgggacagcctcttggcatttgacgaactggttttaggggctgtccctgacaggaatcactgttggcagatggggcctcctcccgcaggcactcaggacatgctctctcttccttggcagtggggcctttctgtgcctgcaccagcgccaacaataacacgtactggtgcatgaggaccatcaatgagactcacaatttcctcttctgtgaatttgcaactggcttcctagagtactttgatctcaacacagacccctaccaggtacaggcaacccgagctagagggatgggggtgtggggtacaccagtgctgccaggtaggccccccccaacctcagggaagtgatgacaaattgtccaagtcccactgagtccctgagccggtgggagtaagttgtgaagctgctgagattgggggttctgtgttcaatcagccttttttgcctccatcaccctgctttttgcctccatcaccctgcgtgtgtaatatatatggcttcttccctctaacttaacatgcagcatgcaaccaggttttgccggaacttgtgaagactcctaacactgtcaggctgtaggatcaagccaaatatcacccactgcagggcctacacggaccgcgcagctaatataacagtaacacactgcaccaagcactctgctaagtgcttccgtacagtaagccatctaaacacacatgcgactgaagtggcccaggaccacacaagaccaaaaggagcagtggcatgtctggtcatcggaacatgtgggcccttgtacagggacagtcactactgagctccagcactagagctttcctgtactgtggccttggtattgcccaggctttgacctttcaagaaaagcctgaaataatttaaatgaaatctgatgtttaaatgtcagcagcacaaatgctttaattactatataggtgtgcagtctttctccttagataggttcaccctcatactttaccaaaggggtaggttaagtccctcaccggtagctcccagactacacaagaacccaggccacttacccgtcctttcatcaaatggctgctttgcaatcaggaggagctgagggcccctgaatgaaggctgctgataaaaccaagacttggaaggctttctttccaagcttgggaagtttcctgaccagtggctgcagaactccaacgttaaatacacagacgtggtttttattctcctgagttttcactctcatgaagagtgaacctggtgggacttgaagccaaaaagtcacctaactcttccaaacgctggctcttgcagaagttggagtaaacaggtcaccagcccctagcaccttccacccgccacctgcctgaaatatgtcccctggttggtagaagggcagggcgagagtccctgtacttaccttgttgacagactaccttttttgcaaccagctgatgaatgcagtgaacacactggacagggatgtcctcaaccagctacacgtacagctcatggagctgaggagctgcaagggttacaagcagtgtaacccccggactcgaaacatggacctgggtgagtaggcaccccaacgtggggcccttggacagcagggtaaccaaaggaagggactcaggaggtggtgtctaccccaagaatgagcctgaaatcaccaggctttgggaggtgatacagttccagacgagtcatgggagcccctgtccatagcaggcagatgacctttaacaagctgtgattcctgagagaggaacacctgcaccaactgcccaggaaacacacggaattccgtctcatttcattgtcctcccttttgtccactcatgcattcaacaaacacttcctgagaacttacacctgaaaccatgttgactaaagatgaccccatcctcgctgacttgtgtggagccagtgttgtcctaagaagagcagtccacagcaggaggcctcttgcttgtatggaaagggtaaaactggatggtagaatccagtgtgactggggaagggcactgctaaataaaaccagggtcagacctctgaactgagtcctgaaaagtaggatgcaatcgaccactgagaaaacgtggagggctggcgctccaggaagcttaaagtgtgaggagcagaaagcagctcagggggtgcagccaacacaactgaggccagtggagagtggcgggagggcatcgggccaccctgtgtggggcttcctaggccacggtagagtttagatttcatttgtggtgtatcaggaagccaatggagggttttaacctgggcaccgacatttgctaggtggagaatgggactttatgggagaaaacagcgaagatggcccagttatccagggagaaatggtggtggcttggactagaggtgggagcagtaaagatgatggatttcagattcaggtggtgaagcccccagacaacatggtgatgggaggtgcgggattaggagtcccaggtaaatcctgagttttgtttgggacaggacaaaatctgcagttttaagtttagaatgccaaccagatagatattttaagatgaaaaaagctaaacaggcatggttgctcatgcctatgattccagggctttggaaggctgaggtgggaggagacttgagcccaggagttcaaggttacagtgagctatgatagcaccactgcactccagcctgggagacagagctgtcgccccatctctaaaaataaaaaaaatatattaaaaaaagaaaacaaagctaaaagaaaaatgaagttcacttactagtgagagagagtggcctaaaaaaaacctttggtatttaaggtcccttggggaagggactgtgtctaggaggatgcctagagttcatgtcaggaaaatggctacacagcttaggaggaattcagacgctaccgtcggctctagttatgaagagggaagagctaatgtgtttacacaagatgttgcactaatacttctggtcaggagcctgatatgatcagaattttcactagtagcttcctaatctctgccactcaagtgctgctactcttgtgatcaaagtgcaatgacatattagtcactgtgtgccaggctctgtgctgagcattttacatgtgttagctgataagctttgaggtgaatcttatcctcattttatggaggagtaaggtgaacaaggtgggctgaccccggagcccacgcacttgatcctgccacatcctcgggaaaacttccccagagcccaaaggggaactccctcctgcacttggtcagggctcttggctttctgtcctctggagcacagatgttcatgcctgcatctacctccctcaccataactaaggtcagcgctgaatgaagccatcagggtcctgaaactgatcatggtgacactggattttaggcaatctacaaggctatctaggagacttagggcaggttcccctcataattcagtctacccctcataattcagtctactctgagtagggaacactatcagcatcatgggattgtgacaaaaaagcataagatggttttctggtgtgttggggttgttttgcctaaactatctgctcctgttttgtttttcatttctccttcatttaggacttaaagatggaggaagctatgagcaatacaggtatttcgttttattattaaagcctaaacaaagttctcctatcttggcccatccttcagtctcatctctgtgagtctgcacctgttatcttgagaaactgcccttccctctggtctgcccgagaccaggatcacccaccaaagataggtgtcacctaggagaccttctttgtatagttctttggggactttttctttcttggtgatggttaacattcattctcctttgacacttgaaaacttaggcagtttcagcgtcgaaagtggccagaaatgaagagaccttcttccaaatcactgtgagttgaggaaccagcttacaaatagaaatctggttctgaccgcttcattttgccaatgctattctatttgcatgccatttcttacataccaccctttgtttgttctcatgatgagggtgggggggaagtactaatgcacatctttccctaagaaaacacttgaatccatttcatgttttagattaatgccttgtccagtacactgctgttctcgctataatctgtgcttggtaaacttgagctattacttagaggttgagaagcatttaaatattacaaattgctaggcatcttgaaggctgtggctacaaaagtgctaactgatatacaacatcagtagtaggatggcctcattaaatggtttccaaaaagcccatgctacaaactctcactccagtgccattggaggctgacagggactaagagactggcaacctgtaaagttcacctctattctaaagggagcaggccagtttgctccctgcaggaatgggctgaggttcgccagattttctcattcgtctaccaaatccaaaaatgcaagtatgtgtgagaattctttatcattatcatctaatttgacattaagttaaccatgtgggcaaattatcgcccttggtgaactgccacttgcaacctctggtctactcatttcttcctttatatgcatataaacctgtgtggctttaataggacattagtaacaggtcacctaagcctttcttcggtgcttctagaattaaggtacagaatctttacatatcacaatctccttagccactattctgtccagatccttaaatgccatccttgccaggcattgggtgtataagtaaacaaaaaattgaggtgactaggtggtggcaatcccgttctaagtaacctagaaatattcattctcagcagccttgaagcaaagcttcctcagctataggaccgattaggaagtcatgataaagaccatgatagctaagtgctaagatgagtttgttttgttctttaggggacaactgtgggaaggctgggaaggttaagaaacaacagaggtggacctccaaaaacatagaggcatcacctgactgcacaggcaatgaaaaaccatgtgggtgatttccagcagacctgtggtattggccaggaggcctgagaaagcaagcacgcactctcagtcaacatgacagattctggaggataaccagcaggagcagagataacttcaggaagtccatttttgcccctgcttttgctttggattatacctcaccagctgcacaaaatgcattttttcgtatcaaaaagtcaccactaaccctcccccagaagctcacaaaggaaaacggagagagcgagcgagagagatttccttggaaatttctcccaagggcgaaagtcattggaatttttaaatcataggggaaaagcagtcctgttctaaatcctcttattcttttggtttgtcacaaagaaggaactaagaagcaggacagaggcaacgtggagaggctgaaaacagtgcagagacgtttgacaatgagtcagtagcacaaaagagatgacatttacctagcactataaaccctggttgcctctgaagaaactgccttcattgtatatatgtgactatttacatgtaatcaacatgggaacttttaggggaacctaataagaaatcccaattttcaggagtggtggtgtcaataaacgctctgtggccagtgtaaaagaaaa

SEQ ID NO: 15833 - DNA, 72818 bp, Homo sapiens
gtccgcaactgtgttctccctgctgggtggaagctcggccttcctgtcgcaccaccgcctgaaaggcaggtttcagagggaccgcaggaacatccgccccaacatcatcctggtgctgacggacgaccaggatgtggagctgggtaagcctcggggccccagggtggcacctcggcccctcggagcagggtccctgggttaggctgaggctcctgaggcaaggcggtggtgttgatgcgtcgtgctcacttttgagtacattgaaaccaagacacgggccacccacacgtgtttggggtcacaactgggtcctcaaggttaggggtctctacccttctccagttgcacaaccgttcctggatttctccaaagagttaaagagaacaggctgggcgctatggctcatgcttgtaatcccagcacgttgggaggccgaggcaggtggatcacctgaagtcaggggttcgagaccagcctggccaacgtggtgaaaccccgtctttactaaaactacagaaatgagccaggcatgatggcgcacacctgtaaccccagctactgaggagactggggcacaagaatcacttgaatccaggagaaggaggttgcagtgagtggaggtcatgccactacactccagcctgggtgacagagtgagactctgtctcaaaaaaaaaaaaaaaagatgagacatgagcctggagccaaattttggaggctcttgtgggttgtggcaaagactgtcaatcattgatcccgtgaagggtgatccctcagcctctgtccactcttaaaggataacagcgtgttgttggtggcaacaaatgtgaaggttgactaggttagccttgacaacctgaatttgtcttttagctaccaggaaaaggcaatttacataaaaccaagttgttccttgcaatgctttgtattaatgatcacaagtatagtttttttcctccgggagcttctcagtgcagaaagaatttgtagccaggaagcaatcagagcccagagcttttattgacaatttgacacataggatacctatctcctggcagcatttagaatgaggcgcatttgataactatggggagtctgcagactgtggccagagaggtgtgtttcgtttcttgaagaattttgcagaggggtcttgcaggcagcacctggacctcagagcttcttggtctcacattgtgtagccccgacgctgtttcggctatagtcatgcttagaatttccgatgccctgcacgtttgttcattcatccagcagatgtttattacgcatttgttgcattcagtgcactgtgtcaggagccagagaactaagggaggctcattccaggtgaggagaacaggaaattcaaagatactgagatagaaatgggctcggtggtttggagcaaaaaaaaaaagtgccagggagccggagtggagggagctggggccgtgatggagagagatgaagctgaggagctgacttggcccgggttgcaccaggccttgtggccatggtgggggctttgagtttgattcttagtaaaatagacatggatgagggggccttaagaagaggaaggccgtgacctcacttaggttctaacaggatcccccagctcttttgatgaaattaaatcgcaggggtaagggcagaaacaggacactcattcagaggccgatggggtgatagggcagtgatgatggaagctcagacccgggtgctgagatgcggtcccacctgatgtatatttgggaaataaactgatcaatgggttaggtatgtgggttatggaaaagatacgtttcaagggcagccgctagatttggggcccgaatcaacaggtgagtggctgaatacccactcttaggaacaacacatttttgcaacatgatccagctaagtctcatgtctgaatctgactgaattttgcatctgtgacttgtgaataaaaccaacagtgtatgcagataaaaagaaagcaaaggcatatgcagatataaggaaaccaacagcgtatgcagatacaaggaaaccaatagcaggtatgaagtagacacaggagagaggggaacaaagaaagccgtggctgacttaaaatacagagatttcttctctccatttgacagatggaaaaactgaggcagagagaagtcacttgtccaagtttgcacagctagaatgtgattaaacatgatttgagctgggtgcagtggctcacgcctgtaatcccagcattttgggagcctgaggatcacttgaggccaggagttcgagaccagcctgggcaacatagtgagaccccccccgtcttaacaaaaaatgtaaaaatcagccaaggatggtggcacacacctgtagtagcagctaatgggaggctgaggtggaggatcacttgagcccaagaggtcaaggctgcagtgagcctaggtcacaccactgttctctagcctgggcaatagaacaaaaccccatcttagaaaaaaagagaaaaacaagatttgaacccagaacgcgtgatcttagccactgctctatttagccagattcctgggatggatattgagttgttttcagattggtagcgtgtgcgtttgttagtttttcactgttacggatattgttgctggaaatttaaacaggcatcgttgcacagacaagggagtgcttctgaaggataaattctaggaggtggatgcggtgggtttagagcccctggtgttcagtggcctgtgtcagctcttgcccaatagcactacacagcatagattagggcctacaagtcttgccctctataaacaagccagacctcttccaccagcagcactgggttttgaaggaggcaagggatgggaaggtggttgtgggaggggcatgataggctttttataaaccactagacagacccagatcaataatgcatgtcccaaaaaagcccaatacattatctcacagtctctgctacaactggcatgcagcgggtggtcctaaaaaatttatcatttgctattttctgcccatccgtgcagcagttctgacagccctctgggctggagacttcttgactgagataatcccaggattctttccagtcccaggacagagaacagacgtccatcctcattagggtccggttgggaggactggtgccagatacacaagacgaggggcttgttctgtttcctaattgcaaggttggggggttcggggctgtaccacgtatattcaattttcctttccctgcacgcatttgactccctaagctgtcatttggaattatcaaatgcccaggggaactgcttccagggccatactagttcgtaagtggcctaaattatcattacatgtttaaagtagttggggacatccctgtgtctcaatggccctctgagaccaacggacttttgctggacttccgctccaaaagaataagagggaagcacatggaggtaaaggtctcgtttgcagacgtcctttgttcagggaggcagtagaatctttgggctctgccagggtttactgatttaatttgatctaaacctctggggagcctctggggctccagcaggctctgagacagcaagaggattaagacatggttctggcctggagcaagagaatttttgcagcatcccagttctgatctatgacttgagaatttctttaactggacttatttttgaagcttaaatattattttaaaaggaacctccaaattctgactgtaaaggaaaaaaccaatacccattgccttcggcaaaggatcactgtaaaaccaaacacagtgaaaaccaagtcgtgtttttaaatttcagcaagatgctgcctcccagaaagccagtgtgtctctactgtaatgagggtgacgggcagtttcagaagcggcattaaaggtgaagtagcacctgccaagactttcttcttggcctcatcagcaggatagagactagaaaagagaagaactttctcaagcttttgatgtgggggtcccacttacatggggaccacttggtggtggctcttgtatcagagggttaaggacacagccagactccaaaccccagaatatcagagcggattccccagtgctcattttcctgagtgttcacaccaggcagagatgggtgccttttcgaggcccctcagattgtcggatttgaagtgtgccccacgagactgcatccagtgtttgcatttcttttcttttctttctttttttttttttttttttttgagagagtctcactctgtcacccaggctggagtacagtggcgcaatctcggctcactgcaacctctgcctcctgggttcacgtgattctcctgcctcagcctcccaagtagctggaattacaggtgcccgctaccacacccagctaatttttgtatttttagtagattcagggtttcgccatgttggccaggttggcctcgaactcctgacctcaagcagtccgccgcctcggcctcccaaaatgctgggatcgcaggcgtgagccaccacacctggcctgatgtttgcatttcaaaagaattctttgcctctcagaacatctttatttttatttgtttatattttttgagacggggtctcgctctgtcacccaggatggaatgcagtggtgtgatcactactcactgcagcctcgacctcctgagcttaagcaatcctcttaccccagcccccgaagtagctgggactacaggtgcgcaccatcacactcagctaattttgggagtttttggggttttttttttttttttttagagatgggcttttgccatgttgctcaggctggttgcaaactcctgagctcaaacaatccgccccccattggcctcccaaagtgctggaattgcaggtgcgagccgctgcacccagcctatcagaacatctttaaatgaaaatactccgagtaaagttgcaagggtaagagctgtctcattagccaccaggttcaaatcctcactctaccattgaccatgtgtccttgggaaagatttgccctctctgtgcctcagtttactcatctataaagtggagatgatgatctgtttccctggcattcttgtgaggaatacctggcacctgtcatatgtgtgacagtttgctctcacttgggttgttaaagccatcctctgttagagcaccctgggccaatgccacagtgttgtttgtctacagcaagctttgcatatcaaaacgacattaaaatctaaatgtctcatggcactgaacagcaacattagagtctcctcccagctgacacagtggggtgagtgctgtccacgctcatgcaggtgagctggcacccactctgccaggtatgtgagcctggcatggttacataccccataatttgagtgacacttgtcaatcaagtttggcatgggttcttctgccattactgcctctgctgatgaacagagttgcaccatcatggctgttgaaaagcaactgagtggtggttttggggcctgcaaaagtgccatgggaaccagccttccactgggtgttaaaaacgcgtgtgtcacaaccactctctgtcagcctggattctctcagttacgagtgatgtaaacccaactcgagcaggattgaggaatcaaaaaggggactttattggactcatatgaataagtccaagtatacattgagcttcaggtgcggctggatctaggagctttgtctctgggtggcctctgtccctccatctccctgacctcagctttcctccaagttggctttactctcaggccagctctccaggcagcattcctggcatcactagacccacatgaacaccatacaggtgcaagccatccctgtggaaagagagcttctctcacctagaagagagtacccaaattgagtctttttggtctgacactgtctgggacttctggtcaaccagattcaggggaatggaacacagtggttggccagatggagtcaggtgcacattcctggagccaggactggagccaaccccacttgaaccatgaggactgggattgggatagagcagattccccaaaggaaaattcagaagctagtgccagaagaaggcaggtagctggtgtgcagtccagttagagagatgctcgtgacaccctcacatggcgctctctgaagcagctgctcaaactgtggaccagacttattcattcggcaggtgtttcctgagcacctactgtatgccaaaggagatccaacagcaaacaaactaaacagagcttacattctaatgcaagagttaacaagacacatcgaatctatagtacataaaagagcagaaagtgaggaggagaataaagccaggaggggaagccaggaggggcgatcaaccaggagaaaggtggagaaaagaatcgctgggattttctatagggtggtctcattgggaaggggaaatctgagcaaagaaggtaaggaaaccagtcaagggggatccctggggaagagcactccaggcagagggaacggtgtgtgctaaggccctgaggcagatgcggtctcagcaggctcagagccgcaaagaggccagagcagcgtgcacaagagcagcaggaagaatgaacggtaatagggaggtggtggttggatggaccgtgcaaggcatgagcctttgaatgggaggaagattttggctttctgagtgagatggacaccaatagaggacattgagcagaggaggacattgagcatctgatttgtgtcttcataggacccctctagaagaatagactgaataggtgtaatgagagcagggtgtccagtaaggagtctactgcaacagtccacgcatgagatgagcccaatgaggagtctattgcaatggtccaggcatgagatgatagcggttcagaccagagtgaggaaagtagtaagtgctggtcatatttcaaaggtagagctgatacaagtgctgatggaactgatgagggatggtaaagaagagttgagaatgactccaaggttgtggcctgaaaaactatgagaatggattttctgtgtacagagatggggaaaaccatggttagaagctgtgggccgggtgcggtggctcacacctgtgatcccagcgctttgggaggccaaggcacgcggatcaagaggtcaggagatcgagaccatcctggccaacatagtgaaaccccatctctactaaaaatacaaaaattagcggggcatggtggcacacgcctatagtcccagctactcgggaggctgaggcaggagatttggttgaacccaggaggcggaggttgcagtgagctgagatcgcgccactgcactccagcctggcgacagagcgagactctgtctcaatacatcaataaatcaataaataaagctcagttctggacctgggaagttgcaggtgcctgtgaaaagccaacaggaactgtccaataggcagccacatcagtcagacgttgaagagagaggcccaggcctgggtggacttagagtagggcacggtggggatcgtatacaaactgtgtgcttgtttgtgctttactgaatctgagaccctccccagatcctgaaagttgcaggaatacagcctggagaactgtccagtgggagaggcaggcttttgaaagaaagatgtagcagaggtctggccggcctcctgttttccactttccatctgtgaacacaaggaaaccacaccctgtgccacagcctgatatccaggagatcaattccaaatcgcaggctcaagtactctctgtaggggccagatggctggaagcccaggacaacatacccagattccagacaccagatcagtggtaacttccagctcagcctctctgagatcccacctcctggccttctagccgctgatcactagaggagaaaaaacatgtggatgcaggttatctcaggaagaagagaggctcattcggacccacactggtgttcagcttgccaagcacattcctgtaagatgattttttttcaattcagcaacatttgggagatcacttgagttctggaagttaagtgtatcaggattaggtttggctgcatgtaaaagaaaacataaaataacagtggcttaaacaagacagaattatacaaatgtctggaggtaggcagtctagggctggcttggtggcttcaaggttatcagggacccaagctccttctctgcctttctgttccatcatacttactgcgtagcttccatctgcaaagtcaccttgtggttagaacagctgctggagctccagctctcatagccacactctaggcagcaagaagaaggaagcagaggcagaagggcaggaaaaagaaaaaaaaaaaaaccacttcagaagtcacatgcaacacgaatagatcttatttacttagccacatgatctcagcgagaattataaagcacatgcaaatttgaatcattggaagacggtttaagtgttttttgctaaggtgtgagcaagtgcgaggaaaccactagggatagggcagtgccccaggctaattagcaacagtgggacaagaggttactggaacccagggacacagagggtcaccccacaagagctgtcaccctctgttggcaccacagagaggaaggtggaggaatctgtccaccaacctcactctcttctttctccgatctcctgccaggggcccttgtcagtcaaatccaacccaaagcccagagagcgaaggggcttgttgaaccagcacctccaggccagtgccctggggtggagaactggacagagagcagggctggaaggcggcaggcaggctcctggcacatctttggccataagggaatctgggaaatgtttcctagctgggtgcattgaaaataaagtcacagcctgatcagaggaagaaggagaaagagatatttgtgggcaactgagggtctcagcaacaccagagatcaggagcaagggtcccagtgagggcagctcccctagcagtgggaagtggggttgtgtggcctaacactggggagacctgtgtcatgaggagacattcatgtggaaacccgaggcaggagcactgcaggcagaagcacggcacgtgcaagagccctgtggcaggaacaggtttcccaggacgttggaggagggcagcaggacatgggaatgaaggggaggaggatggggaagagggcggcagagagcagacaggggagacctggtggtccccagcaggccatgcagcagggtctggatttgattgcatgcccgatggaaggtccccagaatgttctgagctggtcagctatgcgtgcatgttctcagaggcacaccccggctgtaggtgaagagggtggcccagggacaagagcggaagcagggagatcaggtggtgtttgcagcagtccaggtgggagatgctggtggtacggagcaggacggggcactgcagagcgagagaggtgggtggattccggtgctgcttggaaggtcggcagggtttgctttatggatcgtgagtgggtgggtgagggaagaggaatcggggatgactcctaggtttttggctgagccgttgggcagatggcagtgccatttacagagatgggaaggcgggggcaggaggaacagattgggagaggtggggaagggggggacattaggttgctttgcaaacatcacccaccaggcctgtggctgggcagcagctctgcgtagccccttctgaaaagtggggaaaacaccctggaagccctgccccattgaataaatatcccctcccagggatggtgattgtagcattttgagttagaggaatatttctgggtggagtttctcagagaggaaatgaccaatcattgcagagcctcgtcaattacacccaagccctgccctttcccacgtgtgctctgccacctctctgctatggttgacgatgaccatagcagaattttctcccaggaacttctgcaaccagaggcagcagaaagcaacggagaaaaaattaactgcatggtctctctgacaacccgatgcttattaatagaatctcagtcctgcctcctcgacatctgcctaattgattttgggtttaggaaccgatttggagccttggcttttcgtagctgaaaccagcaataacatttgtctttattttgtaatgtccaagagtcaggaatggttcacctttgcaccaacaaaagaaaaacaacaacctctgagcaacaggtctccagaatccagtgtaattattctggattgagttacaggcacagcaagagttgccaccagcagcagtgagcacatctatactaggtgaaaaataagagattccctttttatgtgtgtgtgtgtgtatatatatatatatatatatatatttttttttttttatttatttaagttctagggtacatgtgcacaacgtgcagttttgttacatatgtatatgtgtgccatgttggtgtgctgcacccgttaactcgtcatttacattaggtatatctcctaatgctatccctcccctctccccccaccccacaacaggccccagtgtgtgatgttccccttcctgtgtccaagtgttctcattgttcaattcccacctatgagtgagaacgtgcagtgtttggtcttttgtccttgtgataatttgctgagaatgatggtttcgagcttcatccatgtccctacaaaggacatgaactcatccttcttttgcccaagtgtggctcccgatttctgctgtttgtgccccaggcctttctctcccctctgctggagacagagctattctggggcagttggtcaggtctgatggagcccagcctgctgcagcccattagcaggtgttgccttggtcatggcagggagctcacaagctgatcctacagcactgcggacattccagggacatttgagggccaggagagggctgctgaatgagttccagcctgttaggtggacaccagtagccagaggtcagtgcaggacacaggttctttcccgcctgtggctcgacctcatagccctcttcatcccccacctgtccaggtcaagactctgttccaacctgtacctgaccccacagcctctcttccccactgaatgcctgttctctgcaggtctctgggccccagtagagcgttacctttgcagatttatttagctgctcccttcacttggaattgaatcagctaagggttgcaaactccatgcccacagggctaggcacgtgctggcaaggaggaagtcggcatggtaggggtggtggaagaccagaggaggaccttgtcaagtgggccttcgctactcaggtccagcccactgtgggcccatcaaagccaggtctttgcatttttcaagcaaagccagaaagctgaattgatgtgaaatctcgcaattaaagaaaaaggccattcaatttttaaaatcctttccttttgggcagacctaaatcaaacacacatgcagacaagatttagtctagagggactccgttttttaactccgcgtgagacgatacttgttgaaaagctgacatgtggccgggcacagtggctcactcctgtaatcccagcactttgggaggtcaaggcaggtggatcacttaaggccaggagttcaagaacagcctggctaacatggtgaaaccccatctctactaaaaataaaaaaaattagccgggaatgatagtgggagcctgtaatcccagctactcaggaggctgaggcaggagaatcacttgaacccaggaggcagaggttgcaatgaaccgagatggtgccattgcactccagcctgggtgacaagagagaaactctgtctcaaataagtaaataaataaataaaagctggcatgcattaagtgctttctgtatgtcaagcattgaactaaaaaagtgtgtgtgtatgtgtatatatatatatatatatatatatatatatatatatatatatatatttttttttttttttttttttttttttttccctcaaaactcagaacaaccctgagaaggaggcactgttattctcccgctttgcagatggggaaactgaggtgcagggtggctaaatcatttgcacaaggtacctggttaataggaagtggcagaaatcaagatttggaatcaggccttctgactgaaaacctttttcatcctattgagtatggtgacatagcgataggttctagaatctatcctagaatttcatagtcaaaccttatacctaaagttatttatgggctgtgtttttacagacagggaagctgaagctcaaagtcagtgatttacggcagttcacacctcattcttggcctctcaattcagtgctctttggcacccaaagtctacagatgaaaaaggacctggtgattcagtctaggactgaagtgtatatgtgcatctgtttgtgtgtgtgttatacacacacacacatattcatttgtagcagctgaacccttttaacatacaaaacaaaacaggtaagagaggaatcaggagaaggacgcggcctggagaggggtgtgtggtgcccccttcatcctcagcctgccccatgccaggtggactttaatgcccctctcctcaaggaaagaaagcacagcttgggggcccctgggagcagactggccccaggtagagtgtagcaggtgatatgtggccacaacagtggccacagtggataacagtgttatcccaacactgggaggccaaggcaggaggatcacttgagccctggagttcaagaccatctatagatttttcggtcatctatagaaagcccactgtgtgccctcttcccctaaatcccagggcctgcttcacataggggtagcacacagacaggcctgcagacccgtgcaggaatgccaagtgccaaatcctgccctctcccattgttctagaaacctgtggccctcttgctgcatttatttattttttatttattcaggagttcaagaccagcctggtcaacatggtgtaaccctgtctctactaaaaatacacaccaaaaaaaatagctgggcatggtggtacttgcctgtaatcccagctgctcgggaggctgaggcaggagaatcgcttgaacccaggaggtagaggttgcagtgagccgagatcgcgccgctgcactccagcctgaaagacagagggagactccatctcaaaacaatcaataaaattacacaagcaaaactttaaaatatccaagtaatgcaaagcagagatagcccttgactccccacccaccgtgtaccccactcaccccaaaggcacctgcatgtcccctaagaatctgtagcctgcatgtcccctaagaatgtttactcttcatttactcacacggaagcaccaggaagagcagcaaaaggcaagaaggaaggggagggcatgattctaatcagcacagtccagagaaagccttgctgagaaagtgatatttgcagaaacctgaaggcaatgagggactgagtctgggctgaggagtggcaggtgcaaaggtcctgaggcagaagcgtgcttggtgtgttcgaggaacaacaaggaggaggtcaatgtgactggagcagaggaagcttagagagagagcgcacagtaggagttgtagttggggcgagtgagcatccggatcactgaggaccttgtaggacagagggaggactttgatttttactctgagtgaggcgggcagtcactggaagacaaagagcaacgaatatgatgatttcactgactgttttaaaagaagtcctggccaggcaggcatggtggctcatgcctgttatcccaacactttgggaggccaaggaaggaggatcacttgagcccagcagttcaagaccagcccgggcaacgtggtgaagccccacctgtacaaaaaatacaaaaattagctgagtgtggtagtgtacacctgtaattccagctactcaggaggtggaggtgggaggatcacctgaacctggggaggtcgaggctgcagtgagccgtgatcacactactgcactccagcctgggtacagagtgagaccctgtctcaaaagaaaaagcctctggccaccaaacggagaatagaacagcttgggagcctactgcaatagtccaggcagagaaaacagtgattagagtgaatttaagtcaaggtcctgtgtttactgactccgcctttatttttctccctgccccattcttccttctgctgctttccctaggaggccctgccatcacagactctaataatatctataattttaagaaactagccataggaaggcatctcactagttatacatcaaaatcacccaagttgagggccgcagggatttgtctgggaggggtacagggttcccctgctcccagctgaagcaggcctccaacagataggagccacctaagcctcaggaatggcaaaaaaaaaaaaaaaaaaaaaaaaaaaaaatcatgttttgaatcctgaaactccctggcaccttgctaagtccccatagatagtgtttgctctgacttagacctttagaagagcaaattcattcagcatttcctatgacactggcaacgtcgtcatctgtggcaggtcagcaaaatattgattttatcaacgatggacttactggatggtgcatccaaaaatatatatatataactcacaccttaattctctaactcgacgtagttaacttggattgagattaaagggttttttcttaaatcacgttaaatacaaatatcaaacaaatcatagcacagtggtacacaggcccccaaaaagccaccgtgaatggggaggcagttcaggagtgtcatgggagaaactgcattctagcagttgggtggtttgggcccccaagtttaaatcccaacagatgggcctgggggtgaggcctctccagcccatcagagtcacagaggtgtcagagtgacctcaccctcaacccagtatggtgggaaggtttggtcatggaaagaaaccgggtctgtttttgtctgcatgtccccaggtttatgttggacgaaagaagttgaggttggctggcccagctgcattgaaaagcttgaaaactggccttttcatttctgtgtggccgtgtcgttcaggtccttccctcccgtcggagctgtccttctgcattagggctggggctgggcaaggggatgagatcatatgtttttgtgttacagaggtaggtttacacagcctcgtcgctatggcagttttaataaagcaggttactgtccccaaggggaggcttagcacatagcactgcccatgcacagatgctgctgtcattccggggcactgttgtcctttactcgtggattgacacagcgctcctccgccagctgatttgggaagggtgagtgctggccaagagcacctcacagctcgcttcctctggaatgaggaggaaggagatctaagcatttcgagaccctggatctgagcccattaaaaacaagaaatggttctggaggctgttcactgtttgccaaggcagcactgggggctgcggagtgcaggtgatttcatcaggtgacggcctgccctgcgttcccttccaggagaagggtctgaccagttaggtgggtggccagcttttgtcctttctgcagggtctggagaccgagagaggctgagctctcactaccagctgcttcgtcctttctccttcgtgtttgggactagggagcaaaggatcgattccacttggggtgccctggactcgtgcatttaagaaatatttatgagcacccactgcgtgccaggcactgttctaggctgagctgtggagccatcaaaagtcacagggaacagcaaacgggatcagtagataaaaacataaaagtatatcatgtgttagatgatgagtgcagggttgaaaatgtcaggcaaggaagggagtagaaaatattgggggccagggaagactccacggagaagggaacttttgagtaaagacaagaagggggtgagggcaccgctgcggggctccgggggagaggtcttccaggcagaaggaacagcagggcacaggttctgggatgggagcacgcctggtcagtctgtggacagagcaggggaccctgtggctgcagagagtgggcggagagggggatggggttagggaggggaggggattgggtcccaccacactctgtggatggccagaaagatttgggctcctctgagtgagcaggagccccggagagtgtcaggagaggagactctggctacaccgtggggaataagtgactggagtccaatcaggaagcaactggcctgatttcagggagagaggatgatcgcctgacccacgggggaggtggcaagggtacgatcgtgggtgtttacgttgaagagagggcaacaggctttgctgatggattggatgtgggaactgaaagatgggaggaaccgtagccaagatgattgcccaagtacccggaggaaaggggagtggcttcgggaggagcaggagggacggtgacatcagggcttggctgtgggtgtggcacctgaggtctaatcgacagccgaatgacatcaatggatgtcagggttgtaccaagccacacatcaagggatgtcaggtccgggttttaccaagccaatgattgccaaattctaatcattccctcacaattttcatcatatatctgtgtgccacttgtacgattatttactttttaaaaatcggctgcaattgtttgttgttgttgttgttttaagaggatttccaccaccctaaaggaaaagctaaggttacttgccctaagtagaaggaaaccaagccacgcaattaatctaaggcaatgccaccccctgcctggagctcccagtggcctttcacaccaccagcatccctggtgtttggtgatgtgaccctgggccacccccacccctggtgtgcctgatgaagtcaccactagaggacccccttctgggtcaccaagggaccattctgagcttaactgaagccaagagtggaccaagagcatggggacctctatgcacttcctcaggacactgttaccacctcccgtgtgactgtgacattttgtgaacgtgaaactcagcaccccgcctctgctaggcttgagtcttcactgccttcccagctgtgcagccttagccagtcattcagctccccaggttcagttccctcttctgtcaaatgggccattgggagaattaagtgatgaatgtcttcagcccagccataagcattcagccagtgatagtcgccactattaattataatgattattactggcatagaagactgccctcttccccaggaataagttggagtgctctcagttccttagctatatcagaaggttgcaacacccaagccttcaggggtcgggcaggtaatgagagtgggtgcaggtggtgtaagactgtagggagcacgggggagtgtggcaaactggagagcacatatcctgtgtgatgctatttaatgtcacatttttaaaacccactctacaagacaccaacacacaggtctgtggacaccaactggtttggattcctgagatatgaaaacccgagtgtaagatagtattttatatgttaatttagctggtctctgttgagcacattatgtgccaggcactgtgctaggcagtgaacaaagtaggctgagtctctgcccttgtggtgaaggcagcaacatacaaataagtgaaatcaaaatgacttatgtttgaggacagtaactgctgtggagagacacggagcggggaagcagagtggagagtgctatgggttgcgggaggtggtttcaatacaggccagggaaggcctctccaagaaggtggtgtctgatcaataacttgaaggagacagaggtagccctgtgattggaggagtgagagcatcccaggctgggggtacggctgaggcaggggccaggaggtgggagggcggccaatgtgcaatactgggacctcaggggcacgaccttggtgccttgattggtggtaaaaatttaaagtagaagcagctgattgctgagcagagggccttccccagatcccaggaggctgcagtgggtctgatgcttgttttcaggtttctagggggttgctaggtgattgggatcacagccttcacatgcctggtagaccctgttttggtttcccactgctgtcctaacagatcacaaactgggtggcttaaaacaacagaaatttactctctcaacagttctggaggccggaagtccaaaatcaaggtgttagcatggctgtgcttcctcagaaggctctaggggagagcccttccttgcctcttccagccctggggaccctaggagttccttgttccttggcttgtatgtgcatccctccagtctctgcttccctttgaatgtggccttcccctctgtgcctgtgcgtcttctccactttgtgtcctatgtggacacttgtcactggatttagggcccacctggggaatccagaacaaatctcatttcagtagcctcaatttaattacatctgcaaagacaccctgtattggtctgtcttcatgctgctgataaagatatacccgagactgggtaatttagaaagaaaaagaggtttaatggacttagttccatgtggctggggaggcctcaggatcatggcagaaggtgaaaggcacatcttacatggcggtaggcaagagagaatgagaaccaagcaagagggaaaacctttataaaaccatcaaatctcgtgagacttattcactaccaagagaacagtatgggggaaacaacccccatgattcaactgtctcccatcagatccctctcacaacacgtgggaaatatgggagccacaattcaagatgagatttgggtggggacacagccaaaccatatcaccctctttccaaatatggtcacattcacagcttccagaaattaggacatggtcttatctttaggggacgggggcaccgttcaacccactgcacaccttaagaactgcaaggaaaaggggaaaaaccaaggatggccatagaagaaggagagagggtttccatggaatatttccatcaaatcactaagggtctgggtaccaaccacagcatacaattgagcatgcactcgtcacacctatgttgagtacccactgtgtgtcacacacggcagcagtgctgaggattcagcgctgagcggagcacacagcctttgccctcctgggaccttggcctgcacgcagtagggctcccacacacgttcatttgcttccttccttccttcttgcctttcttcctaagtgtcttgctctgcttacagcttggttgagaaacaagagcaggcatggccaggcaaggtggttcatgactgtaatgacagcactttgggaggcagaggcaggcggatcacttgaggtcagaaattccagaccagcctggccaacatggcgaaacgtcatctctactaaaaatacagaaactagctgcgtataggggctacttgggaggctgaggcaggggaatcgcttgaacccgggaagcagagattgcagtgagtcaagatcacaccactgcactccagcctgggcaacagagcaagactctgtctcaaaaaaaaaaaaaaaaaaaaaaaaacaaagaaaagaaagaaacaagagcaggcatgaccgaaacctcgaagcctggggtatgatcagtactcaggacacatgctgcaagactgctcagagctctcaagcccagggtggtgccagaggctccctacgagagggtactaggccgatgggttggatttggggtgaggggtggtgggttccaggctcgaagaaaagtgtggacaagaggccagcagggtttgtggctgatggcagagcacctcagccagggaatactcagggagaaggtttgccaccaggttggcatgaccagatttcagtaagagcaaacaattattgggaaagttccaaagaaaagaaagtataatcttccctcaatttacatggtggttggtttccaaaagaaaaaacaaaacaatgtatattaataccctgcaaaaacaatgttgtgtttaaaatttgtaaaacagtttgattccagtctcaggtcatttataaacaggtttttacctgccttgcaggtagagatgcaattacagtaccggacagtgacagtacagtcacttacagtcactcacctccagcaccattgcaaaatcctccagactccagacctggacctcaggagtgtccaggtggactcgggacccagggtccttcctgattatgcaggacagtcccaccgtgcagcagtggcccctgccccgtctgccccgtaggtctgcagaatgtgcccactccagacctagggatgccacgtgctgagagccccctggtgccggtgccgcccgggtctcctgccctgcgccttacttccacccttgacttgcaggttccatgcaggtgatgaacaagacccggcgcatcatggagcagggcggggcgcacttcatcaacgccttcgtgaccacacccatgtgctgcccctcacgctcctccatcctcactggcaagtacgtccacaaccacaacacctacaccaacaatgagaactgctcctcgccctcctggcaggcacagcacgagagccgcacctttgccgtgtacctcaatagcactggctaccggacaggtgagcagggacgggggcaggtgcaggaagggagtgacagccagggcgggcgtccctaggtgtggtctgcacaccactgcggtacccaagttgattctggatagcccctagagcaactctcttataatttcagagttgtgcatttatttctgtgtgtattaaagaaatacagatttatttgcctacagtagtgatgtaaagtgaccttgtcaaaggaatttgagtcccccaaaaaagtgagtcttttcaaactatgaatcatagtgtggagaggccataaggtgcccatgcatgagtttgcatcctctgttaatagttattaagcccatcagggactgtttcgttgacttcaaaccattagcttggaagaaggttccaaaacataggggtgggggatgggaattcatggaggggaacagataatggggctgtgtggtcgctttctacgtggcagtaaccaaggtggtgcagaaactgacatggtggttgactgtccacactcacccgtgtcatcctgggtggagggcgacccagttcctgtttgcttatccttcaggaggtctttggtgggctctgaaggctcacctgccaggctggttgtctgaggtagagatgcaattacagtatagtcacttacctgtagcgccattgcaaaaccctccagactcaattcatttaacttgctttaattaaaaataaataaatactccccgccttgggtaagaagccgcggcggttgtgaaatcaagatattgtggctcagatgttgcaaccccaggaagttgcatccaagtgacaaggggtttgtttgggtgggagtgccgcaagggaaggatggactcctcctccagccctgtccgcagtgctggacctgcagccctcgaggctgggcagcttcctctcagatacacagtgtgggctggcagggatgctttggtgtggggagcaagccagtaaggtgtgtcttcttacagcctcatcccatagccagaatcacctagaaagtatgttctgctgagaactaggaaggcctcgttcctataccttgttcctgtgtattgtgcgtgccattatgcagaatcaaccacctgttggttcccctgagcctctgcagaaagccacatgtgtcagaagttaccatggccaccaccctagatgattggcgggggcctggatgttgctagcagaagcaggacaggcaggcccgcagcacagcagtgggcccttattgaagatgcacctgcaacttggctctagaaagtacagccatgcactcaagagtgaccagccttgaaatgttttaaagtctgaatatttcactgaaaatcttattttaaaatatgccggcacagcttattttttctttaatgtatactgggggccaaagaaaatatgtctgaggagtgagtgtgtggctcacagactctcttttcacaacctctgggtgaaaggtctgtacagaaacctttcgttttggatgctggaagatcagtaaagaccctagacctgttctcatcaatccccctcatttcacagccagggccactgcagcccaaaaaagagacctgcccagagtcaaagtgaggtgtttgtggcataatcaaaatggaatgcaagatcatgggaattcagagggggcatggaaatagtattcatcagactgaaaggaaactcatatattctgtgccattttgagggctcagggtgggagctaaaggctagtgtttcaaaatcttacaggcgacatgagaaaatcaatcatttcaagaataaacattctctaaagtggatttcccaaacttgtccttgaatgtatgcaaatcaccaaaaagctgtctccctaaataagtgcttttattcaactatgattcattattataccctcatgaagactgggagcgtaatgtcaagtgtaaagagccagataccgagaacatttacgtttttgtaaaactgccactgagaattttattcattatatttagaatgccactctgtacaaagaatcccattccagccttactttcagaactcaggaccctgaaaacacctgtttagtctgatgaactggtgtactccttgttattacataataagagccacataccctgtatagtttccctctttgccctggcagctaggaagctcaggtttgagttttatattgagttgttgtttaaagtggaaatgtttttaaagatccaactgcgtgatatgttatactgatcagtgttgactaagaaaaatgacaaaaatctataatgaattcaaaaccttttagattattttttccttttagattgatttgtacatacatattagaatatactgtaaatttttaatcccccaaggaccaaaagtaaattgttcctgctgagtcttcagccatgttaaaccctgtgttcacgtggccacctagcaaagttggttcagttggatttaagtttggctgtgtgtgtgagagagaccggggatgtcaaataaaattccaagttgttctggtggccctgctctatgaagtggtcagagactccgactccatttctccttatttcccattggtgagaaacaagtcatatggccatgcatggcagcaaaggggcctgggaaatgtagtcttattctaggtggacatttgcccagatgaaagttattttactgtgggagaagaagaaaacggatactgaaggacaagtgaagtctaggccaccctaacagttattagccatttgtgtttgtgatactcgtttgaatagaggagatcagcccaaactgaggaagactgaccccagaaaaatgctacttaagtggaccaacatttcataataaatagtgcttttaatgtatttagtaaggtatttgatcttgaaatgaaactacaatgtttcgagaataactctgttatgttacatctctttttttctttttctgagacagagtcttgctctgtcacccagactggagtgcagtggcacagtctcagctcactacaacctctgcctcctgggttcaagcgattctcctgtctcagcctcctgaatagctgagattacagacgcctgccactacgcctgactaatttttgtattttttgtagagatggggttttgccatgttggccaagctggtctcaaactcctggcctcaagtgatccacctgccttggccttccaaagtgctgggattacatgcatgagccaacgcacccggccctctgttaggttgcatctaatgatatttaacaaatattgggctctagttgcaactaatgagttgattcttcaagcaagtgaattgacgaagtgtagggaggaatataatgtgtttcacaaattgaaatggatggcacaagatgatatcctttacttcactagggacatttttgcaaaagtatttgaggatttgatcaattttttcaagggcctctcctaattctctgacatctgaatcttcccctgtgaagtgcatctcatacttcatcatccttctcaatagtctcttctccttcatgtagtatctttatagaccaggtaattattcgtcagtggatttgcatgtgttttttgagctatcttccagcgtcattttaattaattttacaaaccctgcatcttttaaaatatttgcaatttcattttgcagtgatcttgctttgcatggccccatgtttgcagtggagattgacaaaagacaaaatgagagaagctaagtttaagcaggataaatatcaatttgttcatgaatatttctctgtatggcttcttacaacttgagggacttggatctcagatatgaatacccttggaaggatcaattgcatcctcaggttttttgttttctttgtttttttgtttgtttttgagacagggtctcactctgttgcccacgctggagtgcagtggcgtaatctcagctcactgcaacctccacctcccgggttcaagcgattctcctgcctcagcctccccactaactaggattacaggtgcgtgccaccacgcccagctaattttttgtatttttaatagagacggggtttcaccatgttggccaggctgacctcgaactcctgacctcaagcgatccaccctcctcggcctcccaaagggctaggattacaggtgtgagccactgcacctcgccacatcctcagtttttacaaaggttttatagtcatcctttaacacagttcagcagttgaagtgctgttgccctgcctgtgatcacttatatatccacaagtcaaagttgtacagtgttcccagaatgagacacctcccagctctctgcagagtggttgagggcattagctttgcctgggtttgaatccagtctctgctgctttctgcctgcatgaacttggacaagttatttagcttctgtgtcttggcctcctcaaccacagttaataatgtcacttaactcatagagttttgtgaagattaaatacattagaacagtgtctggtacatggtcgtggtaggcacttgggaaatttagcaatgatggctgggtgcagtggctcacacctgtaattccaacattttggggggccaaagtggaaggatcacctgaggccaggggttcgagaccagcttgggcaaaatagtgagatcccttctcaatttttaaaaaacagtaataaaaaaaagttagcaatgacgatgacgatttgcacaatagcacaacatcacacagcccacctcaggccagtgttctgatgaatgtcatggtaagttgcactcatggatcaaaatgtggcagcatgtgctcagcctctggtaatcagcaaaatgcaaacgcagccaacagtgcattatcacatcccagccatgaccacagcaaatatgaagaggtcccatcgcaccaaatgttggtgagaatgtaggaaaacaggaaatcatatgcgccagcagcatgatggtaaattgttccctccactttgaagaacagtttgccaatttctggcaaagctgaaaatggacatctccttctactcagcaattttactctggctgtgtccccctcggttctgaggaggtgatgttgatgtgtgagttctgcttgagcaagggaacacacttcctggctgccctgtttgctcttgaagatgtgtgatgctcatggcaatagattccctttagatccaacggacaggaaccccgactgcagctggcttcaaaaacattgaattttttgctccctaaacaggccaggcacggtgactgaagcctgtgatcccagcactttgggaggcagggatgggcggatcacctgaggtcaggagttcaagaccagcctgaccaacatggtgaaaccccgtctctactaaaaatacaaaaattagccaggcatggtgatgtacacctgtaatcccagctacaggggaggctgagacaggagaattgcttgaacctgggaggcggaggttgcagtgagccgagatcgcaccactgcactctagcctgggtgacagagtaagactctgtctcaaaaaaaaaaaaaaaaaaaaaaagagaagatacaggtgagtagcaggcagagtcggatcttgtggtttacgagtatcatgatcatatcacgaggctggaggtctggacatggtggctggcactccagcagctgtgtgcctccttgtccacatctggcaggagcaagagagcatccttttccagaatgctcaaggcatgagatcccttctgattggaccaccctgagtcacatgccagcccctgagccaatcatcatataaagcacatggtttgtgccaacttgcccagcgtggatcacctgctctgcagcagctggctgagtccctttttccccagcacttggactgccaggtagaaatcaagggctgctggaaagaataaggaaaagcatactggagtgccgatcacaattttactacactgcctttggcaaacaaaaaacaaaaaaaaagtaacatcagctggccgggcacagtggctcacgcctgtaatcccagcactctgggaagccgaggagggtggatcacaaggtcaggagtttgagactagcctggccaacatagtgaaacccgtctctactaaaaatacaaaaattagctgagtgtggtggtgggcgcctgtaatcccagctactagggaggctgaggtatgagaatcacttgaacccaggaggcggaggttgcagtgagccgagattgcaccactgcactccagcctggtgacagaatgagactccatctcaaaaaaaaagtaacaacaacaaaaaggcaaccttttccagctctttctggtgaactagattggagtgccattttctccccattgggataatgcctttctccttccacacctgaatctggcagttctgaagttgtttcccagccccagcttctgccatccggtccagactttcgcagagatggtggcgggccctctgcccttctgcatcatgttctaaaatgcgtcaggggagcagggggtacatgctccttacaagaccaggccttgccagggctctcagttggagcctgttttggggtttggccctgagcgccccagttattttcactcttctcgcacaaagctgggtagagaggtcagctgaggaccagaacctggccatcagccttgggcagctaccctcaccagggtctggggggcctctgtgtcctgatgaccccaccccatctacactacactacacttggggcaccccatcgccctctcacacaggaggatggaaaggcgcccgctaggcattttggcatccccaacaaatgagacttgttttttccctaaagcggtttcattcaggaccgcaggggcaggagggctgctgcgtgggccgtcctcctctgcaatgctataaagtggcccaatgcccctctttccctgccactctctggatctacccttagccccttgccctgaaccccatccaccctggcccctctgcctcctggccatcgccccagagctctccccagcacatcaagcatgagtccagcatcacttcctggtcccccgcctccccggcgcctctcacaggcttctcctcggcacctccagttttccagttgctcaggccaaaaccttagcaccattcttgattttttttttcctattcctttcacactccacattcagttcatcagcaaaccctgtcagctctgccttcaaaatatgcccagagtcccctctgctgccaccagcccatccgcgccactgtcttccccgcctgccctgttccaggtttctcctgggatcccccagcttctgcgtttatgaccccttggtctgttttcaatgcagcagccagaggggtctggtcagaacctagttcagatgctctttctcctctgggcagagccctccttggctcccacctactcagggtagaggccccgacagccacctcagggtcccagtgatccttcccttctctctgaaccctctcagcctcctggtctcccctcagtcactgtcctccagccacagcttctcaagcagtcagccacacctgacatgcacccactcacagtgctttgcacttctttccttttctcaaaacttctacacgtctgcactttcctcgtgtctgtgttccaatgctgcctcctcaaagaagccttccttgactaccccatgcctcctgttcatcccagttttttcccaccagtgcccccatcaccactgaacaccactgactgtgtattctgcccatttgtctcattgattgtctcgtttctaaaatgccagctctcaggctgggcgtggtggctcacgccagtaattctaacactttgggaggctgaggcgggtggatcacttgaggtcaggagtttgagactagcctagccaacatggtgaaaccccatctctactaaaaatacaaaaattagctggatgtggtggcgcaagcctgtaatctcagctactcgggaggctgaggcaggagaaccactggaaccagggaggtggaggttgcagtgagccgagatcacaccactacactctgtcgcttgggtgacagaatgagactctatctcaaaaataaataaataaaatgccagctccctggaagcagcggcctctgttctgtgccctcgcgggttgccaggcctagagagtgcccaccccatcgtaggtgctcaggagaccttcccaggatgactggtgactaagtctccacattctgtccccgccagcagcccacccccatctcttccacactcctttctcctctcccgtttctctcctctccacccccactcccaccatctcagcctttcctcctctttcttctcagcctctctgcacacacagggaagagaagactgaaattattcccgggatgccgtccctgggcccctggtgcagctgtccctgccttcacaatggcagccttctctttgcttggctcttctcctgggtttgctccctgctctcttcctctctccttgagtgcacacaagtgtgcacgcacgcacgcacacacacagctcccttcttccctcggtccagctgcctctcatctgcccatcttccctccccctctccggcctgtggggggacagcagagcctctccattcaccccgtggagtgtatccactgctcacagcaggtagccttcctgtctctctgcagcgaacacccagccttccccactgtggggatccgagtatccacgggaattgcacagcccctcctgggacccaggctgacccagcgtgtcctcgagaggcacggatttgccgcctccgtgcacatcttcaagcgaaatttcttcctctaatttgatagtcacttcctttctctaagacctcagatttcaaaataagtgaagcacttgttttgagcaagagtctaaagaattagactccgccttaagcgcccttgtgaccttgagctgagacctcatcccctctgggcgtcagtctctccatctgtgcagcagtgttgtgacatctaagcactagtcacccagtgcctgtgataagacgccaccctgagtgatacgtgacctgtgcccacaaacccaggaggagaggttccctgcgccgtaagaggaagtggccacggggaaagaggaagctgatgtgaggccgatggggcagggtttccgattgtttccaggcgacaccctctctgtcccacccccttagcaggtgtatccacttccctagtggaccacagactgggtggcttagaacaaaaggcgattttcacagttccgggagccagaaccccaaaatcaagcatcatcagggccacgctttccctgcaggcttcaggggagggtcctttgcccttgagttcctgggggttgctgggaatcttggcaccccttggcttgtggccacatcactccagcctctgccttcatcttcatgcggcctcctccctgtgggtccctctcttcccgtggcctgctcctctctgaatcagtgtccaaatttccctcttctgtcaggacaccagtgattggactagagcccgctctgatccagcgtaacttcatcttacaacaccatgttacaaacacggtcaccctcacaggtacctgggcaaggacttgagcatatattttggggaacacattcatctcgtgacggctggtttctttcacacattaaaccccgcccccccccataaaggctgcagagccgatgtcaaactgagcaaacctgccgctcttcccctcttcactgccccagctgtggtcctgggtggggagcagtgtggccgccctgaagatcagctccatgcgtagccttcccttcccaaccatggtttctctcaaggaatctccacctgcagtgggcgttgaaacagctgcagggtcaaaagtgagggaagggtgactgtggtgacagacaggcacaccctgtctcctgggcctcaagaggcttccgggggtttcagagtgcatgagaccttttgtagtcctctcctaggtgctagctgtgactccctgaacattctggaatgagttaggctggagccaaatggcccagtaccgttgccactagccacagggagctatttaactttacgttaattacaattagcatttcagtttctcaggtgcactagccatggttcaggtattcagtaggcgcacatgggttctgtactggataatgcacatagagaatgtttccattggcacagaaaggactcttggacagcaggagaatagagcctatggctgggcctgtaatcccggcacttggaaaggtcgaggcaggaggatctcttgaggccaggagtttgagaccagcctgggcaacatagtaagacctgtatctttacaaaaaatttgaaaaaaaaaaaattagctggacatggtagtccatgcttgtagtcccagctacttgggaggctgaggcaggaggatcacttgagcctaggagtttgaggctgcagtaagccatgatcacaccactgtacttcggcctgggcaacagagtgagaccttgtctctaaaaaagaaagaagaataaagcctaatcaaacaaaatcttttgggagtggggagtgacacacagcactgagaaggggcaataaaaacgcagggggtggtggctgtcgaactttaggtgagtgctttccgtgattcctcatctgtaatccaatctcctcctcctcatccctgcactcacttccccttatgctcccagtaccttgatctgtcttcccaaaccttcctgggtctcgggtcagggtctcaggacaggttcctgttctccgagcagcagacaccatccatcccggggccagcaggttgtgccagcccacacagcgagtcctttgggaatccatccgtgtcgcaggggatttgagcaaatgaagggaaaccgagttcctacaccgaggccgggagcggggcttcctctgtcatccctgtgtgaacccgttctagcctgggggctccaaatgcatagagggctggcaggtagcccaaagcagagaggcaggctgggtggggagggggtgcccagatttcaactgtggactgttcactctactttttaagaatgagcaactgaaaacaccgggcaggcccacagcaaacacacctgagggatggattggtctgcaggccaccggcttgcaaacttctttctaagctggtggttctcaagggagcacaccgccccctaggggttaaactctgtgactgcattgccggtgatggtgaaggatttgactttgctggcttcctgggggcggagactaagaaggactttgatgtcctgctctgcacagcagagtccacgtggcccccacattgcattgtattccacatagcttctgagtttcctaccacatcactcatatgggtagattattttatgtttattgtcatctgagtcttgaacctacgtctattttatatgtaaatactggagggtttttgcatattcccaggaatgtacggaataagaaaatggaggcaatattatacttgagtgcaaaactttcccaagagtcattccttatttctgaaagtcccatccccgatgacagtgctacgccaaaggatttgaatggcaaatgtcgcccgcccacccagctgcccttgtaattgtcacattcccagtgaatctgtgtctaggtgcaggcgtctgcctgactactgtgttgtgccttcttgatggatgtgctgggggaatttcatattgaaatttatcttcattataaattgctttccttttattttccctgtagattgcagttagagcattatattgattttgtggaaatgacatgcataggtagcttttgttacctataaatttcctttcaagaaaacaagggcgctctacaaaatatttgtcatagaaatgggaggtcagtctgatggcgctgagaacagctctttgaaaggtgcaagtagtgtcagattcctccaaggcgataattaaatatccattgagtgacaggccttgttctgagggtctgttgtggattttctccccctcctctagtccatccctctgaacaaaaccacactttaaaaggcacaagacagatatttaagacacagcttgtcctcgtggtgactcagcaggcaataaaacctgtcactagagatggagccctccatacccagctaattgagtttccagggaatgaatgggcctcatcctcatttgcaggagctgcaagacccttctagggagcggatggctggagccagcatttaattaggcacaggcagcccgccctccatgccaccaacacccagagctccgcctggccctgctacaaccagtcagcagggccttggtgtcccccgcagcccagtcttcctcaatagccacagcctcactaaaaacaggcaggcggaagacaggaatgcatggagtggcaagacagaagcagctctcgcctctcgccctggcgatctgcttgtccctgtttgtccccagcaactggccattccttctccccacccacagccggaggacacttttaaaaattgtaaacctgaccacatcacttccggctgaaaacctcctacggctgcccactgctttttggataaactggcatctcctcgccagggctgccaagaccttgtttggcctgggtgtgctcacctctctgtccacatctcctatctgtcccttccttggtgacagcactcaggctgcctagcctctttgttcctcagaacttccaaggtccattcctgccccaggccctttgtatgtgcagttacctctgtctggagcactggcccacaaccattctggtacaagcaaccggtttcgtggaagacagtttttccacggactgggggtgagggatgttttgggatgattcaagcgcatttcatttagtgtgcactttatttctaatattatcacattataatatgtaatgaaataattatacatctcactataatgtagaatcagtgggagcccgagcttgttttcctgcaaccagatggtctcacccgggggcaatgggagacagtgacagatcatcaggcattagattgtcataaggagtgcacaacctagatcccccgcatgcacagttcacaacggggttcacgctcctatgataatctgctgctgatctgataggaggcagagctcaggcagtgatgcaagtgatgggaagcggctgtaaatacagatgaagtttgctcactcgcctgccactcacctcctgctatgcagcccagttcctaacaggccacagaccgctacctgtctacctgtctgcagcccaggggttggggatccctggtctagagcgttgttcacacactgcggagaacttcctccatccattctctcttccttcctgcccttcctgtgtcggttagtactcctcaaccctctcattctcgaccatgacacccggctttatgttcttcttaggacttctcgcccccttgaaattatcttgcatgtttgtgaacttttttttttttcttttttttgagatggactgtcactctgccacccaggctggagtacagtggcatgatcttgactcactgcaacctccaactcccaggttcaagcaattcccctgcctctgcttcccaagtagctggaactacaggcacccaccactacactcagctaattttcgttttttgttttggtttttttttgagacggagtcttgctctgtcgcccagcctggagtgctgtgccacgatcttggttcactgcagcctccacctcccaggttcaagcgattctcctgcctcagcctcccaagtagctggcattacagttgcatgccaccacaaccggctaattttttacatttttggtagagatggggtttcaccatgttggccaggctggtcttgaactcctgacctcaagtgatccacctgcctcagcctcccaaagtgctgggattacaggcatgagccaccgcacccagccaatttttgtactttagtagagacagggtttcaccatattggccaggctggtctcgaactcctgacctcaagtgatctgcctgcctcggcctcccaaagtgctgggattacaggcgtgagccactgcacctggcgagtgaacttgttttttacatgttttgtttgctgcccatccaaaaatagcaccaggcaggtattgggtactcagtaaagatttgaacaaggccaggcacggtggctcacacgtgtaatcccagcacttcgggaggctgtggtgggaggatcacttgagcccaggagttcaaaaccagcctgggcaacatagagagaccctgtctctacaaataattttaaaaactggccaggcatagtggcacacacctgtggtcccagctctttgagaggctaagatgggaggatcacttaagcccaggcctttaaggccgcagggagccatgatcgtgccactgcattacaacctgggcaagtgaaacctcaactcaaacgaataaaaaaaatgaacagatggagaactcttgggccttaggcttgaagtcagcaaaaaaataaaaacaaaatggaatttagattactatctcatttatccagcatgaagaaacataatcgaaattagttcaggcaaactttgccaggtcccagtgctcaaacgctgtcagaaccctgtctttctgcttcttgcgttttctgtcattgggttggctttattaggaaggttccctctttgtgatggcaagatggcccccacaggtccatctccccagtgtggtgaccccagctgaaagagaggcctctttccaagggctccagcaaaagttccagggaaagctctcattggctcatctagggtcttatgtctctttcacccaatcacagcagccaggcaaaaggagataccctgattgtccaggccaacctcatgggcctggtccaggattcagagctagaaagagcctcatcagaacatgtaaggctgagaaaggggaaagattggttccctccctctttggtgactgaaggcacaattatgaaaagacaggagaatggattctgggcagaaaaataaaacagatatccactatagaaacccacatgcaggccgggcgcagtagctcacgcctgtaatcccagcactttgggaggctgaggcgggtggatcagttgaggtcaggagttcgagaccagcctgaccaacgtggtgaaaccccgtctctactaaaaaaatacaaaattagccaggcgtggtagcgcatgcctgtagtcccaggtactggggaggttgaggtaggagaatctcttgaacccgggaggcagaggttgcagtgagccaagataatgccactgcactgcagtctgggtaacgagtgaaattctgtctcataaaaaaaaaaaaaaatagcttcttcttaaagggcaagtgggaggagagcatttctcccagcccccagctcgctctgcttccaacataagatgcctctttcgtgcggaatcatgaccccaccttcctcatttgttttcacacagctttcagttcagcaagatcccatctctggcatccagaacttttatagcattgatttatcacttcgtgcagtgatttgcatttggtattttttttttcaaaagcagaagaactcgactcaggctgtaaccttgcaaagcagcacaaagttaaaaggatccagttacagaatatcagaaataccccagccctgagagctgtggagctctgggtttatttaatgcatttcttgccagccctgcctcctcagccaatttgtctgccaaaaaaacaaagacttcagtcctgtggcatttcacatctaatatttatgctgttctagagtttgcaaaagggcttccttttcatttatcactgttcctcaggaacctccagctcccctgctaggttaatgggattgttctctgctgcccagaccgggagccccaggaagccaaatgacagatcatgaaagtggcccagtggaggactcttctactggtgtcaggggtaggatcaaaactcagcctgaaccagctcagtttctattttgtgaccctgggggccaaatatggatcttgcaaaatggcagctggcagcctgagtctacacttcaaccccaaatttctgtcagagttacaagatgctttttaaaatctggaaatttaaccaaaaatacccagattacaaacttctctttaaaaaaaaaaaaaaaaagattatgataggcctgtaatcccagcactttgggaggccaaggtgggtggatcacttgaggccaggagttcaagaccagcctggccaacatggtgaaaccctgtctctactaaaaatacaaaagaattagccgggcgtggtggtgtgcacctgtactcccaactactcaggaggctaaggtgggagaatcacttgaaccaggaggcagtggttgcagtgagccaagatcatgtcactgcactccagcctgggtggcaaagtgagaccctgtctcaaaaaaaataaaataaaataaaggccaggtgcagtggctcaagcctgtaattccagcactttcagaggccaaagcaggtgaatcatgaggtcaggagatcgagaccatcctggctaacaccgtgaaaccccgtctctaataaaaaatacaagaacaaaattagccggtcgtggtggcaggtgcctgcagtccgagctactcgggaggctgaggtgggagaatggcgtgaacctgggaggtggagcttgcagtgagtgcagtggcactccatcctgggcaacagagcaagactctgtctcaaaaaataaaacaaaaatttgaaaaagataataatgataatgatggtattgccattactggtaacattcctgcatggtggagattagtaaactgtggcctacaggagtctgctgccaggttttacaaagttttctggaacacagccacacccattagtgtatgtactgtctgtagctgctttggctctacggtggcagaattgaatcattgcaatagagaccttatggctgcatagctgaaaacacatagtctggccctttgcagaaatagtttgctgagccctcctaagtggcgccagcccactggatttgtgccacagatacccccaggatttattagaatataggtggagttgagggtacttcagtccctaattaacagcggattagagatgataggtgcttatttctctcccatttgacagtttgggcataaacagcctagagatgatgtggcaggcatggtgttggctcccaggctcctgatgggtgatggtcagatggcgttccatcatcctgggcgatcgtccttatctaaagcagcatcccatcctgtctgcatccaaccagcaggacacagaaactataagggaagctcacttcccttcctggaggggagtttccagaagtcacacaccacctggtgtacccctccagttcatagaaaatacagagaattacaaaggaagccagttatatgaaaacatatttatcaaaatattttataaactgtgatatgtatgcttctttacacataaaatggcacgatgaagcagttatttaatggacaatggataggtctgataacttccatgatttcgaagtagcgctggctcaaatgatattttaagaagtccatgttgactacaatgtgatatgaaaatatccgtaattcccattggtgacaaagtcccagggaccatcattcataattgaaggggatgctagttataggttaatgaaaataaacaaatacatacttttgccattcaatttcaggaaattatatcttgggacaacagattaagaacctcttcctcaggtgatctgattcgattccatggcattaagtgccatctaaatgcttacagctcctcagtttgtaattccgtagcttttctgtgaacctggtctgtttccacctgaatgtctaacctgagtctcgaggttaatgtgtctgatttctttatcaacccccatccccaactctgcccctcccagtgtccctttcctaaataagggcaaatctgtcctcctcattgcttggaccaaaaaccttgagttatccttgactctctttacttctttcgcatgccacatcagcaaatcccattggttccacctttaaaaatagcctggaaccaaccacccaagcccttcgcctgccacgattgtggtcatcacagtctgtctcctgaatgactgtgagagtctccaaacattccagttccctgcctcggactggccttaattctaggacagaagctccaggaagatgcaggttttttgctgctttaattttttctgttttgttcactggtatccccagtgcctagagccatcccagccacacaggagtcctcctttaatgtttactgattgaatgaatgaatatataacatcatgatcaataatattatgataaaaacagtaaccatttagaggcagttaacatattttctcattgaatctttcccagcaactttgtcatgtagggatattattattattcctattttgcagttgagaaaactgagctggaaggcagaggtagctgaacttaaatgcaagctgttggctccagagcccatgcccagccctcagacctgcctgcctcggaggataaaaatcatttctgaggccaggccaggtggctcacgcctgtaatcctagcactttgggaggccgaggcaggtggatcacgaggtcaggagatcaagaccatcctaaccaacaaggtgaaatcccatctctactaaaaatacaaaaaattagctgggcatggtggtggcgcatgcctgtaatcccagctactcgggaggctgaggcaggagaatcgcttgaacctggcaggcggaggtttgcagtgagccgagatcgcagcactgaactccagcctgggtgacagagcgagactccatctcaaaaaaaaaaaaaaaaaattatctctgaaaccctacacttctggaaagactgatctggataacgactatggctcctacctgtgtcccccacctatgcttcaagaaaggcaaagtgcccgggtcctgggaatgaccttccttcaaaagcccacggccggatgaattctgggaggatgcagcatgggaagataacctcagtgtggaaattccctttgcctggaattctggcagaaagcacttcggagatagtctgagccacatcggagaggaggagctctcggaggctgagtcccatttgtgtgtgtccccacctttagccatggggcagtccctctgctgttccctcttccctgcctctctgcgtccccgtggatgggaagagctccagtctgtggtcgctggagtcctgctgagaggctgaacagggtagtcaccaaaaggcaggtggagacagacaacctgggattgagcctcatttcagctctgacacttggcagttgtgggatgttcggtgaaaaggggactttgcctctctgtgcctcagtttctccatctgtaaaatagggaccaaaaaaaggatctacctcactgggatgttgtaggtcatcgtctaaaccagtggctctcaaagcgtggtcccaggatctctagactcaaaactattttcatgataataccaggacactgtttacctttttaccgtcattttccttctggtagacagtggagttttctagcaggtacatagcatatctagttatctaaaaaggattaaaatactcttcccttttccatctgcatacccattttattttattttttagaaatagggtctcgcttgtcacccaggctgaagtgcagtggcacaatcacagctcattgcagcctcgaactcctgggtccaagtgatcctgccacctcagcctctcgagtagctgggaatacaggcacacaccaccacgactggctatatttatatatatttattttttagtttttgtagagatgaggtctcactttgtcacgcaggctggtctcaaactttttgcttcaagcaatcctcctgccttggcctcccgaagtgctgggattacagacgtgagccactgtccctggcctgcatgtctgtgtgaggctggatttttcatgttaaacaaccaaaacaatatatctcagcagattgaatgccaaaacagatttaagaatcctgctgccttccagtaaacaagacattgaagagattggcaaaaatgtaaaacaatgcaactcttctcattaattgtattttgtttgggaaaaatatagttatttatctttttttctccccaagacagagtcttgctctgtcactcaggctggagtgcagtggtgcaatctcagcttactgcaacctccacctcctgggttcaagcagttctcctgcctcagcctcccaagtagctgggattacaggcgcccgccaccacacccggctaatttttgtatttttagtagagacagggtttcaccacattggccaggctggtcctgaactcctgaccacataagtcatcacgcccagcctctatttatcattttttaaatgtatgctaacaagtagtgagtttattatttaaatgagtgaacaaatatgttttaaatttctcagttttcatctctaatataataactatcactagatataaccaacatacacaggactctgggttccttaataaattttgaccatattgaaaagcactgctgttgccttacactgaccttgagtgcttttttggttttataaagcacatccacaaatggaagtcatgtcccgtgtgggccaaatagatccaagttcagccagccaaacaccatacaagcaaataggaagacaagaatttaacaattctacccactcctccactcacagagggtgtgcaccggatgataaaaaaacaaatctacgttctcagccaggcgcagtggctcacgcctgtaatcccagcactttgggaggccaaggcgggtggatcacttgaggtcagctcaagaccagcctggccaacatggtgaaaccctgtctctactaacaatacaaaaattagccaggcatggtggcgaacacctgtaatcccagccagtcgggaggctgaggcaagagaatcactggaacccgggaggcagaggttgcagtgagccgagatcgtgccattgcgccccagcctgggtgacagtgtgggactccatctcaaaaaaaaaaaaaaaaatcgacattccctcactcagctgtgtctcccacaggcctcccattacgaggtgttcgttggttcagttgtttacccatttattccacaaacgttcatcgaggtctcgtcactgaccaagctctgttctagatgtgaggacacaggggacaagggactcagaaagccgctgccctcatggggctggtactctggtgggagaagcacgtgataaaaactagaagacagataaatatgaccagtgaataaatatgtggagaagcaatgtcgggggaaaggggagagcctgggcggtgtggggagatgccatttgaataggagggttaggattgagccccagtaagttaacatttgaggctggacatggtgactcacacctgtaatcccagaactgagagaggccaaggtgggcagatcgcttgagcccaggcattgagaccagcctgggcaacataatgaaaccctgtctctacaaaaaaaaaaaaaaaaaaatacaaaagttatctgggcatggtggcttgtgcctgtggtcccagctacttggaaggctgaggtgggaggatagcttgagcctggggaggttgagggtacagtgagccacgaccgcaccactgcactccagcctgggtgacagagtgcgaccctgtattggaaaaaaattaaaagctttgagcaaatagctgggaaaggtgaggaagcagcccatgcaggtatctgaggaaggtgatttctttcaggtaacagcaagggcaaaggccctggggcaggtatgagctttggggttggggtgctggtaggatagagggagaccccaggacaggaggctggggggaaagtgggggcagatgcagtcacggagcaggacaggagacagttataggactttgtagggcatggcaaggactttggattttagttgaggtggatgtggagccactgaagggctttgcacagagtggggggcttgatcaaatttgtgatttaatgggatccttctggctgctgtggaagatgggctgaaggtggaggcaggaggaccagggacgaggttccagcaaggtccaggcagaggcagtggtggcttggaccaagatggtgacaggcggatgatgggaagtggtcagacctggatgtgtcctgagggtgaagctgctgggacatatgtgagggaggacagaggagctgaagtcccctccatggtgcgtagccttgacccactggcattgacggatgtatggatcacagggcgaaaatcaagaggccggtgtgaagtgctgatttgacaccaaatgaagtgatttgaaggaaattactaagtatgcagcggtccaaatgatacataaaaacggccaaacgtgtgtgagaggcacgcggacaactggaattgagatgatgccacgaagggcaaagaccccgttttgttttcgcagactccgtgcctgcgaaatggcgcgggtctgttttgggaaggacggactttccacaggcttctgcttcatctttcgccgacctctctgaattgctttggcaaacactgtttattgtcattggctcggctccgcgctccagcccatctctgctgatagatgtgtgtcatgctcagccgacttcactgtgcggcatgaacactcctccccaagctcattactggagtctcggaggggccttgccattttccaaaacggtgtcacatctggtttctaacaaccatttttatttctccagaggtccaagttttcatccccctccctgaaaacggaaagcagactgtattttgggaactcacagttcttttttgtttctgtttttttgttttttattattttttttttttcagagacagaatctcactccgttgcccaggctggagtgcagtggcacaatcatggctcactgcagacctaaactcctgggctcaagtgatcctcctactttggcctcccaaagtgcttggattacaggcatgagccaccacgcctggccctttttcagagttctttatgcacaatctcatttgttgctgcccccatttttatagaagaattcactgaggctcagacaggagcactcgcttgcccaaggagtcagagtcctctgactctgcaaaccaagctctttaaagccacactgcaaccctgtcgttaatggtacatttggacaactttttaaactgtgcactttacacagagtttcacaacctcggcactggtgacactttggggctggatcattctttacggggggaggagggccatcccatgcactggaagatggtcagcagcatccctggcctctgcccgatagatgcctgtagcacattcccccaccccgccaggtcatagcagtgaaaaatgtctccacacactgcccagtgtcccctgcagggcaaaatcacccctggttcagtgtattctgcacacagatgtgcttcaggttggcagccctgcctgctccgttgacccatttttttcagcatgtagcactgtgctgcagacactataatagaaatcccttcctttctttttctccccccacccctgccccccagacagggtctggctctgttacccaggctggagtgcagtggcaggatcttggtccactgcagcctccgcctccacttcctgggctcaagcgattctcccaccccagcctcccaagtagctggaacgacaggcgtgcagcaccacacctggctaattttttggttttttggtagagacagggcttctccgtgttgcccaggctggcctcaaactcctgagctcaagcaatctgcccatcttggcctcccaaagtgctgggattacaggcgtgagccaccacaccaggcctagaatccctttcagtaagacatgcagttgccacctctcctgcactcctgggcgaggggtgtgacgcttaacattagagggcgctgccccaccttgcacagctgtgtacctcaatcaggtgcacctacccagccctcctgtcggccactgctcaccgtgtgcacactctgggccaggtactgcgctggggctacagtgcagcacggctcctgccttacggaccccacaccctagttggggaaatgaggataaacaagaaaacaaatgcatctataggataatttcagagagtgcagagtgctgtagaggaaataaacagcccggtgactatagagggatgggtgaccagggacaacttctcatctgacctgaggtgccacggtgaggaggaggcaggcgtcccaggcagaaggaagagcaggtgccaatgctcggtggggtagagagcttggctcctagggagcgtgagacctagagaagttgaaacagagtgagctcagcagtgcgtccctgaagggagacggcctgatggctcttggactcagaagggccctctggccatttggggaagtctgggctctgggaaggctgcggaggcagaagtccagttggaagttggctgtgagaaggaaacaggtgaagaagcaagatgcatttctgtcttttttgggattttatatcctgtgtatatgtgtatgttgtgtattcgtgtatgtgtgtatatgtgcttttactgtattttcctgcatcgtgtatatgtacatatgtacctgtatattcatgcattgtgtatatgtgaatgttgtatatctatgcatgtgcgtatgtgtgccatatattaatgcatatgtgtatttttatatgtcatgtattcactcgtgtgtatatgtgtgttgtatattcatgtatgtatatgtagtgtatttgtgcttgtgtatatgtattcatgcatgtgtgtatatgtatgtgttgtatatttatgcaggtgcgtagatgtgtttgtgtgctggttccaaaatatgaggacaaattgccaaatcaaagtgaataaatatttaatgaaatggtgttgcatgattcagcgagtcagctctggaacatttggactcttagagagctgtttgtcgattacctttaatgtagtgtgtgggtggaaatggtgtgggatgaacatgtaccgaaagttgctgatgtccttaaagaagccctgttggtatttccagccagatggcccgtcgtgggggagagaaagtcctccgaaagcagcgggtgctttctgtcctgctggctgcctcttgggaggcccctaggacagatcaggtcctgtttcacccttcgcatgcctgtcagttcatccacgtgcatagcagtgggtgggggtgcactgtcgtttcattgccaacaaccacaggggacaaagtcctttgtggtcccacagctaggaggtggcagatccaggattcaaacccagacagtctgactgcagagacgctttgggcactctgccacattaccacctgtgttactgggaaaagggagaactgatgctgggaggaacagcgtgttcctacgccggcccggcatggcggggacatgtctgcagcagggagaggtggccgaggttcccagtggtttctggttgcaggagccctctgtctcccccattgtccgtggcttgcttagtatccccagtgatgccgtgtgtgcccctgtgccaggtttttcaccagctaatctcagtccctggtcgccacgagacacagctttcacagaccacaaatgcaattattacaaggcaatttcagttagatttggggctgggagagaaaacagaagggtctcctcctcccatcaggctccgaatcgttccccaggagcacttaactcagacaaatggggaagcagccgcgtggagcctccaccgtagagctgcctgcaggggaagtggccgacctgctgggccacgaagcagggtgcaggaaggatatggggagctagtgatcctctccaagggggcagggggactccattaaaccagatgttaacagcaagaagttggctataacaggggacgggcccattggtggataatgaaaatataacccttagtaggcacttgctatgtgccagttccaagcaatgtacagtcgtgtgtcacgtaacaatggggatacatgctgagaaacgtgtcgttaggtgattctgtcattgtgcgaacatcatggagtgcattacacgcctggatggcatagcctactacacacctaggctctgtggcgtgacctattactcctaggctacaaacccccctacagcatgtgaccatactgaatcctgtaggcggtggtaacacaatgggaagtatttgtgtatctaaacatacgtgaacatgttaatagagtacagtaaaaatatggtgggcatggtggctcatgcgtgtattcccagcaccttgggaggccaaggcgggaggatcacttgagcccaggagttccagaccagcgtgagcaacatagtgacaccccatctctactaaaaattaaaacattaggctgggcacggtggctcacgcctgtaattctggcactttgggaggctgaggcgggcagatcacctcaggtcaggagttcaaggccagcctggccaacatggtgaaacctggtctctactaaaaattaaaaaattagctgggcgtggtgttggacacctgtagtcccagctactcgagaggctgaggcgggagaatcgcttgaactcaggaggcagaggttgcagtgagctgagatcatgccactgcactccagcctgggagacagagtgagactccatctcaaaaaaaaaaaaaaaaagtggtttcaggtaagagtggatccccagggcctcaaaccagcatctctctatctctctatctcttgtatctctctatctcttctgtctctctgtctctatctttcccacctccgcatttttccatattgctttacacacacacacacagactcttccctcttggtggcaagatggctgccagcagcttcagttatgtatcccaccagttccaagccttgaggaagaagaccttctcttttctagtagctccctaaaaatcccagggctgactcgctgcagttggcccagcttgggtcacatgcctttgcctcaactaaccagtttgtgcatgatcaccaggggaatgcggtcctcatgggagtcaaggatttgcacacattcctggagtcaacagtcaaggtcagcccgtgcaacttaaataaggaagtgttggtgcccaaaggatgacagagccaggcaggtgaagcttccacctagtgctgggcacacaggaggcagtaagtgctctggcctttcagcagatgccagccctgctgcccaggggcagtcgccagccagctcattgtcaatggcctttcctggcctgccattaattcctcttaatctgcctgccaaattttcccacccccacgccagcccccagcttgcccctcctcttgtgctgtccttgcctcgaaagctcagcgaatccaagcttcccaggcaccagccacctgccacaatttgggctgggcttttaatcttggttttaattccagctcattctcttggctgtatctcccagcccaggagccccggggcccatgctaatttgcttctcccacctccactggtgccggaataaccatttttaaaagtgccttggggaaatataatcaaatgagagcaaaatctaatttggcactaaaagcctctgactgaagccctgttttctagggcctggtggagactgaataatacaccctttttgggtttttaagggttgggggttggagaaaggaaagagacgtgaaaggggagatgctagcagaggaaacagcttgcattaagctgacatccgtggcactgaaaagaatgggcaggaggaggacccccacccactccctatgaagaaattcatatcccagcagccaagccaagaagctaaactccagcattcatcagaaagaccttggcccaagtcttcaagaaccagtaggttcactggctggagatttggaagatgtgggagtgtagcgggaaacccagttccccagtggggagttcagtgaagcctttttctctgactttcagttcacttttctgcaaactgagggggtgaaaatctgtgcttcttaaatgacttgtgatctgggctcctttcagaatgtgtcaaaagctgtggacttgtttccaggaaaatgcacaaaaggcaaaatctggcatgcaatgttccaggagcggtacgaaccctgccactcctcatgacagtctccaggaccctatgggatctgtcccctcttccccgtgatgtcatttcctccctccctcactgtcccccttgggttctgcgatgcccccacgtttgtactggcttcagggactttgtacctgccaattccctctgcctggaacagttttcctcctatcccctctgactcttgctcttcagcccagcgaggcctctcacagcactgcgtggggccactctgtcctatcattctcctttattttcttcatcgcatttgtcatcattccccactagaacatcaactgcacgagggcagaagggatcctggtggtcttgttcactcctgtgattccagtgcctgggaagctccctgcataccgtaggtgtttaatcaacacttgccgaatggatacaggcatgcataccttccctagggcagtgggaccccaaattcagcaatttcgagtgccaccatcatgaggtgtaccatgcccaggtacactgattctgttaacattttaccctagattgtttcactctggacttcagttgtttcaaaaggaatcttttacatcactgacagtattgtttgccacgagtagaaagtgtcggggctctgtaggggtgtaacaaaaacgcaggtaataagagcgagatctggtataaagaaagtgattttttattccaaagctagcttaggggaagaagtacagtcttcctgccttaagggtactgctttgcttttaggagcagaaaggagttgctttttaaaagggggcctggcatgaatggcacacaggggaggaattgagtgctgggggggtccgcatatctcactcgagtacttcatctaccgggaagtcagctggcagccactggtgcctttgtgggtggaactaggttgtaagggtggccagaagctctccacctgggagggagtttcgcagcaggcatactttgggttgtagtggaccattgtctctcgaggcaacctcccagtgagtgagagttccgctccagagcctctaagcacgtgattagatgaacttgccctgaagagagtgtctggtgtaggggagataaaaggttataattgcatttctaaagggcgaagtggggcacggggaaaatggagaaaaaagaagaataaaaaataataaaactgccggacagggtggctcacacctgtaatcccagcactttgggaggctgagatgggtggatcacctgaggtcaggagttaaagaccaccttggccaacatggtgaaaccctatctctactaaaaatacaaaaattagccaggtgtggtggccatgcctgtaatcccagctactcaggaggctgaggcacaagaattacttgaacctgggaggcagaggttgcagtgagctgagattacaccactgccctccagactgggtgacaagagcaagactccatctcaaaaaataataataataataataaaactcatctttttcttagaaaaaatgggaataccgatttatgtgggggcttattaaattttaccctcttccttgttgaggtcctgagccgattaagaaatcagacccaagagtcagctgatgaaagtcaacactgcactctgatgaatctggtgaaggctgggtttgagggcatggcttccttctgagagcatttgggcttcctgactaaactccagagtgtgacagacttcccactgatgcaggtccacacctctcctccccgcgcagacaggacaagcctcctgaaaactagccctccccgggggcagctcagtccccagaggaaaagcaagggaagggattgggctatgcatgcccacttcggcccttcaaatccactaggcacatgctaggggtcagcaaaccacagccaatggacctaaccaggccctccatttgttttagtaaataaagttttattggaacatacccgcccacttgtttatgtcttgtctgtgacttcttttttttctttctaacaatagggtttagcagttgtcacagagaccctttgaccctctggcccacaaagcctaaaatactgactatctggcttttacaggaaaggtttggtgacctctgctgtatattgtccccctcggaggaggtacgggagagcatggagagaggccaggagtgttacagaagtggagcccccccgcatggagggcagcgttagaggtgggggtcaaggtcacaaggtttaggaaatcttgtttcctgaactacacttggtctccaggggccttcctggctctcacaatatggctccaaagacctgaggggtgagatgctggagggttggaccataggcaggtttatttaaataagatagggtttctcagcgacgtatggtggctcacatctgtagtcccagaactttgggaggccgaggcaggtggatcacttgaggtcaggagttcgagaccagcctggccaacatgatgaaacctcatctctactaaaaatacaaaaattagccgggcatcatggtgcacgcttgtagtcccagctactcgggatgctgaggcaggagaatcccttggacccaggaggcaaaggttgctgtgaggcgacatcacgccattgcactccagcctggaaaacagcgagaccctctctcaaaaaaaaaaaaaagaaaagaaaagaaaaggtttcttggattaggcgctgctgacattttgtcctggctcagtctttgtagcgtgggggctgtcacgtgcgtcggcgaatattgagcagcatccttggcctccacccaccagatatcaacagcacaccaagttgtgatgaaaccaaaaatgtctccagacattgccaagtgtctcctggggacagaaattaccccctttctggccaagagccactgctttgaggagctggatgcattgaggcatctccaacattccaggtcccagagaaagagaagtgcaggcctttagcttgcccgggaatctcatgctgcctccactccatcagttactccctgacacctagccagggacgcccagtcgctgtttaattaggcacccaccacctaattacatttcactctgtgaaaactggatatgactcagactcagagactgcagccggttccccgcctcctcctctgcagaacgccaggttcttcccgtttatttttgctccatcctcccacacaaagggaggttccatcccggaccttacccctgaggctgctgggggatcctcccttcctattttcacctcccctgtgtacccagacccttacaggaggtgtttcatcagctcctccctctggagcggtcacctcccggccctgcatgatgggcaagtcatttaatgaagtgctcccctttgccttgtattttgggggtttcagaatccagccgcttgggttcctaaggggttttcccactcctggaaagtgtcagccatctgccaggtcaccaggaaaaccgctgcagagggagccagctccatcacagctcccccagggccaggtggctctgtgctttctccaaggacactggtggataggttgtcctctcctctaggggcaccagagccccatcccacccactctcctccttcctctgggggttcacctccctggcctttctctcttcatcctggcttctcggccaagcactcacgtgcacaaggcccagcgctgagctgtctgttagcaagatctccttacatccctacaacctcctggaacgctcatattctgtgctctcagcaatactcgtcagaaatttcagaaccgcagtgtcctcatctagaaagagacgactagaataggattgctgtctctagactcaaattttcccatttcttaaatatggctttatagattataattattaaaaattatacatgcaagccagacacggtggctctcgcctgtcatctcagcaccttgggaggctgaggcaggcagatcgcttgagctcaggagttcaagaacagcctgtgcagcatggcgagaccccttctctacaaaaactacaaaaataagccaggcatggtggcatgcgcctgtagtcccagctactcgggaggatgaggtgggaggatcacttgagcctgggaggttgaggctgcagtgagccgtgatggtgccactacactccagcctgggtggcagagtgtgacgtgtctcaaagaaaaaaaaaatgtacatgcaaaataaaaacagaagaggatcatgaagaggtcttgtctgtctccttatcacagagcttttaggcacatccccttcctgatgaattagggtgattttctttaagctttgttgttgatgtaaagcgtgcatgtggaaaagtgcatggctcccaaatctccaggccaatgaggtgtcaccaactgaaccacctgctccagcaagaaatagaacaagatcatcacccgagaaactccccttgctgctcccagccaccctcccccagtctccaggatacccactgtttttattctaacatcatagattagtttggcctgttctcaaatttcacatagatgacgtcatatggcatgtattcttttgtatctggtttatctctcttaacattcttaggttgttgagatgcatccctgttcttgaatgtagcactaggtctttcgttcaagtttcaatgtagccttccgttctgtaaatatgcaacaatttctttacccatccttttgttgataaacatttcatttgtttctacctatttactattacaaatgtgctgtcatgtcttgtacctgagtttaggtgagtgtatgaatacttttctgttgggtaaatacccaagatttaaattgttgggtagaagttaccaatgcattcaaatttagcagacacagccaaagagttccccaccgtggttggaccggttggggcagccactcagtgtgtgagggctcaagttgtcccacatccccacccatactaggtgttgcccatttctttaatgttagccattctggttgctgtatagcagacagaatccaagggatccacaaacttcaatgggaaaaaaagtgacactctggttttcactaacctacagctgagacttagcatttgcttccaatatgagcataagccataaaccacagtatgttggcagaatctgtagctttgtcatctgtagaaatcaccagtatttaatatcccattgcagtttttgcagatactgcaaaatataatattttcactcataactattctgaaatgatcgctctctacaaggttttaaaagacacagtaggccaggtatggtggctcacgcctgtaatcccaacactttggtcaggagttcaagaccagcccggccaacatggtgaaaccctgtctctactaaaaatacaaaaaattagccaggcatggtggcagacgcctgtaatcccagctgaggattactcgggaggctgaggcaggagaattgcttgaaacctgggaggcagaggttgcaatgagccaagatcgtaccattgcactccagcctgggtaacagagcaagactccatctcaaaaataaaaaataaaagacacactgtatcgcaaatgtgtttagtattttgataaccgtatttccaaacaattgattttctctgtaatcctatatcttgtattcaatgcacgtaataacattggagaagggatccattgctctgtgtgccagagggctccatggcagagcaggtgtgcatgctcaggcctcggacacacaatagtttaataaacatcgtcaggcactttctcacgtggcctcctgatccatctccctccgcagctttcttcgggaagtatcttaatgaatacaacggctcctacgtgccacccggctggaaggagtgggtcggactccttaaaaactcccgcttttataactacacgctgtgtcggaacggggtgaaagagaagcacggctccgactactccaaggtaagctgcaacctttccagcctgggagtggctgtgtggcccagcagttagaggcccaactcaggagccagactacttgggttcagattgtgactcaggcacttaaaagtgtgaccttgagcattttacatacacctcctcctcagtttttcatctctcagccagggacagtggctcacgcctgtaatcccagcactttgggaggctaaggcaggtgaatcacttgagtccaggagttcaagaccagcctgggcaacatgacgagaccctgtctgtacgaaaaaaatacaaaacttagccgggtgtggtggcacatgcctgtggacccagctactagagaggctgaaatgggaggattgcttaagcccgggagtttgaggctgcagtgagccaggatcttcccactgctcttcggcctaggtgacggagcaagactctgtctttaaaaaagaaaagaaaaatgtattcatttctcaaaaaatagtgtctgtttccaagagtttggttttttaacattttgccgagacagaatattcttacagaaagtacatacacagagtgtaccattcaaaggcttgccgcacactgaacggacatgtgtaatgagcacccgggtaggccaagaagagaatgtcaccaccgcccgcagcagtcccctcacggaattcccccgactcgacacccctcccgcgaggataacgatgattcagactcttagcgttacagattcactctgcatctggcttctcctgcttagtattatgttgagttcattcttgctgcccagcattccatcatgcgcttataccacaatttgtttatttcttctacttttattgggcatttaggtatttccagtttggggttattacaaatagcgctgctgagcactgtctagaacctagctcctggtgagcatagaggctcatttctgttatacccgttcctcacagcagcgttgctgagcacagggcgtgtgcatgttcggagtgagtgggtgctgcctgagcacctgcagcagtggttgatcctcagtcgtagttttttctgtttttaacataagatgaattgacatgaggtaacatgcacagatcttaagtggaccgctggatgaattttcacatacgtgtgcatctgtttcaccgcgcatctcttccacatatgcgtgcatccatttcaccgcggctccgatcaagacatagagcacttccagaagactccctgagacccctctccagtcatgaccccccaccctggggatgacgtctactctgacttctgacagcgtggattatttttgcctattctagaacttcacctaaatggaatcgtatagtctgttctcttctgcatctgccttttttcacccagcgcaatgtctgtgagatctgtattatttattcattcaacaactcatggacattttggttgtctccagtttgggtctattataaactaagctgccgtgaacatctttgtccatggcttttagtggacatatgcacccatttcttttggttatacacccaaagaaggattgctgggacataggatgtgttaagatgttgcgcccggccaggcgcagtggctcacacctgtaatcccagtactttgggagactgaggcgggtggatcactttaggtcaggagttcgaggccagcctggccaacatggtgaaaccccgtctccactaagaatacaaaaattagccctgcgtggtggcgggcgcctgtaatcccagttactcgggaggctgaggcaggagaatggtgtgaacccgggaggcagaggttgcagtgagccgagatcacatcactgctctccagcctgggagacagagcgagactccatctcaaaaaagaaaaaaaaaaaaaaaaaaagatgttgcaccagtttacactccagccggaaatgggagttgccctgcatcccttatcagcacttggtgttgtcttttttgtcagggctgctttgttgggcatgtagcggtgtttcattatggttttaccacaaaggtttttgaggatcacgtgagttagtacatgtagaacattagaagcgccccttgcacgtagtaaatactcagtatgtagtagcttagatcagggcaacaaatattttctgtaaagggccagatactaaatattttaggctttacaaggcttacagtcctgttaccactgcagaagtctgccgttatagtgtgaaagcagccatagataatatacaaacaagcatggccatgctctaaggaagctttgtttacaaaaacaggcagtcgacctgcttggctgtagtttgctgacccctggcttagatgatgaggaggagaaggaggagaggctgacagtgatgtttcatccagatgtcccattttaaaagaaatatggaaatgaacaaatcttcctgccccatctgaatcctcagagtcagctctgacatccccccacagctggtacattctttccccagaccagctgccaaatccatccctctttctcttttcccatccccactgccaccagtcctgggccctgcctactgtgacttcccaggttaaagtcactagagaacaggcagtcactgaaagagggtagcaagccaggagtgtgtggacaatagggagtggtggagacggtggagaaggtgtctgtccaaaaggggcagatcaggcccaggtagaactgtgggcccagatggccacttttcctgatttttcaacagaagccacaaatttgtattttttacctatgaaatctcctgattggtaaatattggcaactaattcagacttttctaaaatcttgcatcaattgagcatgcctgacccatgggcctgcagcccttcagcccaccatgtcgttcttctgccagcaccctccggggactgtacggtgagtttcacatttggagtcagtgggatcaagttgagagccccaaccttgacacatattacgtgaccttggacatgctacgtactcctaagagcctcaactcccaaatctgaaaaacaagcatacccttgcatacttaatcatgtgtacttccatttactgagcacctactgtgtacccctgagcacctactatgtagtgctcaggggtacacagtagtacttctgataacatgtagtacttctgatattcacaacaatcatatgaggggagtggactagtcacatttggttccattattcattcaccacccccaacaagtattcattgagagcctgctgtgtaccaggtaccatgccaagtgctggctattccaaggtgaatgaaaacagatgacccaatcatggtcctcctggagctcacagtctggcacatgaagatatgatataaactgttaagtgatgtgcacacatcattaatgcacacacacacagtcacatcacacccgtctattttgtcatccccagtatgagccatttcaacctccaagcttgctagttattacagtcatctcagttttgttttgttttttgagacagagttttgtgcttgttgcccagactggagtgcaatggtatgatcttggcttaccacaacctctgtctcctgggttcatgtgattctcctgcctcagcctcctgagtagctgggattacaggcatgcaccaccacgcccagctaattttgtatttttagtagagatggggtttctccgtgttggtcaggctggtctcgaactcccaatctcaggtgatccacccacctcagcctcccaaagtgctgggattacaggtgtgagccatggcacccagccactatagggtaattttttttaatcagactaggctcttgaagttgtttgtgaacagaaatttaactcccagtggcttaatcaaagaggaaatatattcacctatttaactgaaaaccagctataggggtatcaggcatgggtggatccaggagttcaaatgaacccccaaggagttgatttctctctactgtcagctctgtttttgtctgctcgactgtattcacagaagctctctctcctcctggtagcagtgcggccttccttatatcctcccagcttcctggccagctgcaagcatgggagtctctttcccaggagtcccagagagtctcagtgcatctcattggctctggatcagtcccatgtctgtccctgagccaatcagagtggccaggaggatgcctggttccctggactataagtcacatgctccactcctgagccagacatgggggtagcaggagctctacgctggaacgttggctgggaatagagccccaaataagaatggagtttccaccaggagaaggctgactaggtgctcaacggccaaaaaacactctgtcccacttctgttctggaaaccccggcacacatggagatccctctgcctccgacaggtcatcctgggctccctgtaagtctgatgggtccaggcccaagtggcagaagccgcccccggcctgccctcaagtctcattctgcacatagtaggcctccagcctcccaagtgaattaattccaaagttctgatgaggcagtccggcatggactccttggaatataaattccagtcccagggctaagcacgctgtttccctcctcccagcctcagtgcaggcggattctctaaatatcctgaaaaatacattccctcctttttaaaattcttcaccacatccacgcctcatctcagagcagcccgataatcaagttatcccggggtgctcaggattcttttggggctaagcatggggacatagaacgtccgtccttttgccctgtttcctgcccacacacatctccccctgtgaatgagaacagccctgtgagggaggcgtgagaggattcctggccccccagttaccaggggcctgggaacagagatgctctaacagggacgtgggcagagggcggggcggtgaagtcagaactggctcaggtccagggttcaaatcctgagggtagcagtgggcagcaggagcccaagcgtcaagggaacaggggtgagcccggggtttccagccaaggcagagctcaggagccctgtgccctgggccctagatcaggcagtaagatgcctctggcaaggcagaatgtcactgctggcctcgggcgggccttgttgggaggcccaggcagggaggaagcggcaacccttcgtaagcccccctcagaaggcctctgaggactctgtcccaagtcactaatccacagatgggcacatgccaccaaaggggtccagatgtcaagggcagaaagagaggcagtggtgatgagaaaagagtgatacaggacaagcgctaatggcagaagagggttggagaggggaagacagttgttagtgggaagggaagtgagaatgacctagagttgagtccacccgaaaagaggcttccaggtagctggcaaaagtgggcctgggtgttgggtggctctgcagggaggtgatggcagtgcacggccagtgtgggggcgacctggcagattctatgaacttcatgtgccccgccccttgccgcagcgtgtacacttctctgtctatctggagaagcctcagtcataggcaggagacggcgtgatggagcagctggttgtagctctgtttattactgaaagaaattagcaaagtccaccaatacacgaaataactaaatgaccgtgaagcatccctcctctggaagatcctcggcaaaggatgaggccggtctgccttatgtcctgagcccatcaggcagagtgggaaaagcaagttccagaactcctgaggtccttattcaaatgtcacctcactttagccttcctggaccaccttgtataagggcacccccaccacactccttactgcaacaaatcaccatctggtgcattacaccctgtgtatattactgattcatttgttaagtatctgtctcttctcataagaatataagccccatgaaggcaggaatgctcatttgttttgttcactgctgtatttgtcagatagataaatgaatatgtacagtatgatgtgattaataatataaaaagatgcataaagtgatactataatgtacctaacaaaacactggaaaggttattcccagtaggggacagaagagccaaggttatgggggtgggggggtggtaaggagtaatctaatcaaatgagacttcactgtcctttgtactattttaattttcacaaagaaaatgtaggcatatggttcttgaggaataatgactaacactcatttagacataccatgtaccagatactgtttgaatcattttacacaaattaacccatgcatttctcatcatagtctgtgaggtatatactgtgtctattcccaactgtcagatgagaaaactgaggcccagagaggctaagtaatgtaaccgggccacatagcctagtaagtgataaagcagaattcgaacccaggccatctggcttcaaagtccatgcactaaaccacagcccgtgggcccagactggtggtttttgtatggcccctgagctaagaatggtttttacattttcaactaattgaagaaacaatcaaaagaagagcatttttcacatggtatatacaaaaatgaatgtcattcagcctttaaaaaggaaatccggccaggcgcagtggttcatgcctgtaatcccagcactttgggaggccaaaccaggcggatcacttgaggccaggagttcgagaccagcctggccaacatggggaaaccccatctctactaaaaatacaaaaattagctggacatggtggcacatgcctgtagtccagctacttgggaggctgaggcaggagaatcgcttgaacccaggaggcagaggctgcagtgagcccaggtagcaccactgcactccagcctggccgacagagcgagactctgtctcaaaataataaaataaggaaatcctatcatatgcagcaacatggatgaaccttgagaacattatgctaagtgaaataaaccagacacagaaggacaaatactgcatgattcccttacatgaggcatctaaattagtcagacaatagcagcaaaaaggagaatggtggttggcagggctgaggggagggggaactggggagttcctgttcaagatgtatgaggtttcagttatgcaagatgaaacagttccagagatctgctgtacaacatggtgcttagagttaacagtactctacttcacagataaaactttgttaaaaagcatacagctcattttttttttaccacaataaagcttttaagagtaattttcatgacatgtgaaaaatacatgaaattaaaactgcatccatacataaagctttactggagcacggacatgcccattcattttcctgatagctgctttcaagctgcaatggcagtaatgagtagttgcaacagagacagggggcctgcagagtctaaaatatttactgtctggccctttacaggaacggtttgtgcatacttgctctaaaccactatgtatgcttctcattaataatgttatctgtggcggggagaaaaagatggacctgacccaaaaatacaaaggccttggctccagctctggatgcatggcttatttgtttggggacctcacttccttatctgtaaaatgggtataatgtccacttgtcaaagttgctgtgacgatcagctgagctaaggtatttgataacatgaagagcctatgatcattcattacgagttgtctggagcctgtggagctgctgccacccacacgcactgccttggccttggagggaagcccggtgcggagtgcccactcgagggaaacacgcttttgcctagggctgaggctggcagtctccgcagacactagctactcagtcggtgaagcttgtggatgcctgcaggaatcacctgaggctcagagggtgcttgccagagggggccggttgcacctcggggtcccagctgtggcttctcagccctgtggagctgtgcaggccagcagcacctgggtagagcctgactcctgggcgccgggttctggaaaatgcacctgggcctgtggacctccacccatctcaccctcctgctcacaggtctgaatttcagagttcttcctcatggcttgacccgggcaccccaaacacagtttgcccatctctgaactcagcctttcccccggcccaggccttctctacccttccctcaactgcccaaaccagagaccaacaggggtgggggtcacccgcccctcccgcaccccacatccacccagtggctgtcctggctgcccctgagcatcgctggatgctgcccccgccaccctggcccaggcctcctgttctctccctcagagagaacagggcatggctgaagccctgtggccggagggatgggtggctcttgttggctggcctggcactaactgcccactggtggagcagggtggcagctttggaggcaggtgtgtcatgtggcattgcggagctagcagagatcggggaagacttagccgaggagtggccactgaggaggatggataaggaggggagctctcagacatggagaaatctgcccagccaccaagacagtcctgattcttagctgaatggtggcagagagctggctgtgcacaggacactatggcaagagcttcacatctattggtgctttaacctgcctgtcagcctcaagaggcaggtactgtaatcaccccccacacactttgaaacattagactgtgggagcccctgacccaccctcctgggtctcattcctgccccggcctgagccctcccctggaggtagccagtatcctggagcttctacccacacatacctttattctttcatcccataggtggatatctcaaacaatgtacgatgctgtgtttgtgtccttagactttttataaatgatatcatatcatacacatccttccacaacctgcttttctcacccgatataacattgtaagatttatccacgtttgatccgtgttcatccacgtagctctgttctttttcactgctttagaatcccattgtatatcttctcctaggaatggaggttaatggtagctttatttttaaaaaagtttaaccacggccaaacaggcatatagttctaagatgaagtagtgaagatgagtctgttatgaagagcaacggtggcttcccaccccaccccactggcgggtggcagcaagtgtccaccactggcggttccatctcattctcatgccatttcctgacttgaccccttcaggccctgactgttgatgtcagggtacagagctttgcaccatttttagatccattgtaaattacctttgtcattttaagaacttttctaatacctttatatcacgttccaaaactatagcagcagctctttgatttatataacatatattatttttatgtaataaattctgtagagcccccttataaaattgtttttactccccaaaattaatccataaataatattcaaggagcaatatataaagaagcaagtaactttctccgcttctctcctcttcccagtcttcaatcagcattttgatatccttccagatttttccttgatgctcaaaaatatatgaggttagagtttggtttctcctcttcaccttcccttccctctgcccccacaaaaaatagaatgtttctgagtttgactctgttgcttgctcttacccttaaccatgtatcttggacaactttacacatgcctttttaatgtctgcacagcattgcatagtatggaagcaatgccaccaggtgtgttggctcatgccttaatacctacactttgggaggctgaggcaggaggattgcttgagaccaggagttgaagatcagcctgggcggccacttgctagctgtatctacttgggctaaccactgttagatactcaagactctgtctgtagagaccctgtctctacaaaataagaataaaaatgaaaaattagctgggtgtggtggcacatgcctatagtcctagctacttagaaggctgaggcaggaggatcacttgagctgaggacctcagggttacactgagctatgattgtgccactgcaccccagcctgacagagcaagaccttgtctctaatatgtatgtgtgtgtataatatatatacatgcatactgttaaacatatatcctcctgctggtcactgcaatgtttttgttttataaacaatattgcagtggccattcttgtgcatatggatatagtggatgagtgtacctgaaagagtgtctgtagatatatgaatacatcatggtatgtatatatgttgtatacttcagggtggaagctgtagacacctcttcacctttttttcttgaaaataatcactttttgaaagtaattgttttgggcagagctgctttctagcagagggtatatttcaagaagtcattaccttgaagaaagattagcagctaaatatttactaaattcaggaagagttgtatgggtgctgtggctcacgcctgtaatcccagcactttgggaggccaaggtgggaggatcacttgagcctgggagatggaggctgcagtgagccatgatttcaccactgcactccagtctaggcaatggagcaagaccattgctccattttttgctccatgaccaaaaaaaaattaaagagtataggcaaacctcaacttcttagctgagcttttaaagcctccagttctggccatttacttttcctccaactcttctctcctcttgcccaatatgtaagtcagttccttattttcctggagacattactgcatccccatcccttttttgtgtgtgtgctgctccttatatcatttctgcattttaccctctgacattttatcctctttccaaggagccagttgccatctgccctctcttctatttttagagcacatggcaagcacattcctgcctcagaccccgttatctctgcctggaactctttcctggatcagtgattctcaatcctgagtacccattagaatcccctggggagttttttaaaagtctgatacctgggccaaaccgcaggccaatccaaccagaatctctgggggtgggcccaggtatcagtaagctctccaggggattctggcaaaatccagtgatacatatcttcctatgcccagctccttctcatcattcaggtctcaactcaaatgtcacctcctcagagaggacctccctgactgccccagctaaaatatgcccctcacctcagctcccagttactctttgttacatctctctgttttatgatatttccttcatctgtcataacttttaactaccttggttctttatttatacatgtgtctgctcctgccccagtgtaggcaccccagggacttagggatatacccaccctgcatgacagtgtccccagagccttgaaaaaacttcagacttaggagccaagactatgtagtgctgggtccaacatttactagctgtgtgccattgggcaatttacttagcttctctgtgccttaatttcctgttctggaaaataaggattatcatcatacgtactttctatagttatgtcagaattaagcgagcaaatacaggtaaacacagaacagtccttggcacatcgtaagcactcaatagtgttagctattattcttttaatatctttttttttttttttgagtcagagtcttgctttgtcacccaggctggagtgcaatcatgcagtcgtggctcactgcagcctccacctcctgtgttcaagcgattctcctgcctcagccttctgagtagctgggctacaggtgtttaccaccacgcctggctaatttttgtatttttagtagagatggtgtttcaccgtgttggccaggctggtctcaaactgacctcaggtgatctgctcacctcagcctcccaaagtgctgggatcacaggtgtgagccatcccacccagcctattttaatatctatctaaagtgatctattgcaattcctgccctgttctccctatccacttctctgctttatgtccaattagcttagcaccatttgcatcatttgtctggcatttcatttattttacttgcttatttcttgtctgtctgctccctagactgtcagctccagaagggcagaaattgttttgttcactattgtgtccccagtgcctagcagggtgcctggcacgtagtggacaccagtatgaatacctggctcctcacctgttctcctgtctctccccaccccccaggattacctcacagacctcatcaccaatgacagcgtgagcttcttccgcacgtccaagaagatgtacccgcacaggccagtcctcatggtcatcagccatgcagccccccacggccctgaggattcagccccacaatattcacgcctcttcccaaacgcatctcagcacatgtaagcctcagcactctgcctgccagaggcactgcttagcatgaagggggagggtcaggctttagcaacagtactgtcaccaccatgacttcactgtgcctcctctctaatcctcctggtttaaagaccccaagaacatactgcttgtccatggtgaaactgggatgcaactccagacagcctgggcaacagaccaaggcaggagaatttttaacttgggatacacggcctcccaccaagaggtgtgtggatggaactgcatagaataggtttccttttaatgccatgtgtattttatttaagacatctaaaaacattcttttgaggagggggtctatagttttaccagactaattatttgccaccatttattgagctgtgggctatgtagcaggtgctgtgctaagcccttggcattattgtccagtccctgaatattcacagtgacccttggtgtaccagttatctattgccatgtaacaaatcatcccagaatctagcaacttaaaacaacaaacacaaattatctcacggtgtctgtgagtcaggaatctgggagtggctgttctgagcttctggcccagggtctcctgaggttgcaatcaaggtgtcagctggggctgcagtcacctgaggcttgactggggctcagtcccatggctgggtcttgccacaggagcctctgtccatagggtgtttgagtgtcctcacagcatgatagctggcctcacccagagcaaatgatcagagagagagtaaggccaagaaggaagccacagtgtcttttacaacctaatctcggaagtggcaccatcactgtgccacattctattggtcacacagaccggtccttctacaatgtggagggtctacgcaggggtgtgaaggccaggaagtagagattatcaagggccatcttggaggctgcctgtcacacttggtattcccattttacagatgaagaaactgaggcacagagaggtaaggtaacttacctgaggtcacccagctctaagtggcagagccaggattcaagtccagccccccacttctgcttcccatgcctctgcccacccctgtagtactctatccagctggctgggaaacttcctggaaagttctcctgcttctctctgcctcagaccaccccctgcttagcagtgactcagcagcccttactgtgacattctggggctgcaaggatggggtggtttggaatctgcctgaatattcagggtgtttggcttcattacaatctgaatacattgccctcctcaagcccctcctgtaattactttttgacagacctcgaagcagctcagagagggtaccgaaggcactgttcaccttcccatcccctgatctctggggaggaggctttgacagaagacgatgagctgcgtcccaggggctgcagcattgctgctgtgcacatctgtctggctccccctccaaacccaagcccactcctctccacccaagaaggccagcctcccccagcagccggcaccccgccctaccgccacttagaactcatccctgcagcgggtggaggccactcagccctgtctaagggagaagccgtgggtgagggaagggacgctttgcttcggcagcatctctaaaagaggtgccggcttcaccccaaacagcagcgagcggtgccggaatttcatgatgaaattgtttggcattgcctgctggtttattttccctttgaaatgaaaattacagaaattgaaaatgagcagtgtctgctcttatgtggagaagccccctttgccttcttaggggcatgtttggaaggctgtctcatctctggagtataatcatttccgaaagaaaccaaaaaagagaaagtcctgcagctaggatgttaaatgatgacagtcaagaaggggtggagaggggacagagccggggcgcacggttagagcactggatctttctgttaggggtctcctatcccatctctcccctagaaagccggcacatgccctttcctggggcaggccttgtgtactctggcaaaagttggtagatggtggtaccatccaccccgcagaccccagggccctgcaccctccccatgcacccccccacacacacagtcacatacatacagacacacacaaagacatgcaaatacacacaggcacacaaagacataccacacaagcagatacacacaatgaaacacacacaagcctgggcaacttagtgagactctgtctctacagaaaatttaaaatcagccaggggtggtggtgcacacctgtagtcccagttactggaaaggctgaagcagaaggatcacttgggcccaagaggtcgaggctgcagtgagctatgattgcgccactacactccagcctgagtgacagagtgagaccctgtctcgaaaaaaaaaaacacacacatgcagacacacaaaaatacacagttacagacacacacaaagacatacacacacgcaaacaaagacataggcagagatacaaagatacacacaggcgtgcccacagacacagcccaccagccctcagagcttcccttcaaagggcgctgattgtggcttcaagggctttggggcgagggatgttggggctgctgctgatggccccagacacacagtggaggggctgtgaggacaccaccatcttcccgccatttccccagcagaagggaagggggatggtcttcttcacgcccttttgtgaacgcaccagatattcctcggatgctggaggaggtgaagttttcagatgtttgttgaacaggcagctgggcccatgggaagatgccgacatcctccctgggggagcctggcttgacacaggcaaccagcaagctggcgtcgaccccaagcaccacccggctctgctgccttctggcctcagtgtccttctccaaaagcgctctctccgagccggggctgcagaaatcatcatcctctgaacagtcacccctcactgttctcgagggccgatgtcagcctaacttctcatggattcagggatgattgctgaaaattgcatcctggaatccgggcccttgggcctgcgggaccaattttcccacacgctcgctgctctgagagcgtctctgtccgactgctgcccccagcagccccctttcagttcctcggtgggagagatctgagaggggagctgagcttgttcctgggaatgttctacatggcgggtcaggccctgagacagcagagccagcccacaggagagcctggccgttctgtaatgaaaggaagcatgggccctgatggattcagtggcatgaggctgcagatcagccaggggctgagaaagccgagtccaggggagccttggagacagtgactcacctcccgccttacatagcaacggtgtccacagctgccaagctaccccagcggcagcgtcacaatttctgccccggacgattgtgatatctgagacgctgctgaagtcccgacgtaccaggccagagggagacatgtctgtgcccctctgaccaggcttgtttttcctcctcttcttcgcgggagctccttgcccccagaacacccactgtgaaaagcagtggaaactcaccctttacttcagccttgactgggaagagaggccagatttgcagggaacctggccttcaagaaccatcaggcccagggcgaggaagcccacgttttgtgaggccttaaacagtgcctcctgtcaatggtgcaccccacccaggagactcccccatgctgcggttttcagtagctcggagccaggggcccggcataaactgaggtgacaaggaggtgctcttggtttgctcacaatgtttcctctggttttggtttaatctcccattgactaaccaggaaatagagaggatcagagaagtttggggacctgcccgctgtctcacggagtgagtgacagacccagtgtacctgacttctgccgtggagtcacccgtgattactaatgacaaagggacacaccaatgataacctctcccaagcagtcatcacgcactggccatggttagaagggttccccttacagcctctccctcagtgctcacaaccttcctgggaactggcactgtctgtattctccttgggtaggaaatgagggaactgatgccttgggaggggactaactggccaaagacagaactggggctcgaaccccagcagctggtatagtcaaccactgccatgatatcatcatagatacctgcttggggtccctccatccctcacatcacaggtgctcagacagaactttgcccaacacactcctgctgcacgattaagcagcatgccaggtgcagtggctcatgcttgtaatgccaaaactttgggaggccaaggtgggtggatcacctgaggtcaggagttcaagaccagcctggccaacatggcaaaaccccatctctactaaaactacaagaattagccaggtgtgttgacacaagcccgtagtcccagctactaaagaggctgaggcaggagaatcacttgaacccaggaggcaaaggctgcagtgagctgagatcccaccactgcactccagcctggaccacagcaagactccatctcaaaacaaagaggccaggtgcagtggctcatgcctgtaatcccaacactttgggaggccaaggtgggcagatgacgaggtcaggagatcgagaccatcctggctaacatggtgaaaccccatttctactaaaaatacaaaaaaattagccaggtgtggtggcacgcgcctgtagtcccagctacttgggaggctgaggcgggagaatcactcatactgggaggtggaggttgcagtgagctgagattgcgcccctgcactccagcctgagcgacagagcgagactgtctcaaaaaataaaaaagaatgtggcatgtcccaaatgtgcacattcaggtgccttcctcacaattctggccttacacataaaactatgacttatttcatttttaaatccatttctattatttcaaactaaaatctattgcaaaaggatattccgtggtcctaccttaaccacaataactgccacctgccattcaccaaaggtaactgccatctaccaataataggtacaaggcacacaaagcaatgctatggaatttgagttgggtactggttcccgatgaaggctctgaacttgactttcttcccttttttcaaaaggaagacgagcaaagtctagagaggtgttaaagaaacactagcaccaaacagactttgccctgagagagccgacaagggactggctgtctcactttgtcactcaaggtcactgaatgctgtgcctcttaggagcttcccaagtgcacacttcacacgtggagaaacgctgaaacagggtttggataagcccctgacatgccaatgtcccctttcccaccaggagatcacacctggccctgggctgcagacacagcacagggtggctgctcatccgggcgggtctggcgggggccaggcagggtccaggctgtccctgggtttgaccgatgtgtatgtccttgcccaccagcacgccgagctacaactacgcgcccaacccggacaaacactggatcatgcgctacacggggcccatga

SEQ ID NO: 15834 - DNA, 30431 bp, Homo sapiens
ggttccatgcaggtgatgaacaagacccggcgcatcatggagcagggcggggcgcacttcatcaacgccttcgtgaccacacccatgtgctgcccctcacgctcctccatcctcactggcaagtacgtccacaaccacaacacctacaccaacaatgagaactgctcctcgccctcctggcaggcacagcacgagagccgcacctttgccgtgtacctcaatagcactggctaccggacaggtgagcagggacgggggcaggtgcaggaagggagtgacagccagggcgggcgtccctaggtgtggtctgcacaccactgcggtacccaagttgattctggatagcccctagagcaactctcttataatttcagagttgtgcatttatttctgtgtgtattaaagaaatacagatttatttgcctacagtagtgatgtaaagtgaccttgtcaaaggaatttgagtcccccaaaaaagtgagtcttttcaaactatgaatcatagtgtggagaggccataaggtgcccatgcatgagtttgcatcctctgttaatagttattaagcccatcagggactgtttcgttgacttcaaaccattagcttggaagaaggttccaaaacataggggtgggggatgggaattcatggaggggaacagataatggggctgtgtggtcgctttctacgtggcagtaaccaaggtggtgcagaaactgacatggtggttgactgtccacactcacccgtgtcatcctgggtggagggcgacccagttcctgtttgcttatccttcaggaggtctttggtgggctctgaaggctcacctgccaggctggttgtctgaggtagagatgcaattacagtatagtcacttacctgtagcgccattgcaaaaccctccagactcaattcatttaacttgctttaattaaaaataaataaatactccccgccttgggtaagaagccgcggcggttgtgaaatcaagatattgtggctcagatgttgcaaccccaggaagttgcatccaagtgacaaggggtttgtttgggtgggagtgccgcaagggaaggatggactcctcctccagccctgtccgcagtgctggacctgcagccctcgaggctgggcagcttcctctcagatacacagtgtgggctggcagggatgctttggtgtggggagcaagccagtaaggtgtgtcttcttacagcctcatcccatagccagaatcacctagaaagtatgttctgctgagaactaggaaggcctcgttcctataccttgttcctgtgtattgtgcgtgccattatgcagaatcaaccacctgttggttcccctgagcctctgcagaaagccacatgtgtcagaagttaccatggccaccaccctagatgattggcgggggcctggatgttgctagcagaagcaggacaggcaggcccgcagcacagcagtgggcccttattgaagatgcacctgcaacttggctctagaaagtacagccatgcactcaagagtgaccagccttgaaatgttttaaagtctgaatatttcactgaaaatcttattttaaaatatgccggcacagcttattttttctttaatgtatactgggggccaaagaaaatatgtctgaggagtgagtgtgtggctcacagactctcttttcacaacctctgggtgaaaggtctgtacagaaacctttcgttttggatgctggaagatcagtaaagaccctagacctgttctcatcaatccccctcatttcacagccagggccactgcagcccaaaaaagagacctgcccagagtcaaagtgaggtgtttgtggcataatcaaaatggaatgcaagatcatgggaattcagagggggcatggaaatagtattcatcagactgaaaggaaactcatatattctgtgccattttgagggctcagggtgggagctaaaggctagtgtttcaaaatcttacaggcgacatgagaaaatcaatcatttcaagaataaacattctctaaagtggatttcccaaacttgtccttgaatgtatgcaaatcaccaaaaagctgtctccctaaataagtgcttttattcaactatgattcattattataccctcatgaagactgggagcgtaatgtcaagtgtaaagagccagataccgagaacatttacgtttttgtaaaactgccactgagaattttattcattatatttagaatgccactctgtacaaagaatcccattccagccttactttcagaactcaggaccctgaaaacacctgtttagtctgatgaactggtgtactccttgttattacataataagagccacataccctgtatagtttccctctttgccctggcagctaggaagctcaggtttgagttttatattgagttgttgtttaaagtggaaatgtttttaaagatccaactgcgtgatatgttatactgatcagtgttgactaagaaaaatgacaaaaatctataatgaattcaaaaccttttagattattttttccttttagattgatttgtacatacatattagaatatactgtaaatttttaatcccccaaggaccaaaagtaaattgttcctgctgagtcttcagccatgttaaaccctgtgttcacgtggccacctagcaaagttggttcagttggatttaagtttggctgtgtgtgtgagagagaccggggatgtcaaataaaattccaagttgttctggtggccctgctctatgaagtggtcagagactccgactccatttctccttatttcccattggtgagaaacaagtcatatggccatgcatggcagcaaaggggcctgggaaatgtagtcttattctaggtggacatttgcccagatgaaagttattttactgtgggagaagaagaaaacggatactgaaggacaagtgaagtctaggccaccctaacagttattagccatttgtgtttgtgatactcgtttgaatagaggagatcagcccaaactgaggaagactgaccccagaaaaatgctacttaagtggaccaacatttcataataaatagtgcttttaatgtatttagtaaggtatttgatcttgaaatgaaactacaatgtttcgagaataactctgttatgttacatctctttttttctttttctgagacagagtcttgctctgtcacccagactggagtgcagtggcacagtctcagctcactacaacctctgcctcctgggttcaagcgattctcctgtctcagcctcctgaatagctgagattacagacgcctgccactacgcctgactaatttttgtattttttgtagagatggggttttgccatgttggccaagctggtctcaaactcctggcctcaagtgatccacctgccttggccttccaaagtgctgggattacatgcatgagccaacgcacccggccctctgttaggttgcatctaatgatatttaacaaatattgggctctagttgcaactaatgagttgattcttcaagcaagtgaattgacgaagtgtagggaggaatataatgtgtttcacaaattgaaatggatggcacaagatgatatcctttacttcactagggacatttttgcaaaagtatttgaggatttgatcaattttttcaagggcctctcctaattctctgacatctgaatcttcccctgtgaagtgcatctcatacttcatcatccttctcaatagtctcttctccttcatgtagtatctttatagaccaggtaattattcgtcagtggatttgcatgtgttttttgagctatcttccagcgtcattttaattaattttacaaaccctgcatcttttaaaatatttgcaatttcattttgcagtgatcttgctttgcatggccccatgtttgcagtggagattgacaaaagacaaaatgagagaagctaagtttaagcaggataaatatcaatttgttcatgaatatttctctgtatggcttcttacaacttgagggacttggatctcagatatgaatacccttggaaggatcaattgcatcctcaggttttttgttttctttgtttttttgtttgtttttgagacagggtctcactctgttgcccacgctggagtgcagtggcgtaatctcagctcactgcaacctccacctcccgggttcaagcgattctcctgcctcagcctccccactaactaggattacaggtgcgtgccaccacgcccagctaattttttgtatttttaatagagacggggtttcaccatgttggccaggctgacctcgaactcctgacctcaagcgatccaccctcctcggcctcccaaagggctaggattacaggtgtgagccactgcacctcgccacatcctcagtttttacaaaggttttatagtcatcctttaacacagttcagcagttgaagtgctgttgccctgcctgtgatcacttatatatccacaagtcaaagttgtacagtgttcccagaatgagacacctcccagctctctgcagagtggttgagggcattagctttgcctgggtttgaatccagtctctgctgctttctgcctgcatgaacttggacaagttatttagcttctgtgtcttggcctcctcaaccacagttaataatgtcacttaactcatagagttttgtgaagattaaatacattagaacagtgtctggtacatggtcgtggtaggcacttgggaaatttagcaatgatggctgggtgcagtggctcacacctgtaattccaacattttggggggccaaagtggaaggatcacctgaggccaggggttcgagaccagcttgggcaaaatagtgagatcccttctcaatttttaaaaaacagtaataaaaaaaagttagcaatgacgatgacgatttgcacaatagcacaacatcacacagcccacctcaggccagtgttctgatgaatgtcatggtaagttgcactcatggatcaaaatgtggcagcatgtgctcagcctctggtaatcagcaaaatgcaaacgcagccaacagtgcattatcacatcccagccatgaccacagcaaatatgaagaggtcccatcgcaccaaatgttggtgagaatgtaggaaaacaggaaatcatatgcgccagcagcatgatggtaaattgttccctccactttgaagaacagtttgccaatttctggcaaagctgaaaatggacatctccttctactcagcaattttactctggctgtgtccccctcggttctgaggaggtgatgttgatgtgtgagttctgcttgagcaagggaacacacttcctggctgccctgtttgctcttgaagatgtgtgatgctcatggcaatagattccctttagatccaacggacaggaaccccgactgcagctggcttcaaaaacattgaattttttgctccctaaacaggccaggcacggtgactgaagcctgtgatcccagcactttgggaggcagggatgggcggatcacctgaggtcaggagttcaagaccagcctgaccaacatggtgaaaccccgtctctactaaaaatacaaaaattagccaggcatggtgatgtacacctgtaatcccagctacaggggaggctgagacaggagaattgcttgaacctgggaggcggaggttgcagtgagccgagatcgcaccactgcactctagcctgggtgacagagtaagactctgtctcaaaaaaaaaaaaaaaaaaaaaaagagaagatacaggtgagtagcaggcagagtcggatcttgtggtttacgagtatcatgatcatatcacgaggctggaggtctggacatggtggctggcactccagcagctgtgtgcctccttgtccacatctggcaggagcaagagagcatccttttccagaatgctcaaggcatgagatcccttctgattggaccaccctgagtcacatgccagcccctgagccaatcatcatataaagcacatggtttgtgccaacttgcccagcgtggatcacctgctctgcagcagctggctgagtccctttttccccagcacttggactgccaggtagaaatcaagggctgctggaaagaataaggaaaagcatactggagtgccgatcacaattttactacactgcctttggcaaacaaaaaacaaaaaaaaagtaacatcagctggccgggcacagtggctcacgcctgtaatcccagcactctgggaagccgaggagggtggatcacaaggtcaggagtttgagactagcctggccaacatagtgaaacccgtctctactaaaaatacaaaaattagctgagtgtggtggtgggcgcctgtaatcccagctactagggaggctgaggtatgagaatcacttgaacccaggaggcggaggttgcagtgagccgagattgcaccactgcactccagcctggtgacagaatgagactccatctcaaaaaaaaagtaacaacaacaaaaaggcaaccttttccagctctttctggtgaactagattggagtgccattttctccccattgggataatgcctttctccttccacacctgaatctggcagttctgaagttgtttcccagccccagcttctgccatccggtccagactttcgcagagatggtggcgggccctctgcccttctgcatcatgttctaaaatgcgtcaggggagcagggggtacatgctccttacaagaccaggccttgccagggctctcagttggagcctgttttggggtttggccctgagcgccccagttattttcactcttctcgcacaaagctgggtagagaggtcagctgaggaccagaacctggccatcagccttgggcagctaccctcaccagggtctggggggcctctgtgtcctgatgaccccaccccatctacactacactacacttggggcaccccatcgccctctcacacaggaggatggaaaggcgcccgctaggcattttggcatccccaacaaatgagacttgttttttccctaaagcggtttcattcaggaccgcaggggcaggagggctgctgcgtgggccgtcctcctctgcaatgctataaagtggcccaatgcccctctttccctgccactctctggatctacccttagccccttgccctgaaccccatccaccctggcccctctgcctcctggccatcgccccagagctctccccagcacatcaagcatgagtccagcatcacttcctggtcccccgcctccccggcgcctctcacaggcttctcctcggcacctccagttttccagttgctcaggccaaaaccttagcaccattcttgattttttttttcctattcctttcacactccacattcagttcatcagcaaaccctgtcagctctgccttcaaaatatgcccagagtcccctctgctgccaccagcccatccgcgccactgtcttccccgcctgccctgttccaggtttctcctgggatcccccagcttctgcgtttatgaccccttggtctgttttcaatgcagcagccagaggggtctggtcagaacctagttcagatgctctttctcctctgggcagagccctccttggctcccacctactcagggtagaggccccgacagccacctcagggtcccagtgatccttcccttctctctgaaccctctcagcctcctggtctcccctcagtcactgtcctccagccacagcttctcaagcagtcagccacacctgacatgcacccactcacagtgctttgcacttctttccttttctcaaaacttctacacgtctgcactttcctcgtgtctgtgttccaatgctgcctcctcaaagaagccttccttgactaccccatgcctcctgttcatcccagttttttcccaccagtgcccccatcaccactgaacaccactgactgtgtattctgcccatttgtctcattgattgtctcgtttctaaaatgccagctctcaggctgggcgtggtggctcacgccagtaattctaacactttgggaggctgaggcgggtggatcacttgaggtcaggagtttgagactagcctagccaacatggtgaaaccccatctctactaaaaatacaaaaattagctggatgtggtggcgcaagcctgtaatctcagctactcgggaggctgaggcaggagaaccactggaaccagggaggtggaggttgcagtgagccgagatcacaccactacactctgtcgcttgggtgacagaatgagactctatctcaaaaataaataaataaaatgccagctccctggaagcagcggcctctgttctgtgccctcgcgggttgccaggcctagagagtgcccaccccatcgtaggtgctcaggagaccttcccaggatgactggtgactaagtctccacattctgtccccgccagcagcccacccccatctcttccacactcctttctcctctcccgtttctctcctctccacccccactcccaccatctcagcctttcctcctctttcttctcagcctctctgcacacacagggaagagaagactgaaattattcccgggatgccgtccctgggcccctggtgcagctgtccctgccttcacaatggcagccttctctttgcttggctcttctcctgggtttgctccctgctctcttcctctctccttgagtgcacacaagtgtgcacgcacgcacgcacacacacagctcccttcttccctcggtccagctgcctctcatctgcccatcttccctccccctctccggcctgtggggggacagcagagcctctccattcaccccgtggagtgtatccactgctcacagcaggtagccttcctgtctctctgcagcgaacacccagccttccccactgtggggatccgagtatccacgggaattgcacagcccctcctgggacccaggctgacccagcgtgtcctcgagaggcacggatttgccgcctccgtgcacatcttcaagcgaaatttcttcctctaatttgatagtcacttcctttctctaagacctcagatttcaaaataagtgaagcacttgttttgagcaagagtctaaagaattagactccgccttaagcgcccttgtgaccttgagctgagacctcatcccctctgggcgtcagtctctccatctgtgcagcagtgttgtgacatctaagcactagtcacccagtgcctgtgataagacgccaccctgagtgatacgtgacctgtgcccacaaacccaggaggagaggttccctgcgccgtaagaggaagtggccacggggaaagaggaagctgatgtgaggccgatggggcagggtttccgattgtttccaggcgacaccctctctgtcccacccccttagcaggtgtatccacttccctagtggaccacagactgggtggcttagaacaaaaggcgattttcacagttccgggagccagaaccccaaaatcaagcatcatcagggccacgctttccctgcaggcttcaggggagggtcctttgcccttgagttcctgggggttgctgggaatcttggcaccccttggcttgtggccacatcactccagcctctgccttcatcttcatgcggcctcctccctgtgggtccctctcttcccgtggcctgctcctctctgaatcagtgtccaaatttccctcttctgtcaggacaccagtgattggactagagcccgctctgatccagcgtaacttcatcttacaacaccatgttacaaacacggtcaccctcacaggtacctgggcaaggacttgagcatatattttggggaacacattcatctcgtgacggctggtttctttcacacattaaaccccgcccccccccataaaggctgcagagccgatgtcaaactgagcaaacctgccgctcttcccctcttcactgccccagctgtggtcctgggtggggagcagtgtggccgccctgaagatcagctccatgcgtagccttcccttcccaaccatggtttctctcaaggaatctccacctgcagtgggcgttgaaacagctgcagggtcaaaagtgagggaagggtgactgtggtgacagacaggcacaccctgtctcctgggcctcaagaggcttccgggggtttcagagtgcatgagaccttttgtagtcctctcctaggtgctagctgtgactccctgaacattctggaatgagttaggctggagccaaatggcccagtaccgttgccactagccacagggagctatttaactttacgttaattacaattagcatttcagtttctcaggtgcactagccatggttcaggtattcagtaggcgcacatgggttctgtactggataatgcacatagagaatgtttccattggcacagaaaggactcttggacagcaggagaatagagcctatggctgggcctgtaatcccggcacttggaaaggtcgaggcaggaggatctcttgaggccaggagtttgagaccagcctgggcaacatagtaagacctgtatctttacaaaaaatttgaaaaaaaaaaaattagctggacatggtagtccatgcttgtagtcccagctacttgggaggctgaggcaggaggatcacttgagcctaggagtttgaggctgcagtaagccatgatcacaccactgtacttcggcctgggcaacagagtgagaccttgtctctaaaaaagaaagaagaataaagcctaatcaaacaaaatcttttgggagtggggagtgacacacagcactgagaaggggcaataaaaacgcagggggtggtggctgtcgaactttaggtgagtgctttccgtgattcctcatctgtaatccaatctcctcctcctcatccctgcactcacttccccttatgctcccagtaccttgatctgtcttcccaaaccttcctgggtctcgggtcagggtctcaggacaggttcctgttctccgagcagcagacaccatccatcccggggccagcaggttgtgccagcccacacagcgagtcctttgggaatccatccgtgtcgcaggggatttgagcaaatgaagggaaaccgagttcctacaccgaggccgggagcggggcttcctctgtcatccctgtgtgaacccgttctagcctgggggctccaaatgcatagagggctggcaggtagcccaaagcagagaggcaggctgggtggggagggggtgcccagatttcaactgtggactgttcactctactttttaagaatgagcaactgaaaacaccgggcaggcccacagcaaacacacctgagggatggattggtctgcaggccaccggcttgcaaacttctttctaagctggtggttctcaagggagcacaccgccccctaggggttaaactctgtgactgcattgccggtgatggtgaaggatttgactttgctggcttcctgggggcggagactaagaaggactttgatgtcctgctctgcacagcagagtccacgtggcccccacattgcattgtattccacatagcttctgagtttcctaccacatcactcatatgggtagattattttatgtttattgtcatctgagtcttgaacctacgtctattttatatgtaaatactggagggtttttgcatattcccaggaatgtacggaataagaaaatggaggcaatattatacttgagtgcaaaactttcccaagagtcattccttatttctgaaagtcccatccccgatgacagtgctacgccaaaggatttgaatggcaaatgtcgcccgcccacccagctgcccttgtaattgtcacattcccagtgaatctgtgtctaggtgcaggcgtctgcctgactactgtgttgtgccttcttgatggatgtgctgggggaatttcatattgaaatttatcttcattataaattgctttccttttattttccctgtagattgcagttagagcattatattgattttgtggaaatgacatgcataggtagcttttgttacctataaatttcctttcaagaaaacaagggcgctctacaaaatatttgtcatagaaatgggaggtcagtctgatggcgctgagaacagctctttgaaaggtgcaagtagtgtcagattcctccaaggcgataattaaatatccattgagtgacaggccttgttctgagggtctgttgtggattttctccccctcctctagtccatccctctgaacaaaaccacactttaaaaggcacaagacagatatttaagacacagcttgtcctcgtggtgactcagcaggcaataaaacctgtcactagagatggagccctccatacccagctaattgagtttccagggaatgaatgggcctcatcctcatttgcaggagctgcaagacccttctagggagcggatggctggagccagcatttaattaggcacaggcagcccgccctccatgccaccaacacccagagctccgcctggccctgctacaaccagtcagcagggccttggtgtcccccgcagcccagtcttcctcaatagccacagcctcactaaaaacaggcaggcggaagacaggaatgcatggagtggcaagacagaagcagctctcgcctctcgccctggcgatctgcttgtccctgtttgtccccagcaactggccattccttctccccacccacagccggaggacacttttaaaaattgtaaacctgaccacatcacttccggctgaaaacctcctacggctgcccactgctttttggataaactggcatctcctcgccagggctgccaagaccttgtttggcctgggtgtgctcacctctctgtccacatctcctatctgtcccttccttggtgacagcactcaggctgcctagcctctttgttcctcagaacttccaaggtccattcctgccccaggccctttgtatgtgcagttacctctgtctggagcactggcccacaaccattctggtacaagcaaccggtttcgtggaagacagtttttccacggactgggggtgagggatgttttgggatgattcaagcgcatttcatttagtgtgcactttatttctaatattatcacattataatatgtaatgaaataattatacatctcactataatgtagaatcagtgggagcccgagcttgttttcctgcaaccagatggtctcacccgggggcaatgggagacagtgacagatcatcaggcattagattgtcataaggagtgcacaacctagatcccccgcatgcacagttcacaacggggttcacgctcctatgataatctgctgctgatctgataggaggcagagctcaggcagtgatgcaagtgatgggaagcggctgtaaatacagatgaagtttgctcactcgcctgccactcacctcctgctatgcagcccagttcctaacaggccacagaccgctacctgtctacctgtctgcagcccaggggttggggatccctggtctagagcgttgttcacacactgcggagaacttcctccatccattctctcttccttcctgcccttcctgtgtcggttagtactcctcaaccctctcattctcgaccatgacacccggctttatgttcttcttaggacttctcgcccccttgaaattatcttgcatgtttgtgaacttttttttttttcttttttttgagatggactgtcactctgccacccaggctggagtacagtggcatgatcttgactcactgcaacctccaactcccaggttcaagcaattcccctgcctctgcttcccaagtagctggaactacaggcacccaccactacactcagctaattttcgttttttgttttggtttttttttgagacggagtcttgctctgtcgcccagcctggagtgctgtgccacgatcttggttcactgcagcctccacctcccaggttcaagcgattctcctgcctcagcctcccaagtagctggcattacagttgcatgccaccacaaccggctaattttttacatttttggtagagatggggtttcaccatgttggccaggctggtcttgaactcctgacctcaagtgatccacctgcctcagcctcccaaagtgctgggattacaggcatgagccaccgcacccagccaatttttgtactttagtagagacagggtttcaccatattggccaggctggtctcgaactcctgacctcaagtgatctgcctgcctcggcctcccaaagtgctgggattacaggcgtgagccactgcacctggcgagtgaacttgttttttacatgttttgtttgctgcccatccaaaaatagcaccaggcaggtattgggtactcagtaaagatttgaacaaggccaggcacggtggctcacacgtgtaatcccagcacttcgggaggctgtggtgggaggatcacttgagcccaggagttcaaaaccagcctgggcaacatagagagaccctgtctctacaaataattttaaaaactggccaggcatagtggcacacacctgtggtcccagctctttgagaggctaagatgggaggatcacttaagcccaggcctttaaggccgcagggagccatgatcgtgccactgcattacaacctgggcaagtgaaacctcaactcaaacgaataaaaaaaatgaacagatggagaactcttgggccttaggcttgaagtcagcaaaaaaataaaaacaaaatggaatttagattactatctcatttatccagcatgaagaaacataatcgaaattagttcaggcaaactttgccaggtcccagtgctcaaacgctgtcagaaccctgtctttctgcttcttgcgttttctgtcattgggttggctttattaggaaggttccctctttgtgatggcaagatggcccccacaggtccatctccccagtgtggtgaccccagctgaaagagaggcctctttccaagggctccagcaaaagttccagggaaagctctcattggctcatctagggtcttatgtctctttcacccaatcacagcagccaggcaaaaggagataccctgattgtccaggccaacctcatgggcctggtccaggattcagagctagaaagagcctcatcagaacatgtaaggctgagaaaggggaaagattggttccctccctctttggtgactgaaggcacaattatgaaaagacaggagaatggattctgggcagaaaaataaaacagatatccactatagaaacccacatgcaggccgggcgcagtagctcacgcctgtaatcccagcactttgggaggctgaggcgggtggatcagttgaggtcaggagttcgagaccagcctgaccaacgtggtgaaaccccgtctctactaaaaaaatacaaaattagccaggcgtggtagcgcatgcctgtagtcccaggtactggggaggttgaggtaggagaatctcttgaacccgggaggcagaggttgcagtgagccaagataatgccactgcactgcagtctgggtaacgagtgaaattctgtctcataaaaaaaaaaaaaaatagcttcttcttaaagggcaagtgggaggagagcatttctcccagcccccagctcgctctgcttccaacataagatgcctctttcgtgcggaatcatgaccccaccttcctcatttgttttcacacagctttcagttcagcaagatcccatctctggcatccagaacttttatagcattgatttatcacttcgtgcagtgatttgcatttggtattttttttttcaaaagcagaagaactcgactcaggctgtaaccttgcaaagcagcacaaagttaaaaggatccagttacagaatatcagaaataccccagccctgagagctgtggagctctgggtttatttaatgcatttcttgccagccctgcctcctcagccaatttgtctgccaaaaaaacaaagacttcagtcctgtggcatttcacatctaatatttatgctgttctagagtttgcaaaagggcttccttttcatttatcactgttcctcaggaacctccagctcccctgctaggttaatgggattgttctctgctgcccagaccgggagccccaggaagccaaatgacagatcatgaaagtggcccagtggaggactcttctactggtgtcaggggtaggatcaaaactcagcctgaaccagctcagtttctattttgtgaccctgggggccaaatatggatcttgcaaaatggcagctggcagcctgagtctacacttcaaccccaaatttctgtcagagttacaagatgctttttaaaatctggaaatttaaccaaaaatacccagattacaaacttctctttaaaaaaaaaaaaaaaaagattatgataggcctgtaatcccagcactttgggaggccaaggtgggtggatcacttgaggccaggagttcaagaccagcctggccaacatggtgaaaccctgtctctactaaaaatacaaaagaattagccgggcgtggtggtgtgcacctgtactcccaactactcaggaggctaaggtgggagaatcacttgaaccaggaggcagtggttgcagtgagccaagatcatgtcactgcactccagcctgggtggcaaagtgagaccctgtctcaaaaaaaataaaataaaataaaggccaggtgcagtggctcaagcctgtaattccagcactttcagaggccaaagcaggtgaatcatgaggtcaggagatcgagaccatcctggctaacaccgtgaaaccccgtctctaataaaaaatacaagaacaaaattagccggtcgtggtggcaggtgcctgcagtccgagctactcgggaggctgaggtgggagaatggcgtgaacctgggaggtggagcttgcagtgagtgcagtggcactccatcctgggcaacagagcaagactctgtctcaaaaaataaaacaaaaatttgaaaaagataataatgataatgatggtattgccattactggtaacattcctgcatggtggagattagtaaactgtggcctacaggagtctgctgccaggttttacaaagttttctggaacacagccacacccattagtgtatgtactgtctgtagctgctttggctctacggtggcagaattgaatcattgcaatagagaccttatggctgcatagctgaaaacacatagtctggccctttgcagaaatagtttgctgagccctcctaagtggcgccagcccactggatttgtgccacagatacccccaggatttattagaatataggtggagttgagggtacttcagtccctaattaacagcggattagagatgataggtgcttatttctctcccatttgacagtttgggcataaacagcctagagatgatgtggcaggcatggtgttggctcccaggctcctgatgggtgatggtcagatggcgttccatcatcctgggcgatcgtccttatctaaagcagcatcccatcctgtctgcatccaaccagcaggacacagaaactataagggaagctcacttcccttcctggaggggagtttccagaagtcacacaccacctggtgtacccctccagttcatagaaaatacagagaattacaaaggaagccagttatatgaaaacatatttatcaaaatattttataaactgtgatatgtatgcttctttacacataaaatggcacgatgaagcagttatttaatggacaatggataggtctgataacttccatgatttcgaagtagcgctggctcaaatgatattttaagaagtccatgttgactacaatgtgatatgaaaatatccgtaattcccattggtgacaaagtcccagggaccatcattcataattgaaggggatgctagttataggttaatgaaaataaacaaatacatacttttgccattcaatttcaggaaattatatcttgggacaacagattaagaacctcttcctcaggtgatctgattcgattccatggcattaagtgccatctaaatgcttacagctcctcagtttgtaattccgtagcttttctgtgaacctggtctgtttccacctgaatgtctaacctgagtctcgaggttaatgtgtctgatttctttatcaacccccatccccaactctgcccctcccagtgtccctttcctaaataagggcaaatctgtcctcctcattgcttggaccaaaaaccttgagttatccttgactctctttacttctttcgcatgccacatcagcaaatcccattggttccacctttaaaaatagcctggaaccaaccacccaagcccttcgcctgccacgattgtggtcatcacagtctgtctcctgaatgactgtgagagtctccaaacattccagttccctgcctcggactggccttaattctaggacagaagctccaggaagatgcaggttttttgctgctttaattttttctgttttgttcactggtatccccagtgcctagagccatcccagccacacaggagtcctcctttaatgtttactgattgaatgaatgaatatataacatcatgatcaataatattatgataaaaacagtaaccatttagaggcagttaacatattttctcattgaatctttcccagcaactttgtcatgtagggatattattattattcctattttgcagttgagaaaactgagctggaaggcagaggtagctgaacttaaatgcaagctgttggctccagagcccatgcccagccctcagacctgcctgcctcggaggataaaaatcatttctgaggccaggccaggtggctcacgcctgtaatcctagcactttgggaggccgaggcaggtggatcacgaggtcaggagatcaagaccatcctaaccaacaaggtgaaatcccatctctactaaaaatacaaaaaattagctgggcatggtggtggcgcatgcctgtaatcccagctactcgggaggctgaggcaggagaatcgcttgaacctggcaggcggaggtttgcagtgagccgagatcgcagcactgaactccagcctgggtgacagagcgagactccatctcaaaaaaaaaaaaaaaaaattatctctgaaaccctacacttctggaaagactgatctggataacgactatggctcctacctgtgtcccccacctatgcttcaagaaaggcaaagtgcccgggtcctgggaatgaccttccttcaaaagcccacggccggatgaattctgggaggatgcagcatgggaagataacctcagtgtggaaattccctttgcctggaattctggcagaaagcacttcggagatagtctgagccacatcggagaggaggagctctcggaggctgagtcccatttgtgtgtgtccccacctttagccatggggcagtccctctgctgttccctcttccctgcctctctgcgtccccgtggatgggaagagctccagtctgtggtcgctggagtcctgctgagaggctgaacagggtagtcaccaaaaggcaggtggagacagacaacctgggattgagcctcatttcagctctgacacttggcagttgtgggatgttcggtgaaaaggggactttgcctctctgtgcctcagtttctccatctgtaaaatagggaccaaaaaaaggatctacctcactgggatgttgtaggtcatcgtctaaaccagtggctctcaaagcgtggtcccaggatctctagactcaaaactattttcatgataataccaggacactgtttacctttttaccgtcattttccttctggtagacagtggagttttctagcaggtacatagcatatctagttatctaaaaaggattaaaatactcttcccttttccatctgcatacccattttattttattttttagaaatagggtctcgcttgtcacccaggctgaagtgcagtggcacaatcacagctcattgcagcctcgaactcctgggtccaagtgatcctgccacctcagcctctcgagtagctgggaatacaggcacacaccaccacgactggctatatttatatatatttattttttagtttttgtagagatgaggtctcactttgtcacgcaggctggtctcaaactttttgcttcaagcaatcctcctgccttggcctcccgaagtgctgggattacagacgtgagccactgtccctggcctgcatgtctgtgtgaggctggatttttcatgttaaacaaccaaaacaatatatctcagcagattgaatgccaaaacagatttaagaatcctgctgccttccagtaaacaagacattgaagagattggcaaaaatgtaaaacaatgcaactcttctcattaattgtattttgtttgggaaaaatatagttatttatctttttttctccccaagacagagtcttgctctgtcactcaggctggagtgcagtggtgcaatctcagcttactgcaacctccacctcctgggttcaagcagttctcctgcctcagcctcccaagtagctgggattacaggcgcccgccaccacacccggctaatttttgtatttttagtagagacagggtttcaccacattggccaggctggtcctgaactcctgaccacataagtcatcacgcccagcctctatttatcattttttaaatgtatgctaacaagtagtgagtttattatttaaatgagtgaacaaatatgttttaaatttctcagttttcatctctaatataataactatcactagatataaccaacatacacaggactctgggttccttaataaattttgaccatattgaaaagcactgctgttgccttacactgaccttgagtgcttttttggttttataaagcacatccacaaatggaagtcatgtcccgtgtgggccaaatagatccaagttcagccagccaaacaccatacaagcaaataggaagacaagaatttaacaattctacccactcctccactcacagagggtgtgcaccggatgataaaaaaacaaatctacgttctcagccaggcgcagtggctcacgcctgtaatcccagcactttgggaggccaaggcgggtggatcacttgaggtcagctcaagaccagcctggccaacatggtgaaaccctgtctctactaacaatacaaaaattagccaggcatggtggcgaacacctgtaatcccagccagtcgggaggctgaggcaagagaatcactggaacccgggaggcagaggttgcagtgagccgagatcgtgccattgcgccccagcctgggtgacagtgtgggactccatctcaaaaaaaaaaaaaaaaatcgacattccctcactcagctgtgtctcccacaggcctcccattacgaggtgttcgttggttcagttgtttacccatttattccacaaacgttcatcgaggtctcgtcactgaccaagctctgttctagatgtgaggacacaggggacaagggactcagaaagccgctgccctcatggggctggtactctggtgggagaagcacgtgataaaaactagaagacagataaatatgaccagtgaataaatatgtggagaagcaatgtcgggggaaaggggagagcctgggcggtgtggggagatgccatttgaataggagggttaggattgagccccagtaagttaacatttgaggctggacatggtgactcacacctgtaatcccagaactgagagaggccaaggtgggcagatcgcttgagcccaggcattgagaccagcctgggcaacataatgaaaccctgtctctacaaaaaaaaaaaaaaaaaaatacaaaagttatctgggcatggtggcttgtgcctgtggtcccagctacttggaaggctgaggtgggaggatagcttgagcctggggaggttgagggtacagtgagccacgaccgcaccactgcactccagcctgggtgacagagtgcgaccctgtattggaaaaaaattaaaagctttgagcaaatagctgggaaaggtgaggaagcagcccatgcaggtatctgaggaaggtgatttctttcaggtaacagcaagggcaaaggccctggggcaggtatgagctttggggttggggtgctggtaggatagagggagaccccaggacaggaggctggggggaaagtgggggcagatgcagtcacggagcaggacaggagacagttataggactttgtagggcatggcaaggactttggattttagttgaggtggatgtggagccactgaagggctttgcacagagtggggggcttgatcaaatttgtgatttaatgggatccttctggctgctgtggaagatgggctgaaggtggaggcaggaggaccagggacgaggttccagcaaggtccaggcagaggcagtggtggcttggaccaagatggtgacaggcggatgatgggaagtggtcagacctggatgtgtcctgagggtgaagctgctgggacatatgtgagggaggacagaggagctgaagtcccctccatggtgcgtagccttgacccactggcattgacggatgtatggatcacagggcgaaaatcaagaggccggtgtgaagtgctgatttgacaccaaatgaagtgatttgaaggaaattactaagtatgcagcggtccaaatgatacataaaaacggccaaacgtgtgtgagaggcacgcggacaactggaattgagatgatgccacgaagggcaaagaccccgttttgttttcgcagactccgtgcctgcgaaatggcgcgggtctgttttgggaaggacggactttccacaggcttctgcttcatctttcgccgacctctctgaattgctttggcaaacactgtttattgtcattggctcggctccgcgctccagcccatctctgctgatagatgtgtgtcatgctcagccgacttcactgtgcggcatgaacactcctccccaagctcattactggagtctcggaggggccttgccattttccaaaacggtgtcacatctggtttctaacaaccatttttatttctccagaggtccaagttttcatccccctccctgaaaacggaaagcagactgtattttgggaactcacagttcttttttgtttctgtttttttgttttttattattttttttttttcagagacagaatctcactccgttgcccaggctggagtgcagtggcacaatcatggctcactgcagacctaaactcctgggctcaagtgatcctcctactttggcctcccaaagtgcttggattacaggcatgagccaccacgcctggccctttttcagagttctttatgcacaatctcatttgttgctgcccccatttttatagaagaattcactgaggctcagacaggagcactcgcttgcccaaggagtcagagtcctctgactctgcaaaccaagctctttaaagccacactgcaaccctgtcgttaatggtacatttggacaactttttaaactgtgcactttacacagagtttcacaacctcggcactggtgacactttggggctggatcattctttacggggggaggagggccatcccatgcactggaagatggtcagcagcatccctggcctctgcccgatagatgcctgtagcacattcccccaccccgccaggtcatagcagtgaaaaatgtctccacacactgcccagtgtcccctgcagggcaaaatcacccctggttcagtgtattctgcacacagatgtgcttcaggttggcagccctgcctgctccgttgacccatttttttcagcatgtagcactgtgctgcagacactataatagaaatcccttcctttctttttctccccccacccctgccccccagacagggtctggctctgttacccaggctggagtgcagtggcaggatcttggtccactgcagcctccgcctccacttcctgggctcaagcgattctcccaccccagcctcccaagtagctggaacgacaggcgtgcagcaccacacctggctaattttttggttttttggtagagacagggcttctccgtgttgcccaggctggcctcaaactcctgagctcaagcaatctgcccatcttggcctcccaaagtgctgggattacaggcgtgagccaccacaccaggcctagaatccctttcagtaagacatgcagttgccacctctcctgcactcctgggcgaggggtgtgacgcttaacattagagggcgctgccccaccttgcacagctgtgtacctcaatcaggtgcacctacccagccctcctgtcggccactgctcaccgtgtgcacactctgggccaggtactgcgctggggctacagtgcagcacggctcctgccttacggaccccacaccctagttggggaaatgaggataaacaagaaaacaaatgcatctataggataatttcagagagtgcagagtgctgtagaggaaataaacagcccggtgactatagagggatgggtgaccagggacaacttctcatctgacctgaggtgccacggtgaggaggaggcaggcgtcccaggcagaaggaagagcaggtgccaatgctcggtggggtagagagcttggctcctagggagcgtgagacctagagaagttgaaacagagtgagctcagcagtgcgtccctgaagggagacggcctgatggctcttggactcagaagggccctctggccatttggggaagtctgggctctgggaaggctgcggaggcagaagtccagttggaagttggctgtgagaaggaaacaggtgaagaagcaagatgcatttctgtcttttttgggattttatatcctgtgtatatgtgtatgttgtgtattcgtgtatgtgtgtatatgtgcttttactgtattttcctgcatcgtgtatatgtacatatgtacctgtatattcatgcattgtgtatatgtgaatgttgtatatctatgcatgtgcgtatgtgtgccatatattaatgcatatgtgtatttttatatgtcatgtattcactcgtgtgtatatgtgtgttgtatattcatgtatgtatatgtagtgtatttgtgcttgtgtatatgtattcatgcatgtgtgtatatgtatgtgttgtatatttatgcaggtgcgtagatgtgtttgtgtgctggttccaaaatatgaggacaaattgccaaatcaaagtgaataaatatttaatgaaatggtgttgcatgattcagcgagtcagctctggaacatttggactcttagagagctgtttgtcgattacctttaatgtagtgtgtgggtggaaatggtgtgggatgaacatgtaccgaaagttgctgatgtccttaaagaagccctgttggtatttccagccagatggcccgtcgtgggggagagaaagtcctccgaaagcagcgggtgctttctgtcctgctggctgcctcttgggaggcccctaggacagatcaggtcctgtttcacccttcgcatgcctgtcagttcatccacgtgcatagcagtgggtgggggtgcactgtcgtttcattgccaacaaccacaggggacaaagtcctttgtggtcccacagctaggaggtggcagatccaggattcaaacccagacagtctgactgcagagacgctttgggcactctgccacattaccacctgtgttactgggaaaagggagaactgatgctgggaggaacagcgtgttcctacgccggcccggcatggcggggacatgtctgcagcagggagaggtggccgaggttcccagtggtttctggttgcaggagccctctgtctcccccattgtccgtggcttgcttagtatccccagtgatgccgtgtgtgcccctgtgccaggtttttcaccagctaatctcagtccctggtcgccacgagacacagctttcacagaccacaaatgcaattattacaaggcaatttcagttagatttggggctgggagagaaaacagaagggtctcctcctcccatcaggctccgaatcgttccccaggagcacttaactcagacaaatggggaagcagccgcgtggagcctccaccgtagagctgcctgcaggggaagtggccgacctgctgggccacgaagcagggtgcaggaaggatatggggagctagtgatcctctccaagggggcagggggactccattaaaccagatgttaacagcaagaagttggctataacaggggacgggcccattggtggataatgaaaatataacccttagtaggcacttgctatgtgccagttccaagcaatgtacagtcgtgtgtcacgtaacaatggggatacatgctgagaaacgtgtcgttaggtgattctgtcattgtgcgaacatcatggagtgcattacacgcctggatggcatagcctactacacacctaggctctgtggcgtgacctattactcctaggctacaaacccccctacagcatgtgaccatactgaatcctgtaggcggtggtaacacaatgggaagtatttgtgtatctaaacatacgtgaacatgttaatagagtacagtaaaaatatggtgggcatggtggctcatgcgtgtattcccagcaccttgggaggccaaggcgggaggatcacttgagcccaggagttccagaccagcgtgagcaacatagtgacaccccatctctactaaaaattaaaacattaggctgggcacggtggctcacgcctgtaattctggcactttgggaggctgaggcgggcagatcacctcaggtcaggagttcaaggccagcctggccaacatggtgaaacctggtctctactaaaaattaaaaaattagctgggcgtggtgttggacacctgtagtcccagctactcgagaggctgaggcgggagaatcgcttgaactcaggaggcagaggttgcagtgagctgagatcatgccactgcactccagcctgggagacagagtgagactccatctcaaaaaaaaaaaaaaaaagtggtttcaggtaagagtggatccccagggcctcaaaccagcatctctctatctctctatctcttgtatctctctatctcttctgtctctctgtctctatctttcccacctccgcatttttccatattgctttacacacacacacacagactcttccctcttggtggcaagatggctgccagcagcttcagttatgtatcccaccagttccaagccttgaggaagaagaccttctcttttctagtagctccctaaaaatcccagggctgactcgctgcagttggcccagcttgggtcacatgcctttgcctcaactaaccagtttgtgcatgatcaccaggggaatgcggtcctcatgggagtcaaggatttgcacacattcctggagtcaacagtcaaggtcagcccgtgcaacttaaataaggaagtgttggtgcccaaaggatgacagagccaggcaggtgaagcttccacctagtgctgggcacacaggaggcagtaagtgctctggcctttcagcagatgccagccctgctgcccaggggcagtcgccagccagctcattgtcaatggcctttcctggcctgccattaattcctcttaatctgcctgccaaattttcccacccccacgccagcccccagcttgcccctcctcttgtgctgtccttgcctcgaaagctcagcgaatccaagcttcccaggcaccagccacctgccacaatttgggctgggcttttaatcttggttttaattccagctcattctcttggctgtatctcccagcccaggagccccggggcccatgctaatttgcttctcccacctccactggtgccggaataaccatttttaaaagtgccttggggaaatataatcaaatgagagcaaaatctaatttggcactaaaagcctctgactgaagccctgttttctagggcctggtggagactgaataatacaccctttttgggtttttaagggttgggggttggagaaaggaaagagacgtgaaaggggagatgctagcagaggaaacagcttgcattaagctgacatccgtggcactgaaaagaatgggcaggaggaggacccccacccactccctatgaagaaattcatatcccagcagccaagccaagaagctaaactccagcattcatcagaaagaccttggcccaagtcttcaagaaccagtaggttcactggctggagatttggaagatgtgggagtgtagcgggaaacccagttccccagtggggagttcagtgaagcctttttctctgactttcagttcacttttctgcaaactgagggggtgaaaatctgtgcttcttaaatgacttgtgatctgggctcctttcagaatgtgtcaaaagctgtggacttgtttccaggaaaatgcacaaaaggcaaaatctggcatgcaatgttccaggagcggtacgaaccctgccactcctcatgacagtctccaggaccctatgggatctgtcccctcttccccgtgatgtcatttcctccctccctcactgtcccccttgggttctgcgatgcccccacgtttgtactggcttcagggactttgtacctgccaattccctctgcctggaacagttttcctcctatcccctctgactcttgctcttcagcccagcgaggcctctcacagcactgcgtggggccactctgtcctatcattctcctttattttcttcatcgcatttgtcatcattccccactagaacatcaactgcacgagggcagaagggatcctggtggtcttgttcactcctgtgattccagtgcctgggaagctccctgcataccgtaggtgtttaatcaacacttgccgaatggatacaggcatgcataccttccctagggcagtgggaccccaaattcagcaatttcgagtgccaccatcatgaggtgtaccatgcccaggtacactgattctgttaacattttaccctagattgtttcactctggacttcagttgtttcaaaaggaatcttttacatcactgacagtattgtttgccacgagtagaaagtgtcggggctctgtaggggtgtaacaaaaacgcaggtaataagagcgagatctggtataaagaaagtgattttttattccaaagctagcttaggggaagaagtacagtcttcctgccttaagggtactgctttgcttttaggagcagaaaggagttgctttttaaaagggggcctggcatgaatggcacacaggggaggaattgagtgctgggggggtccgcatatctcactcgagtacttcatctaccgggaagtcagctggcagccactggtgcctttgtgggtggaactaggttgtaagggtggccagaagctctccacctgggagggagtttcgcagcaggcatactttgggttgtagtggaccattgtctctcgaggcaacctcccagtgagtgagagttccgctccagagcctctaagcacgtgattagatgaacttgccctgaagagagtgtctggtgtaggggagataaaaggttataattgcatttctaaagggcgaagtggggcacggggaaaatggagaaaaaagaagaataaaaaataataaaactgccggacagggtggctcacacctgtaatcccagcactttgggaggctgagatgggtggatcacctgaggtcaggagttaaagaccaccttggccaacatggtgaaaccctatctctactaaaaatacaaaaattagccaggtgtggtggccatgcctgtaatcccagctactcaggaggctgaggcacaagaattacttgaacctgggaggcagaggttgcagtgagctgagattacaccactgccctccagactgggtgacaagagcaagactccatctcaaaaaataataataataataataaaactcatctttttcttagaaaaaatgggaataccgatttatgtgggggcttattaaattttaccctcttccttgttgaggtcctgagccgattaagaaatcagacccaagagtcagctgatgaaagtcaacactgcactctgatgaatctggtgaaggctgggtttgagggcatggcttccttctgagagcatttgggcttcctgactaaactccagagtgtgacagacttcccactgatgcaggtccacacctctcctccccgcgcagacaggacaagcctcctgaaaactagccctccccgggggcagctcagtccccagaggaaaagcaagggaagggattgggctatgcatgcccacttcggcccttcaaatccactaggcacatgctaggggtcagcaaaccacagccaatggacctaaccaggccctccatttgttttagtaaataaagttttattggaacata

SEQ ID NO: 15835 - DNA, 129211 bp, Homo sapiens
gggccatttctggacaacagctgctattttcacttgagccgaagttaatttctcggggagttctcgggcgcgcacaggcagctcggtttgccctgcgattgagctgcgggtcgcggccggcgccggcctctccaatggcaaatgtgtgtggctggaggcgagcgcgaggctttcggcaaaggcagtcgagtgtttgcagaccggggcgagtcctgtgaaagcagataaaagaaaacatttattaacgtgtcattacgaggggagcgcccggccggggctgtcgcactccccgcggaacatttggctccctccagctccgagagaggagaagaagaaagcggaaaagaggcagattcacgtcgtttccagccaagtggacctgatcgatggccctcctgaatttatcacgatatttgatttattagcgatgccccctggtttgtgtgttacgcacacacacgtgcacacaaggctctggctcgcttccctccctcgtttccagctcctgggcgaatcccacatctgtttcaactctccgccgagggcgagcaggagcgagagtgtgtcgagtgagtgtgcgtctgtgtgtcccggcgagggtgcgcgctcggcgccgggagcgcggccagccgagtccggaggcatcgggaggtcgagagccgccgggaccccagctctgcgttcactgccccgtccggagctggacttcggggccggggccggggccgtgcgccggggacaggcagggccgggtcgcgggccgcgcgtcccccaggccggaggtaaaagcgctagcgcgcggagggctcgaggagggcaccgcggctgggccccccgcgccccgggccccagccgtccgcggctcccggcccgacgctccccgccccggagcgcgcccgcctcccctgcgtggaggccggcgggcaggcgagcggggggcggtagcgccgtgccaaggggctggctggggcagcgtggccggccgggctggggcgatttaagagcggtccgggcggggtgcggagccggactttggctggggcggcgcgcggggagggggccgggggcggtggcggcggcgttggggggcggggaggaggcaggaggaggagcagcagcgctcgccgggggatgcagcagcggcagcggcggcggcggcggcggcagcggcagcggcggcgcggagtcccctgcgcccagcggcccggccgggctgcggcagaggcggcggcggcgccccgctccgggtgaggttgccggggccgtgcgcgctggtgagtggggcgtggggggcaggtgggtggctgggggacgcggggctcgggcgggggctcgcggcggccggagccttccccggcgtgagcccggccgcgagcgccgcccaggtgagccggggctggtccggaccgcccggctccagccccagcgctgcttgcggaggtgggtccgggcgggcgggagggaggctccggcgccggccgtccgcagagggatgacctgtttgaccccgctggctggcgggcgggcgaggacttcccgccgcgcccctgacccgcggacacggcacaccgagcacaggcggccccgggtaggggagcgcgcctgggccggccatccgcaggggcatggccttgttgacccttagggtttagacccaagggaccggtagatgccagcccacgtggggcttgtccgggcaggactcggggaagcagtgggccggatcttcagagtggttggaaactcgcagacaccgaaaggacaaacaggatcgaaaaggcagacttcctcccaggccagggcagaacgagtttccatcgcctggcggagggatgctcccctccccggctcctcggggtttcagaagtctagcggtgaattctaggagtgcacttttccaaacattccttatagtagttcgttcattcgttctacaagcatttctggagcaccccctcgtgccgggcaccgcgttctgttccagggaaacgcggctgaacaggatctggctcctgcgcgccagaagctgccggttcactgggagggcagcagggtagagagatgccgtctcggggtggaagatggaaagggaagcctgcaatcctagtttgcacactggcctcggtccgcaactcccccacctgcacgcagtaggcccagcacacagtaggaagagcaagccagacctgcctgtgacgaccctctcctcctcctcctcccccttgaaagctttgattcattccctgcccccctttctggaaagtcttcctgcagcttgttttaatcactttttgagttaaaagtcaatatttaattaaccaagtaattacattcagcttacgtttcaatctgggtatttgctcatctgtgcgtgttgggacacccgccctctcgcccctccatctgtcccctgcctgtttcccaccgggtccacccccacttttggggcagagaaggggaggctgcgctggagcaggttctcagggggagacagggagcaggagagacgggctttctctggaggacacccccggatctgcgcgctctccaaatttcagcttgtagtgaatagtgaaggtgatttcttgacagcctctgcctcccattacagaaccaccagagggttctaattaaattagagccaatcgttaagtataggaacggggtagggaggacagaacgaagggggccccttccctgtaagagatgttctccccagcttcgtctctcccacatcatagagaagagaaaactcatccagacagcctgtcggatgtgtaatttagcgttctaataagcagcttgaaaggcgaaggtggtgggcttggcagatggcatgttggacctttgtacatgaaggcctcttccttccccagctaaatttatatacataaaggccgtgatgttggcatcactgctgcagctgagggtcaatgtgggtttggggtttgggctttgtgtgtacttcttgggttttttatttgaatttatggctttttctgaaaccctaataacatgttaaattttcaaacttgagagtagagtgatgagttgactgtaaaagtctggtcttggaggaggacagcatagcagtgtgtgtgcatgcacgtgcatgtcccccagttcagctgctgtccaaagaacccagttgatatgcagtttcacacctgatttggacctgatttgggagataacatttccttctcactttttctggcactggttagtttatctgcttggacctgcctcaagagggcagctgggttaaccaggcagaatatcacccaactctgtcaagctttggccattatctgaccttagactttagtcctgcagaaggagtccagaagccctgtcctacagaaaaatatcagcatttctgaccagcttgtagttaaaagaaaaggtttagtccagacttaagataattggtaacacttaagtagttttgtatgggcctgatctgaggcattgatctaagcccttataccttactcattaaatccacacaaataccctgttaagtaagtactgccattgttgccatattaaagatgaggaaacaggcacagagaggattgtgacttgcctacagctggtcacaggtagagctgggattcaagaggccctcaagctccggggtccacttggaaccactggactctcctccatgaccttggcctttgtcccagatgtagaagaaacacatatgcaggggaagaaaacaccttcagacagtcaaactttgcaaagtaaaaggcccttaactttccataaacccccactgttccgacagagagtccgggtttgtatttgaggttttttgccccaaggaaaacatgtgtctgcctggtgctttttcttctgcttatgagcagacacactgtcccctcccccagtcaaaatgcaaagggaaacatcaaatgcagctgatggaaaagccaggtgaaccatggtgaagatttcagcccactcagagcacagtggccagagagcaaaagctctcctagaggtgagaccttcctgtggttggtgatggagtctcgatggcctggccctgggggtggtgccagggtgctctgtgtcaggcctgggcggatgtggaagatgggggcctctctcaatgctgatctgcaggtgagggggccctccctgaaacctgctttctctgggcctccttggaatgggccttggtggagatctacagacagccctggcccagccggattgaaggcactgtctaattgggagggcattaagatcgttataattaattggcatcccgataaatggcatggttgcctaattggggtggttgctagggaacgaggcctcacttggagcctaaaggggaagaagcgctgggctggccacagttgggtgtcagggtacagatccagcagtgaatggaccggaagggagagcagtccatccgtatctgctggtgtttactgagcagctgctgtgtgcaagttgcaaatggagtatcagttaggggtacttgcctagaagaactgtaaagtaatcaggttcctttctcttgcaagcaacggaaaaagagaagaaaaaaactcaagccagcttaaggagaaaagaagtggacttactggttttcataaccaaaagtcttaaggtgactaactctagcttcagacacagctggacccacagctcagattttgtaatgagaatccattcctatccaccgctcctctgccttccatgaggctgatgtctctccagctctggggcgggcagtccctggcagctgtgggcaccgtggctaggagagccagactgcctggctccctgcccagcagtgggatctggggcatgctacttaacctttctgtgccttgatgttcacatccaacaaatgatgatgatcatagcacctgtctcctgcttgtggtaagcatgaaatgagatgatcaatgtcaagtgcttagcagggcgtctgacccaggtgagccttcagtaggcattgactgttaccataacttaggtgtcaggacagatgtcatggagcagaggggtctcatcccctctggtttaagcccaaaaggaaagaacaagcctctgatctggcaatgcacacctgagccccatggttccctctgattggactgttttttgtccaaaccagtcactggctaaggaaatgagttgccaacaattggcttaagccaggctcacaggcctctccctggagctggatggaggctgactgctgagaccccaaagcctggaataaaacagcacggggagtccccagtgaaagggaagcccggttgctggagaggcagatggccagtgcctgcgatgatgggccactaatgtgagcaatgctggccagatggacccatcttcattttggccaaggtggagactggggaaacacgctgcctgggcaatgcctctcccttccaccagggccaggaggcatcaaaggcctgacttttctgccttactgtctgaaggatggggcctggccttgatcctgtgctttcggggggccaggggcagtgtttgtctaacctcccaccatgagaatcatctggctgtatttgtttaaaaaggcaaagaccagatcctgttgaatcaaacttctagggagggtcctggatgctggggggcatgaccaatatgtcatgtgtatattctatatcagcaggagggtttggcgaagagagctctggagcgtgggcctctttgtcttcctgcctaatgcaggggctgtcagaaggcggggaaaatgctctaggcctggcgtgctggctcatgcctataatcccagcactttgagaggccgaggtgggaggatcccttgaggtcaggagtttgagaccagcctggccaacatggcaaaaccctctctctactaaaaatacaaaaattagccaggtgtgatggtgcttgcctgtaattccagctacacaggaggctgaggcaccagaatcgcttgaacccaggagtcggaggttgcagtgagctgagatcgcactactgcactccagcctgggcaacaaagtgagactcagtctcaaaaaaaaatttaaaagaaaaatgactgcatgatgtgatggggtgggaggcaactttaggcaggctgtcagggaggcctctgtgaggatgtgacctttgaactgtgacctagattttaggaaggagtccgccttggaaagatctgggggaagagcatgccaggtagaaggaacagctagtgcaaaggcccagaggcggtgggaggggcctgtccaagacacctgccccaaacacaaatagaagtcaagtggggtaggccaggcgtggtggctcacgcctgaaatctcagcactttgggaggctgaggcagttagatcactggaggtcaggagttcaagaccagcctgaccaacacggtgaaacctcatctctgctaaaaatacaaacattagccaggtgtggtggcacgtgcctgtagtcccagctatttgggaggctgagacaggagaatcacttgaacccgggaggcaggggttgctgtgagccgggatcacacttctgcattccagcctgggcaacagagtcagactctgtctcaaaaaaaaaaaaaaaaaaagtcaactagggtagagggtcaggagtaagtgggggagggcacgtcagagatgagaaatacaggccatgctaagaaattttagactttattttaaataaaatggataactgtctggacgcggtggcttatgcctgtaatcgcaacactttgggaggccaaggcgggtggatcacctgaggtcaggagttcaagactagcctggccaacatggtgaaaccccatctctactaaaaatacaaaaattagccaggcacggtggcgcacacctgtaatcccagttactcgggaggctgcagcaggagaatcgtttgaacccaggaggtggaggttgcagtgagctgagattgtgccattgcactctagcctgagtgacagagcaagactccatctcaaaaataaattaaaaaataaaatggagaaccattggagggttttaagtcagagaatgatatgatttgtgtttcaagaagatcctgctggctcctgtgagaggcgtgctgtgcagatggaagtggtatcaccgggactgttaggcaacagagagggcccgagagtggcttggaccgtggtggtatcaatggagatggagtgaaatggggattggagatgtattttggaggtagggcccacaggacttcctagtggattggattacagagtgagggaaagggctttgattctcaaccgagggtgattttgacacccagaaaacattttaacactatccggagacagtataggttgtcccaactggggaagggttgctactggcatctagagggtagaggccagggatgctgcttaacctgcaatgtacgggatgaccccacagtgaaaaatgattcagcccaaatattcatgatgtatcctgccaaggagtcaaaggtgactaggcagcctggtgcgtggtgattgctaaatagggaagataggagagaaggttttggggaggaggagtgatctggaattccgacgtggaaatgttgggtttgagatgaaccccacctggatgtctgaaagctcagtgggtggtgaacgtggatgtctgcagccggtcggggctggcaacctaagtttgggagttatcggcatattgatgttattttaagctgtgggactggacacaattatccagagagaatgtgttttgttttctagtgtggttttctccccccagcctccccctagtgcctgtcatgaatctatttgatgaatatttttagcatatcccacatgctcacctctctgacatttccaagaagttcctgaaggctcgggctgagcctccccttcttcatcgcctggtttctcagtgattaacagacagagctaaatattcattgctctgccacagatgcccttgggaaattgcttaaggtcatgtgggatctcgggccttgtaggcagcacgatgccttctgggtggaacagctgttggcatggccttcagagcttctcctccagcccaggccagggcttcttggaattctctgtaaccagaatgttttgaattccccacgttctcttaatgtgattccaaagcacacgttgcccagtggccctggcctctgccatggagcgtcatcttacagaaggcctggcccactgctctgcacacctgggcccagcttgaatcttagataaattctatcccaaactcagagttgttatggccaggtcttgtgtgtgtaagttggtggacagggccatccccagggaccacaaatagtaccaaagatgtgtttggccatgtggaagccagatgtgttaggggaagaatgtggccaatagcttttcttattggctcatggtcaggaccccagcgggtgacttgacccaccccagtagccagagaagaggagcttttttgtttttgagacagggtcttgcactgtcatccaggctggagtgcagtggcacagtctcagttcactaccacctcaacctcccaagctcaagtgattctcccacctcagcctcccaagtaggtgggactataggcacaggccaccatacccagctaattttttttttttttttttggtagagatgagatcttgctatgttgcccaagctggtctcaaactcctgggctcaagtgaccctccaaaagtgctgggattacaggcgtgagccaccctgcctggcctggaactttttgaaaagagattgaaaaaactgttagctcacagaagccttggagatgttcctgcttggtgaaaatcagaccatctgaaagccacatttctggtctgctctcgagacagatactatccatagacttctgattgcaggccacttatctggatatttcagagaccaggaaagcctactataattcttagtagcttagagtcctgatcattttaatgtgaattgaaatggtttcattatgaggaatcacatttctgactgacagtggcttatgcaatagaaacatttaattctcacataacaccaagtccaaagcaggggagtccaggcgctggtttttcagtacaacagtgtcatccaaggtcccaggatctttcaagcctcttcttctgtcctcatcatgtctttggccttgttgcctcatagtctcaatatggctgccacagctccagacgtcgcatcaccctacaaagtgggactataggacaggactccttgctgtctctcttttaatcagagagtaaaatccttgccagaacactcccaccctagcagactttgctttctgtttcattggtccggagttgggttttgcactcacctctaaatcaaacactgggaaaggacctggctccttcctatgcttcggatctcagctgaaatgtcacctccctagaatgctggaaggacaacctgttttatgttttataacacttatcactctctggaattagcctggtttgcttatttgtcctttgtcttctctctcctcactaaaaagcaagctctgtgcttgtagggacattgtctgtcttgttcatcgctgtatccccagcactgagaaccagggtggcactctttggatactcagtaaatttttttttgaatgaaggaagcaagaaaagaaagaggcttggagagctacaggcacatctggctagcatgtttgctcgaaggtgactgctcagggcaaggatgtcaaaacctgttagtcatttgcaaaaagctaagcaggtggctgggaggattggtttcatacacactcacttgctccccagtgccagagctggggttttgtgctagcattgcttgcagaggaaggatcgtcccctttatgccacggcagggacctcacggccttgcagaagggctggtggaaccctccacttctgatgactctggggccaagctagtcttccaggtcagtggtgtgacattctaatgagggctcttgggttaaatatttctgcatgtgcccttgaaaagacaactcccttccctaaattgtcccttcctgaaagaacagcggtcacagcccaggagagcagcctctttaacctccactccccaacctaccctcctgaaagctcacatttaccgagcactttgtacaggctagtggtggtttaagtgcgcgctcctgtgaatgtggaataactcagcgatgtggggatcttccaaccccgttttacaaaggaggaaagagacacaacgaagtctctccttgctctgccatgctggtagaataggacatcacaggccacctaaccaggggctctgttcagctcgcagaaatgttttgtttgaaccttctaaaaagctgtcagatttgtaacaactacgagatttcacattttaaaaatctggattttcagcttctcctgaaaaatggggagatgtggtccccaccatcccctatagcctgacattgtgaaccaattcatttggcttttcattgcactttcccttctgtttttctcattgtggagcaatatttctctgttccatctctaccaaaagtggccagatgagagctggagaggaagtggggtgtggagttttcttatgcgtccacttcacccgtttacattatctgcctggcccacgtaggcatttgagtttgtctcccgttgtgacactttgtacccaatggctacacttccagggacattgcaagtgtccctggacacttacattgtgcattgcaagtgtgtagtaataataatgtctaatatctattgattactttttgcccagcatttcatcatcacagcaagcctttgaagcagggactaatatcatcttcactttatcagtaaggaaactgaggcactgtgtgtgatgccctcactagaacaggaggtcctgaagcttgttcatctttgtaccatctgtgctaggcttactggctgtttgaatgaatgactaaaggaatgaatgaatgatgttctcctccaagtgttcattagccgaagaggctgaaagtcttaacctcatagtcatttgtgacatttctgttgggggaatgggctctgatcagtgtcactgaggattcttgggttgtgtttctgctgtataacaaaccactccaaactcagtggtttaaggtaacaacattttattttggacgattctgtggtttgaccaggtggttcttcagcttcatgtgatatcagctggcaggtctaaaacaaccccattcaaatggctggcagctcttgctggtcaccagatgggagctcagttattctccatgtgggctctgccctatggctacttgggcttcctcgcagtatggcaggttcagggtagcctgacttctaagagtgcaaaaatgaaagctgccacggtctcttaaggcttaaccgcaaaaccggcacagcatcacttctgccaccttctcttggtcaaaacaggtcccaaagccagcccggtttcatgaggtggggcccacacaagggtttgaataccaggcagtgtggctttttggagtccaccaaagtacccattcatcacagactgcaagtagcagagcccaacacttactacctcaagctggaacaggatttactggggggctcaggaaaggacaggtcaggaactgaggaaattctggggaccttggcgcaggagttactagcagcctcctgaaggagagtttccatcccaatgcgacaaatgcacccctgctttttctttctgcccttgacactttatttgacagttggggacatggtaagaaagtctgattgaccttggtcacatgatcaccccttggcagagaggatgggggcatcttggcagaggggagggagtcctcaaaaggaagctggggtgctgtcaaaagaaggggaccagatggacaaaaattgttagaaatctctgcaccgcccctgcataggtgactccacccctggcagagcaatgaacattttaaaacgagtgaatggactttgaaagtccagtataagtagaatgcccaaacctgtgtggcagcttctccagctccagggccccatagctcaggtgctgctgggggtctggaagcttctctccactttacggggcaaagtcaactcctagaacccctgccatgcctcaatatccccctccagaagataggggcagtttgcttctggctcctgaaaggagagcatgcgcggtaatgagggacctgggctcaatgcctgcactccctcctcccagaccccgcctcaccagtgacactgccttccaccccaacacctggtgacacccagtgagtccccgcagcaggggaggctgctagtaggaaaaactgatccagactaatctcagctcgcagagcctctgacccgggctttcctcccacttgccggtctatttccggctgctaattagattgcacagcaagccacattgggaagccgacctgtcgttccaaaggcactccactcgcatctccaaatgtagcaggtgatttggtaaaagttgattctgactccttcccccagcttctaaaataattgtaagtgtcgggctgtttccaaggtgaactaatgaacagctcatctgctaatagcaggggcaagctggctgaggacggcacgctcgcctgtggattgggtgaaaaggaaagaagtaattggattattaataccaagccgtcaaaataccttttattccttttatattcttctggaaggaaacgacaatctctggaaacataaatacatgttctgtgggggtaagcagggctaagaaaatgtggggctgaaaaggaggagggggttaaaaaggtggaattgtcagtccccactgtggcagtctacactgagaaccagcccacagttaggcgtgaataatgactctgttcaagtcggactttattgcttttggccaaaggccttttgcagaaataactttgtaactccctgccagggaagcttttgtccacagctgagacaaaggaacaaagaacagaggtgggaatttctgtatctgatttctacttcctctaaacagccagaaaggacagcgggtgtggcctgcccagaaggcatgggctggggcaaaggggtgtccagcctcctgtgggccacactgccgtgctcggctgcaccatgttggtttcattgtgcacattcccaccccagggcctttgcacttacttcctccgttcatagaaagcattttgcccacaactggcttctcgcccgcctctgctctcagctcagatgccatttccttatgccacctcctcatgccagagaggcctttcccaatttactgtccatcctatcacctgacagcttcctccaaagctcttaagacaatcttcattcattcattttctcctccaccaaggtatcacagctccatgaggacagaggcctggcctgccttgtggccactgctgtttcttagcatgtggcacatagtaggtgctcaggaaagattggatagcttggaagagtcgcacatagctcccaggccaagctccagcggggctttatggagcccgctcagtgcttaaaataggttgaaagtttttactttggaaatggtgtttccggtgtagtccaggcgccaccccatctctatcctaaatctaggccactttactcactcaggtctcctgcccgacccttggatgcatttgcatatttgtccctgctttagacaaaggccactgcaaacatatctctctccaaaggtcaccagacaacatccagacttcttgcattgccaagtcttgtgccagaccggtggcctccaccaaccaggtcccattgactggatcaaggtgtagtcttcatcttagccgtccacgcacagggcgtaagtggcgttgatctcatcataagcaggtcatggcaggaggagggtcgggcaggagacctgagtgagtgaagtggcctagattcaggataagagacggggtagggcctggactacattggaaatgccatttccaacgtaaaaacctttaacttttcctttttccccttttccttttctgctctcctccaagcctctgggtcatcaaggagggaatcgcgtgaactcctcctttatggtcttcaaggagacctactcccaatgtaaggggaagcgcagaggccttggcaagcaagaatgtaaccacaatgtcattgcctttatactgttgccatctaagtatggcaggggttctcacctaggggcagttttgccccctagggggacatttggcagtgtctggagatatttttgattgtcacaactggggtaggtgctacttgcatctcatggacagaggcctgtgaacaccctgtgatacacagcacagtcccccatcgaagaatgatcctgcccacgcggcagtaatgccaaggttgagagacccaggtttatggcaatgggtgctggttcctccaagatagacttttctttctaaataaatttattgaaataagaaagggaatgaatgaatgaatttaggcccagatttgggtattctacttataccagacttttaaaaattcatttatttattctgagacgctggcatatgggatggagcacagaggttaacgatcagccctgtcatccctttcggagcagatcaggctgtaccatttgcctcaaatcaggagcccctgccctggaagctgccatcttgccagaaacttcctggggagctgcctgtaaaaaactctagcagcagttgattctggcccaggtggaaaagctgtgttatcccaggcggagttccggcaggttgggagatgtttccaggtctcctgcccagccaggcatgatgagcatccttccaagcttggccccggagccctggcccagcacccccatttgaagcctgcagagcctcatcatcactgcccccgcccccgccccatcctgccactgacaagccaatacctgcctgatgagaggggctcccagggacagcagccttccctcctggactccagggcaacctccatgttgttgggcggctttgagcacagggctcaagggcagaggctgagttggaaaatttcttgcctctgcagaagggaagagctgggggaggttggggcctttttccccaaacgaggtcttattcttctgtggggttttctgggtttgttaggtggcttcctttctacttaaaaataagctgggagtggttaaaaaatgggaagaaatcaatgtttctggcgtacatagaactgagcagatgtgttatctagaataaggaggagaggttgttgtgactctagctcctggtacgagcccttcagttcaccctcctgccctgctcagaaccccctggacctgacatcgtggctttaacacccttgggtcatgtgagaaggaagagtgcccacccaggactttccgaggctcacagattctttgaaatggacgtgagcacaaacgcccagccccgacagccagggatcagatcgggtttcacttcctaggagggaggatgtactgcaggggaggcccacgtggctgccccaggcctggccagcctctgtgacccagcaggactgactgttttacgggatggccacacggtaccctgcaggctcatccatggtgggaccttgatgctcctttgttgagatgtgggtctgtgtcccctccccttgaatctggccagacgtgcgtagccctggtggaaggaacaccatgggacagcagaaaagatgagccagctccccctggatcactgggaccctcgctgttgtgtaagaaatcagaccccactgcaaggccgccatgctgtgaggaagcccaagccacactgaggccacatggaggtgcccactccgcagcccctcccaagctcccaaccgactgccagcaacaactgccagacaagccaaggccctgctgagccttctcagcagtggcctcagacgttacaaagcagagaccagcccttcctgccatgtcctgcgcaagttcctgatcaggagcctctgagaataaaagaaagattttaattcaccactaagttttgcggtaaattgttacacagtattagtaactggagcattcagccaattccagtcttcccaccgtgcagttattcattcattcactgaacaatattcagaaaccgtccacctcttgccccttctttgctcccacctagtcatctcagtggcctccctgtgcctaccctcatgccctgcagtctgttcccctcacatagtcagaaggattctgttaaaacttacatcagggctgggcatggtggctcatgcttgtaatcccagctctttgggaggctgaggtgagaggattgtttgagtccaggagttcaacaccagcctgggcaacatagcaagacctcatctctaccaaaaatttaaaaagtaatcgggcatggttgtcctcacctgcagtcccagctgcttgggaggctgaggtgggaggattgcctgagcctgggaaatggaggttgcagtgagctatgttcgtgccgctgcactccagcctgggcgacagagcaggactctgtctcaaaaaaaaaaaaaaaaaaaaaaaaactacaccagatcacatcacccgcaagctagaaccccccagcccccttcactcagctccgtgccgccatgcgtgccccctttccggccctccctcaggcatcttcctacctcaggacagttgcgctttctgttccctgtgcctaggatgctcttcccctaaatatccacaaggcatgttccctcccctcctgcagggatccacccaactgtcatctctcaggccttcgctacccaacctatttaaagttacaccccctcactccctagcactccaacctccctccttaggacttgatctccttgggacacgttgcctcatatgttgtgtaatttattttggtgtctgatccatgaaggattgtttttcctgattcccagcactgaagaatagggccgggaacatagtaggtgctcaggaaatctcggctgcctatctggaagaattagcacctcggctctgccaggagctggggccgtggcgtcaggcaaccaagagacagcccctgcccatgcgagcttctggtggagggatgcccctctacaaaataaaaacccaggccaggtgcagcggttcacgcctgtaatcccagcacattgggaggccaaggtgggcagatcacttgaggtcaggagtttgagaccagcctggccaacatggtgaaaccctgtctctactaaaaaaaaaaaaaaaaaatacaaaaattaggcaggtgtggccgggcgcggtggctcacgcctgtagtcccagcactttgggaagccgaggcgggtggatcacaaggtcaggaaattgagaccattctggctaacacagtgaaagcccgtctctactaaaaatacaaaaaaattagcgggcgtggtggtgggcacctgtagttccagctactcaggaggcggaggcaggagaatcacttgaacccaggaggtggaggtatgcagtgagctgagatcacgctactgcactccagcctgggcgacagagtgaaactccgtctcaaaaaaaaaatgaggcaggcatggtggcgggtgcctgtaatcccagctactcaggaggctgaggcaggagaatcacttgaacctgggaggtggaggttgcagtgagccaaggtcatgccactgtactccagcctggatgtcagaggagactccatctcaaaaaaaaaaaaaaaaacacgcacacaaacacaaactcaggccagagagtaaatagaggaatcacaagttatgataagtgctctgaagagagcagtgctgggactgggggtgggggtgaccgagcagggcctgcttcagggacagagggccagggaaggcccaagtcacagccagggtggccgagtcaggtccagaatttgtgattcccacacccacgttccttccgcttttccacactaccttctcttatcagttgtcaaagaaggatgggcgagttggccctcagtaaggcggagagttgggcacaggccaaggaggcctagcgtgggctggtaggccgtgccctgaggcctctgttcacacaggcacgaggtggccaggaagccacgggagtcagccctctgcctccagcccgccccccaatttgggttcatttggttgcaagtgagagagcaactaggaatgacctaattgaaaaaagggaatttcacttctgatcttgaagagtcaaaagtatggggaaactgacctacaaagaaaacagaaactagttaaagaggaatttattgggcctgaaacaaagaacccaacccaaatcttcctctttcaggctgggctggatcccaggtgtccagtgctgttaagtcccaagtatggtgcatttcacagcactgctgtgttcggtgtgttggcttcattcccgaccccactcaagacaaagtggcgtcgctgtcttccctggtcctcacattggaaccacatggagtgagttagccagttgtaaagactggatgcctcttcctgaccagtcaggccaaagggcctggattactctggcccgtcactgaggcaaggggtggggaggctctgattggcccaggtctaggatcccacgatctagcattgtagctccagaactggagcctaatttgaactttgtggaccaagggtggggagaaaaggatcccccaatattttttttttttttttgagacagagtcttgctctgtcgcctaggctggagtgcagtggcgtgatctcagctcaattctcctgccttggcctcccgagtaactgagattacaggcacatgtcaccacacctggctaatttttgttgtttttgagacacggtcttgctctgtcacccaggctggagtgcagtagcgcaatctcggctcactgcaagctctgcctcctgggttcacgccattctcctgcctcagccttccaagtagctaggactacaggcatgtgccaccacacccagctaattttttatttttagtagagatggggtttcaccgcattaaccaggatggtctcgatctgacctcatgatccacctgccgcagcctcccaaagtgctgggataacaggcgtgagccactgtgcccagcctaatttttgtagttttagtagagatggggtttcaccatgttggctaagctgatctcaaactctggacctcaaatgatccacctgccttggcctcccaaagtgctgggattacaggtgtaagccgccacacccggcctcagactcccaagaaaattgggagctgttatagaaaggagataatcctgggtggcccaaacctagcagagaacacaagccagcatttattgggcacttgctgcatacagatctgttgaaagtctccgtgcatgttaaaccatccactctgtaggcaagtgcttgtaggtgtcctcactttccagatgaagtcactgagaagacaagaggttcagacacttgcccaacctctagtaagtgacggagctgagatccaaacccaggcaggctagctctagatcctaccctcctcctactcagcgtgttccctgtggcattttcccccaagtaagtatcaggctgtttgcttacctctgtccgctgtttgtcagctctctgagaatcgagagttttgtctgttctttttttttttttctactgatcatgaaacagtacaaagcaagtggcagatgctcaggtatttgagggtgtgaattatatggcctgtcaaacatctacccacttgacatacaaaacattttggtgctcagcttcctaagacttgaatacattgtttctaaatttcctttgtgctctaactttaatccatggccactctgttctcacagcttgccggtggtttgccattatttccagtcctcttttctgatcattctcacatgtagctggaatctttcaactccagcttttcctatgttgacttagagtatcacttccaggagggcagggagctttcttttcactgctttatccacagtgccaagaactgtgcctggcacacacgagccttcaggaatgtcttgttacatcaatagttaggcaggtaactgggttcctaagccctgcatttttgccctacaatctttatgccctaatttcctttccagatcctgagcctttgtcttgaaacctgatctttccctcctccctctgaatgacccttctattgtctcctgccctgttcttgagagccggcttggttctctgcctccatttggaattccaagaacaggcaaggagagccacaagatggcctgggctaggtaggggagacagggagaagctgtggcccataggttacaggagcttctgtcctttctttgacggccccaaagaggaggagagaaggctggagaaagcctgtagccaggaagaaagggagacacaggggagtgtaaagtttaacagatgtgcgtgtgtcatcccctgtctagacagcttctgggcttgtgaggtttgggaccacactttcccatccctccaggggcctctctctgtttcctctgcctgctctttgcccaaactgtttctcctgcctgaagcatcctgtcctccaccctcctcttcactggccatccaaatcctttggattcttcagaactttgctcctgttaggctgctcagtttatgctaagtactcctccaggaagccctccctgactgctcccaggccagcagtttcccctttcctcttgctgtttatacaacacacttaacctcagtcccttgtatcacttgttgctttccaagtcagcataagtgtcaaaagagtaggctctggggtcagaatgtctgtgtgcaaatagccatgctggcttgcttgttttgtctgtcacttggaggtggcacatccaagtgaacctcccaggggacagggaagagtggattactgttgtaatcgggcaggattctcctatcactgaacactgcctcacatatagcaggcccttaataaatatttgtaaagtaaatgaaggaagagagaaatgatcaggctccctggaccacctgaggaggccctcaggtctgttgctgggctctggccccagcccgtgggacatatctgcacacccacaatttcctttcttccctcctctcatgagtgtttcccgtctgaccaatgccgccttctgcctctggccccttcttcctctcccaccacctcaactgcctaattattaccaaacttctctctcctgtttttttttttttgttttgttttgtttttttttaaggcagtgtcgctctgtcacccaggctggagtacagtggctcgatctcggctcactgcaggctccacctctgagttcacgctattctcctgcctcagcctcccaagtagctgggactacaggcgcccgccaccacgcccagctaatttttttgtattttttttagtagagacggggtttcaccgtgttacccaggatggtctcgatctcctgacctcgtgatccgcccgccttggcctcccaaagtgctgggattacagacgtgagctgccgcgcccagccctctctcctcctcttgttggatttggaggtggagagaagatgggaagggaggaccaaagggacagtattcagcacccatgctgcacgacactgggcaggttctggaacctgtccgtgccttatcttccttgtctgtaaatggagcatcccaactcacaaggtggttgtaagggtggcgtgaggtcacacactaaaagtgcttagaattgtgcagggcccctgatgttagctatcattcattattgttcttctagggtgtttcctgtgttggtctgggtgctccctgttgcaaatgacagccctaattcggactctcttaagcagcaaagggcacttttttgagtctgtacctggctacaagatgcaacttggtccaccccattgtcaccagcatcctctctctcgggctccatccaatgggcggccaccatcagcaccatattcatgcctcctggcacccagcacagtctcctccagcctccaggactccctctcgcttattggccagacttgggtcacatgtctgccccaggaccaatcgctgaagctagagctggaattgctgattggctccacctggctcacatgcgctgccctgcagtcaaaccatatataagggggggtgggaaataagagcacttgtggcctcaaagcactaacaggggctgttaccaggagacaggagataattctttgttaagccagtaaatattttgaatgcctgctatgccgcaagcattgttttaattgttgaggatatagatctgaacaaaaatgacaaaaacctgtaccttcagggggctgatattctgctggaggacatccgcaaagaaataaaggagctagctgtgagaggtggtaagtgctactggggagggcagagatttcggttttaacctgccaaggtgaaatttgagcaaagacctgaggagggggaagaagggatggtgaagataacctgaatgaaggctccaggcagagggagcagcaagttcaagggccctggggtgggctgtgctagcatgtgcaaggaacagtacagagaccgtgtggctggaaccaggtgtgcaagggagagaggggaaggcaataaggtcggagaggtgatggagcaggttgggtgggttcttgtagcccctttggagggtttttgcgttttactctgcgtgggatggaagttattgaaggccgttcagtggaggaaggcaggcccttgcttttgttttaacaggatctgtctggctgcttgatggaagggacgaggtagaagcagggaaaccagttaggaggctgttggaatccaggcaggattctcctatcactgaacactgtgcctcataggaggtccttcatacgtatttgtaaagtgaaagaaggaagagagagaaatgatcaggttctctggaccacctggggaggccgctaggtctgttgcggggctctggccccagcccgtgggacgtatctgcacacccacagtttgctttcttcccgcctttcatggacatttaccatctgaccagtgcctccttctgcctctggccccttcttcctctcccaccacctcagctgcctgattgttcccaaacttctctctcctcctcttgttggatttggagatcctcagaggaaaacagcccatctgggtctttctaaacaggtctggatgaggtcccaggtgtttgttcaccgctgtggtttgtggcattgggaaggtgagggcatcagtcactcagacccgttcctcttggcagatcggcagagaaattgagaactaaaaatgatgtttctaaatgctcaggacgttagctgtttccagagatgtctcctgggctggcgagcctttgccaaggtcctggagaagactcaggatggagaggaggagccagagagacctggaaaggaactggtgggaaggagaggtgttgtccacagcagggatggagtggcaggcggctggtgctgcgtgagttcactgggtgctctctcggttcagccactttgaatattttaccaagaaaaaggaaaaaaaacaaggcagaatcccttgtgtcatctttaattgatttcttcagcatccggagagaaactggcatgaggccacgagaagtctgagccaggggaattcatcagaaatcgacccactgatgacttgatctgatgaaataattagctcctgttattctctggcttctggtgccggagctttgacttccatccagaggagagcgggtgatagccgcccaggagtggggggtgctctgaaaccaacatgggagccaggaacgaagtccagctgactgtgccccgggctccatctttacccagcccagggctcccaatgaagactgcccttcccagcccccctgtaccctggcatcacaggcccagggccaaaaaggccctcagagggcacctggccacctggcaaatgaggaaactgaggctgggagactcttaggaacttgttcaaagatctgcttctagggggtcctggttgagctgcccaaatcgggccagactaggtttgaaccccttctctgccacttacccatatgatcgggggaaagtgattttaactctctgtgcctcagcttcttcatccataaaatgggtgaaatattgatgggtgggtgtgcatattaattgggttgacacctgcaaacagctcagagcagagactggagtgtgctgcaagctttcagaaaggttttcctgtgattggtttctggtttcagagagttgctatttgtagggcaccccatcggaattctcccaatattagcactccacgtctgtctctctgaaggaacgtgaatgtgcatcttagaacgctggctgctgcaatcgtagtttcaagtgcaaagcatcccgtagtgtttcccgatggagggacatgggccactgataatgtattagtctgttttcacgctgctgataaagacatacccgagactgggtaatttaaaagaaaaagatttaatggactcattgttccatgtggctggggaggccttacaatcatggtggaaggtgaaaggcacgtcttatgtgatggcagacaaaagaagatgagaaccaagcaaaaggggaaaccctttataaaaccgtcagatctcatgagacttattcactaccatgagaacagtatgggggaaccacccccatgattcaattatctcccaccaggtccctcccacaacacgtgggaattatgggcgctacaagtcaagatgagatttgggtgaggacacagccaaaccatatcagatacacaacatagtttgaggattactctgatttggggtggttcagggactgattcgatggctagagtttgtctccttttcagctgtctggcagcctccagttacctccagcagaaagtctcagatggtgctaatgtgctttgactcctttcaacacctgctaatctcacttcaaaagagagtgcgagcgcgagggcacgcgaagcctgggaagctatttgcatcaagttccactgattcagctttctttgacttttatttgtacaattagctctacagggaagcgatgtccactttccatttatctttgggtaggaagttttcttttcccaaaacatgtgtttgtgtttttattttaaaatgaggccatttaaagaagcacgttaagcaaataatcactgaagggctctgcagattcagcagaaatcagggccgtggtccttgaacggaaagagttgggaaatccgagtttcgtgatgagaagcccacattgaacggtgagggagggcagaattcacatcccatccctgccatcttctgtctgggtggccttaggacagtaatgaaacctcagttttctctggggctaataatagtacttgcaggagggagccttggtggaggttgaaggagatttcagagtgcctgacgcaggacagctgcagcggtaggatcactctaataatggtttacattgtggaatatgtatcccagttagtactatggccaggctctagtcccagcacactgtatcaacacatttaatcctgcacacccatttcacagatgaggaaactgaggcacaaaggtgttaagttactagctcagggtctttcagcaagtaactccaaagtccacatccttaaccatcacaccacgtggcataaagcaggtgcccagcaggcagttgccgcagtggctctggctgtcatgaggtgtatgtttctgcagacgagagattgagaaggaaggtgttgttcaccctctggtcccatgaaactcacagttctcatgtcagacgactgcatcgagtgtgtccccagctcccctgaaattgtgactctcagagccacctgggaaggaggcattgagcggagcctgcttcctgctcccaggggaggtgctagaagggagacttgctgtcctggccagcctgacataggatacaggtccctgaatgaagtaaattagggtgcgcatcagggcagctgggagagttgattgaaagcactgttttcagaggcaggtgggcaaagggagcaaagaaatgatgctgcaccgaggaaccggtagcaacaggagcccttactttcccgagacttgatggggcaagaggagggagaggtgaactcagaactggggagacgctagagccaggaggggccccaggcaggagctgcatccacacacacagacacgaaggctactgcctggggagctactgcgtgcgggaggagaataaatgcacggacttcccaccacctcccatgctgcagcctcccagccggaagccagagagcagggacgtgccgaccgtgccatctgtagagctcagcctcccagggtgccaagcagagctgggggagaaatggagcaggagtgacccttcctggggtttttcaaccatagcgctgcccagagaacacagtggccagctcctcgttggtgtccatggagggtggctggggcaaggcatcagtgatggacgcctctgagccatgtagacccaagctatggcacggccctgccaagtccagcttccctcactctgcagaactcaaaggaccttagcagaacctccgttcctttatttatctatttctttgtgccaaggcctggagacagccatgaataacataagcctgtctctgtcctcagggagctgaccccctagtggggaagaattggacaataaataagaaattgcaggctgcagtagtgattacaagagaaataaaaccggttataaaatgcagagtgcctgggttgggggcccccgctttaaatagggtggccagggcaggcctctctgaggtgatgacgtttgttcttttgacagaaagagccaggagtacaaagcaggagtttgttgttgttgttgttgtttttgagacggagtctcactctgtcacccaggctggagtgcaatgacatgatctcggctcactgcaacctccatttcccaggttcaagcgattctcctgcctcagcctcccgagtagctgggattacaggcatgtgccaccatgcccagctaatttgcgtatttttagtagagatggggtttcaccatgttgatcaggctggtctcgaactcctgacctcaggtgatccacctgcctcagcctgccaaagtgctggaattacagatgtgagccactgcgcacagctgcgggagttatttttaaaagagcaggtgcaaagaccctggggcaaagagaagcttgacttgtccattcgacagaaagaagccagtagggctggaaaggagaggtcgaggagaagtgggcaggggccagatctcacgggccagggcagccctggcaagaagtttgcatcttatcctgtgagccatgagcagccagggaaggtgcggcaggtgagcacaggactggcactaaggtgaggcgagtgcctggcacttgtgcagcctgggagcgagcacccccttcagtctgtacctgcacgaggcactgtgccctcccctgcccagtgctgtgatctgatctgtattttaggaagattcctccggctgccctgggaaaatggaggatgggggcagggaagagggaggcgggagacccctcaggccaccttgcagtccccaggagagatgaagcaggcagcacatccccctgctgaacccggagaccttgctgagcctctgagtcatgactttgagctgatggctggggttccccatgaagggcaaggacaaacagaccctttcaaggtcacagcaacacagccacccccacagcacttggcttcctcccggcacatctgcaggctgtggctctctcgctcatgctctcttgttttaaataaatgataccaaaagtctatatctggacaggacttgaaggctcatttcctcaagaagtgaaaaaatgaccacggagagcaaagagcagggcgagattagagacctgcttgagccagagtcgcgtccccacctccccgcacccaccttcgctggtgacctagtctgacctggggccaggggggtgactgagggcacagtggcctgtggcaggtcttccccctccaccttttagcgctcaattttctctattgtcatttcatttattctgcaacttaaaactaataggctgggcacagtggctcacacctataaccccagcactttgggaggccagggcaggtggatcacctgagttcaggagttcaagaccagcctggccaacatggtgaaaccccatctctaccaaaaatacaaaaaattagccgggcgtggtggcaggcgcctgtaatcccagcttctctagaggctgaggcaggagaatcgcttgaacaccaggaggcagaggtcgcagtgagcccagatggcgtcattgcactccagcctgagcaacaagagcaaaactctgtctgggaaaaaaaaaaaaaaaaaaaaaggaatacttttttgcccaactacaagatcccttaacaaggggctttcacacgcatccccagcagactgaaatcttacaacagccctgtctactcattttgttcatggggaaaccgaggttccaaacgggcttgctcacgggaaaactgagccagtgagtggaagatctgccactcacacatgccagttgtccagcccaaaacatccagctccaggctctcgtttaaacccctgattgaatcccccgctgctggggagctggaacttcatctccctcacctctgtaccccacggtgcgggcagatgcaagaggacggcaaatattcaccccttgagaccagcccgctgctgttcctctccctggggacgatttgtctgtggagttgggtggattattcagagacggctgttatctgactcgggtcttgggctgccaccgacacatcagaggctcactggatccagggaagaaattgtttctgcagaagtggccacagaaggcttttctgccagtctgttgaccaagcaaactgtaaagactttgctaacttcagcggagttcggttttcactctgccatagccacccctgttcaaagaaactcccattgttcatgccagccgccatacaaatcattatgcaagaatgagcagccggcagccttgacataaatattgacctgattcttcctcctcctctagatctgcgagtgaagagggacgagggaaaagaaacaaagccacagacgcaacttgagactcccgcatcccaaaagaagcaccagatcagcaaaaaaagaagatgggccccccgagcctcgtgctgtgcttgctgtccgcaactgtgttctccctgctgggtggaagctcggccttcctgtcgcaccaccgcctgaaaggcaggtttcagagggaccgcaggaacatccgccccaacatcatcctggtgctgacggacgaccaggatgtggagctgggtaagcctcggggccccagggtggcacctcggcccctcggagcagggtccctgggttaggctgaggctcctgaggcaaggcggtggtgttgatgcgtcgtgctcacttttgagtacattgaaaccaagacacgggccacccacacgtgtttggggtcacaactgggtcctcaaggttaggggtctctacccttctccagttgcacaaccgttcctggatttctccaaagagttaaagagaacaggctgggcgctatggctcatgcttgtaatcccagcacgttgggaggccgaggcaggtggatcacctgaagtcaggggttcgagaccagcctggccaacgtggtgaaaccccgtctttactaaaactacagaaatgagccaggcatgatggcgcacacctgtaaccccagctactgaggagactggggcacaagaatcacttgaatccaggagaaggaggttgcagtgagtggaggtcatgccactacactccagcctgggtgacagagtgagactctgtctcaaaaaaaaaaaaaaaagatgagacatgagcctggagccaaattttggaggctcttgtgggttgtggcaaagactgtcaatcattgatcccgtgaagggtgatccctcagcctctgtccactcttaaaggataacagcgtgttgttggtggcaacaaatgtgaaggttgactaggttagccttgacaacctgaatttgtcttttagctaccaggaaaaggcaatttacataaaaccaagttgttccttgcaatgctttgtattaatgatcacaagtatagtttttttcctccgggagcttctcagtgcagaaagaatttgtagccaggaagcaatcagagcccagagcttttattgacaatttgacacataggatacctatctcctggcagcatttagaatgaggcgcatttgataactatggggagtctgcagactgtggccagagaggtgtgtttcgtttcttgaagaattttgcagaggggtcttgcaggcagcacctggacctcagagcttcttggtctcacattgtgtagccccgacgctgtttcggctatagtcatgcttagaatttccgatgccctgcacgtttgttcattcatccagcagatgtttattacgcatttgttgcattcagtgcactgtgtcaggagccagagaactaagggaggctcattccaggtgaggagaacaggaaattcaaagatactgagatagaaatgggctcggtggtttggagcaaaaaaaaaaagtgccagggagccggagtggagggagctggggccgtgatggagagagatgaagctgaggagctgacttggcccgggttgcaccaggccttgtggccatggtgggggctttgagtttgattcttagtaaaatagacatggatgagggggccttaagaagaggaaggccgtgacctcacttaggttctaacaggatcccccagctcttttgatgaaattaaatcgcaggggtaagggcagaaacaggacactcattcagaggccgatggggtgatagggcagtgatgatggaagctcagacccgggtgctgagatgcggtcccacctgatgtatatttgggaaataaactgatcaatgggttaggtatgtgggttatggaaaagatacgtttcaagggcagccgctagatttggggcccgaatcaacaggtgagtggctgaatacccactcttaggaacaacacatttttgcaacatgatccagctaagtctcatgtctgaatctgactgaattttgcatctgtgacttgtgaataaaaccaacagtgtatgcagataaaaagaaagcaaaggcatatgcagatataaggaaaccaacagcgtatgcagatacaaggaaaccaatagcaggtatgaagtagacacaggagagaggggaacaaagaaagccgtggctgacttaaaatacagagatttcttctctccatttgacagatggaaaaactgaggcagagagaagtcacttgtccaagtttgcacagctagaatgtgattaaacatgatttgagctgggtgcagtggctcacgcctgtaatcccagcattttgggagcctgaggatcacttgaggccaggagttcgagaccagcctgggcaacatagtgagaccccccccgtcttaacaaaaaatgtaaaaatcagccaaggatggtggcacacacctgtagtagcagctaatgggaggctgaggtggaggatcacttgagcccaagaggtcaaggctgcagtgagcctaggtcacaccactgttctctagcctgggcaatagaacaaaaccccatcttagaaaaaaagagaaaaacaagatttgaacccagaacgcgtgatcttagccactgctctatttagccagattcctgggatggatattgagttgttttcagattggtagcgtgtgcgtttgttagtttttcactgttacggatattgttgctggaaatttaaacaggcatcgttgcacagacaagggagtgcttctgaaggataaattctaggaggtggatgcggtgggtttagagcccctggtgttcagtggcctgtgtcagctcttgcccaatagcactacacagcatagattagggcctacaagtcttgccctctataaacaagccagacctcttccaccagcagcactgggttttgaaggaggcaagggatgggaaggtggttgtgggaggggcatgataggctttttataaaccactagacagacccagatcaataatgcatgtcccaaaaaagcccaatacattatctcacagtctctgctacaactggcatgcagcgggtggtcctaaaaaatttatcatttgctattttctgcccatccgtgcagcagttctgacagccctctgggctggagacttcttgactgagataatcccaggattctttccagtcccaggacagagaacagacgtccatcctcattagggtccggttgggaggactggtgccagatacacaagacgaggggcttgttctgtttcctaattgcaaggttggggggttcggggctgtaccacgtatattcaattttcctttccctgcacgcatttgactccctaagctgtcatttggaattatcaaatgcccaggggaactgcttccagggccatactagttcgtaagtggcctaaattatcattacatgtttaaagtagttggggacatccctgtgtctcaatggccctctgagaccaacggacttttgctggacttccgctccaaaagaataagagggaagcacatggaggtaaaggtctcgtttgcagacgtcctttgttcagggaggcagtagaatctttgggctctgccagggtttactgatttaatttgatctaaacctctggggagcctctggggctccagcaggctctgagacagcaagaggattaagacatggttctggcctggagcaagagaatttttgcagcatcccagttctgatctatgacttgagaatttctttaactggacttatttttgaagcttaaatattattttaaaaggaacctccaaattctgactgtaaaggaaaaaaccaatacccattgccttcggcaaaggatcactgtaaaaccaaacacagtgaaaaccaagtcgtgtttttaaatttcagcaagatgctgcctcccagaaagccagtgtgtctctactgtaatgagggtgacgggcagtttcagaagcggcattaaaggtgaagtagcacctgccaagactttcttcttggcctcatcagcaggatagagactagaaaagagaagaactttctcaagcttttgatgtgggggtcccacttacatggggaccacttggtggtggctcttgtatcagagggttaaggacacagccagactccaaaccccagaatatcagagcggattccccagtgctcattttcctgagtgttcacaccaggcagagatgggtgccttttcgaggcccctcagattgtcggatttgaagtgtgccccacgagactgcatccagtgtttgcatttcttttcttttctttctttttttttttttttttttttgagagagtctcactctgtcacccaggctggagtacagtggcgcaatctcggctcactgcaacctctgcctcctgggttcacgtgattctcctgcctcagcctcccaagtagctggaattacaggtgcccgctaccacacccagctaatttttgtatttttagtagattcagggtttcgccatgttggccaggttggcctcgaactcctgacctcaagcagtccgccgcctcggcctcccaaaatgctgggatcgcaggcgtgagccaccacacctggcctgatgtttgcatttcaaaagaattctttgcctctcagaacatctttatttttatttgtttatattttttgagacggggtctcgctctgtcacccaggatggaatgcagtggtgtgatcactactcactgcagcctcgacctcctgagcttaagcaatcctcttaccccagcccccgaagtagctgggactacaggtgcgcaccatcacactcagctaattttgggagtttttggggttttttttttttttttttagagatgggcttttgccatgttgctcaggctggttgcaaactcctgagctcaaacaatccgccccccattggcctcccaaagtgctggaattgcaggtgcgagccgctgcacccagcctatcagaacatctttaaatgaaaatactccgagtaaagttgcaagggtaagagctgtctcattagccaccaggttcaaatcctcactctaccattgaccatgtgtccttgggaaagatttgccctctctgtgcctcagtttactcatctataaagtggagatgatgatctgtttccctggcattcttgtgaggaatacctggcacctgtcatatgtgtgacagtttgctctcacttgggttgttaaagccatcctctgttagagcaccctgggccaatgccacagtgttgtttgtctacagcaagctttgcatatcaaaacgacattaaaatctaaatgtctcatggcactgaacagcaacattagagtctcctcccagctgacacagtggggtgagtgctgtccacgctcatgcaggtgagctggcacccactctgccaggtatgtgagcctggcatggttacataccccataatttgagtgacacttgtcaatcaagtttggcatgggttcttctgccattactgcctctgctgatgaacagagttgcaccatcatggctgttgaaaagcaactgagtggtggttttggggcctgcaaaagtgccatgggaaccagccttccactgggtgttaaaaacgcgtgtgtcacaaccactctctgtcagcctggattctctcagttacgagtgatgtaaacccaactcgagcaggattgaggaatcaaaaaggggactttattggactcatatgaataagtccaagtatacattgagcttcaggtgcggctggatctaggagctttgtctctgggtggcctctgtccctccatctccctgacctcagctttcctccaagttggctttactctcaggccagctctccaggcagcattcctggcatcactagacccacatgaacaccatacaggtgcaagccatccctgtggaaagagagcttctctcacctagaagagagtacccaaattgagtctttttggtctgacactgtctgggacttctggtcaaccagattcaggggaatggaacacagtggttggccagatggagtcaggtgcacattcctggagccaggactggagccaaccccacttgaaccatgaggactgggattgggatagagcagattccccaaaggaaaattcagaagctagtgccagaagaaggcaggtagctggtgtgcagtccagttagagagatgctcgtgacaccctcacatggcgctctctgaagcagctgctcaaactgtggaccagacttattcattcggcaggtgtttcctgagcacctactgtatgccaaaggagatccaacagcaaacaaactaaacagagcttacattctaatgcaagagttaacaagacacatcgaatctatagtacataaaagagcagaaagtgaggaggagaataaagccaggaggggaagccaggaggggcgatcaaccaggagaaaggtggagaaaagaatcgctgggattttctatagggtggtctcattgggaaggggaaatctgagcaaagaaggtaaggaaaccagtcaagggggatccctggggaagagcactccaggcagagggaacggtgtgtgctaaggccctgaggcagatgcggtctcagcaggctcagagccgcaaagaggccagagcagcgtgcacaagagcagcaggaagaatgaacggtaatagggaggtggtggttggatggaccgtgcaaggcatgagcctttgaatgggaggaagattttggctttctgagtgagatggacaccaatagaggacattgagcagaggaggacattgagcatctgatttgtgtcttcataggacccctctagaagaatagactgaataggtgtaatgagagcagggtgtccagtaaggagtctactgcaacagtccacgcatgagatgagcccaatgaggagtctattgcaatggtccaggcatgagatgatagcggttcagaccagagtgaggaaagtagtaagtgctggtcatatttcaaaggtagagctgatacaagtgctgatggaactgatgagggatggtaaagaagagttgagaatgactccaaggttgtggcctgaaaaactatgagaatggattttctgtgtacagagatggggaaaaccatggttagaagctgtgggccgggtgcggtggctcacacctgtgatcccagcgctttgggaggccaaggcacgcggatcaagaggtcaggagatcgagaccatcctggccaacatagtgaaaccccatctctactaaaaatacaaaaattagcggggcatggtggcacacgcctatagtcccagctactcgggaggctgaggcaggagatttggttgaacccaggaggcggaggttgcagtgagctgagatcgcgccactgcactccagcctggcgacagagcgagactctgtctcaatacatcaataaatcaataaataaagctcagttctggacctgggaagttgcaggtgcctgtgaaaagccaacaggaactgtccaataggcagccacatcagtcagacgttgaagagagaggcccaggcctgggtggacttagagtagggcacggtggggatcgtatacaaactgtgtgcttgtttgtgctttactgaatctgagaccctccccagatcctgaaagttgcaggaatacagcctggagaactgtccagtgggagaggcaggcttttgaaagaaagatgtagcagaggtctggccggcctcctgttttccactttccatctgtgaacacaaggaaaccacaccctgtgccacagcctgatatccaggagatcaattccaaatcgcaggctcaagtactctctgtaggggccagatggctggaagcccaggacaacatacccagattccagacaccagatcagtggtaacttccagctcagcctctctgagatcccacctcctggccttctagccgctgatcactagaggagaaaaaacatgtggatgcaggttatctcaggaagaagagaggctcattcggacccacactggtgttcagcttgccaagcacattcctgtaagatgattttttttcaattcagcaacatttgggagatcacttgagttctggaagttaagtgtatcaggattaggtttggctgcatgtaaaagaaaacataaaataacagtggcttaaacaagacagaattatacaaatgtctggaggtaggcagtctagggctggcttggtggcttcaaggttatcagggacccaagctccttctctgcctttctgttccatcatacttactgcgtagcttccatctgcaaagtcaccttgtggttagaacagctgctggagctccagctctcatagccacactctaggcagcaagaagaaggaagcagaggcagaagggcaggaaaaagaaaaaaaaaaaaaccacttcagaagtcacatgcaacacgaatagatcttatttacttagccacatgatctcagcgagaattataaagcacatgcaaatttgaatcattggaagacggtttaagtgttttttgctaaggtgtgagcaagtgcgaggaaaccactagggatagggcagtgccccaggctaattagcaacagtgggacaagaggttactggaacccagggacacagagggtcaccccacaagagctgtcaccctctgttggcaccacagagaggaaggtggaggaatctgtccaccaacctcactctcttctttctccgatctcctgccaggggcccttgtcagtcaaatccaacccaaagcccagagagcgaaggggcttgttgaaccagcacctccaggccagtgccctggggtggagaactggacagagagcagggctggaaggcggcaggcaggctcctggcacatctttggccataagggaatctgggaaatgtttcctagctgggtgcattgaaaataaagtcacagcctgatcagaggaagaaggagaaagagatatttgtgggcaactgagggtctcagcaacaccagagatcaggagcaagggtcccagtgagggcagctcccctagcagtgggaagtggggttgtgtggcctaacactggggagacctgtgtcatgaggagacattcatgtggaaacccgaggcaggagcactgcaggcagaagcacggcacgtgcaagagccctgtggcaggaacaggtttcccaggacgttggaggagggcagcaggacatgggaatgaaggggaggaggatggggaagagggcggcagagagcagacaggggagacctggtggtccccagcaggccatgcagcagggtctggatttgattgcatgcccgatggaaggtccccagaatgttctgagctggtcagctatgcgtgcatgttctcagaggcacaccccggctgtaggtgaagagggtggcccagggacaagagcggaagcagggagatcaggtggtgtttgcagcagtccaggtgggagatgctggtggtacggagcaggacggggcactgcagagcgagagaggtgggtggattccggtgctgcttggaaggtcggcagggtttgctttatggatcgtgagtgggtgggtgagggaagaggaatcggggatgactcctaggtttttggctgagccgttgggcagatggcagtgccatttacagagatgggaaggcgggggcaggaggaacagattgggagaggtggggaagggggggacattaggttgctttgcaaacatcacccaccaggcctgtggctgggcagcagctctgcgtagccccttctgaaaagtggggaaaacaccctggaagccctgccccattgaataaatatcccctcccagggatggtgattgtagcattttgagttagaggaatatttctgggtggagtttctcagagaggaaatgaccaatcattgcagagcctcgtcaattacacccaagccctgccctttcccacgtgtgctctgccacctctctgctatggttgacgatgaccatagcagaattttctcccaggaacttctgcaaccagaggcagcagaaagcaacggagaaaaaattaactgcatggtctctctgacaacccgatgcttattaatagaatctcagtcctgcctcctcgacatctgcctaattgattttgggtttaggaaccgatttggagccttggcttttcgtagctgaaaccagcaataacatttgtctttattttgtaatgtccaagagtcaggaatggttcacctttgcaccaacaaaagaaaaacaacaacctctgagcaacaggtctccagaatccagtgtaattattctggattgagttacaggcacagcaagagttgccaccagcagcagtgagcacatctatactaggtgaaaaataagagattccctttttatgtgtgtgtgtgtgtatatatatatatatatatatatatttttttttttttatttatttaagttctagggtacatgtgcacaacgtgcagttttgttacatatgtatatgtgtgccatgttggtgtgctgcacccgttaactcgtcatttacattaggtatatctcctaatgctatccctcccctctccccccaccccacaacaggccccagtgtgtgatgttccccttcctgtgtccaagtgttctcattgttcaattcccacctatgagtgagaacgtgcagtgtttggtcttttgtccttgtgataatttgctgagaatgatggtttcgagcttcatccatgtccctacaaaggacatgaactcatccttcttttgcccaagtgtggctcccgatttctgctgtttgtgccccaggcctttctctcccctctgctggagacagagctattctggggcagttggtcaggtctgatggagcccagcctgctgcagcccattagcaggtgttgccttggtcatggcagggagctcacaagctgatcctacagcactgcggacattccagggacatttgagggccaggagagggctgctgaatgagttccagcctgttaggtggacaccagtagccagaggtcagtgcaggacacaggttctttcccgcctgtggctcgacctcatagccctcttcatcccccacctgtccaggtcaagactctgttccaacctgtacctgaccccacagcctctcttccccactgaatgcctgttctctgcaggtctctgggccccagtagagcgttacctttgcagatttatttagctgctcccttcacttggaattgaatcagctaagggttgcaaactccatgcccacagggctaggcacgtgctggcaaggaggaagtcggcatggtaggggtggtggaagaccagaggaggaccttgtcaagtgggccttcgctactcaggtccagcccactgtgggcccatcaaagccaggtctttgcatttttcaagcaaagccagaaagctgaattgatgtgaaatctcgcaattaaagaaaaaggccattcaatttttaaaatcctttccttttgggcagacctaaatcaaacacacatgcagacaagatttagtctagagggactccgttttttaactccgcgtgagacgatacttgttgaaaagctgacatgtggccgggcacagtggctcactcctgtaatcccagcactttgggaggtcaaggcaggtggatcacttaaggccaggagttcaagaacagcctggctaacatggtgaaaccccatctctactaaaaataaaaaaaattagccgggaatgatagtgggagcctgtaatcccagctactcaggaggctgaggcaggagaatcacttgaacccaggaggcagaggttgcaatgaaccgagatggtgccattgcactccagcctgggtgacaagagagaaactctgtctcaaataagtaaataaataaataaaagctggcatgcattaagtgctttctgtatgtcaagcattgaactaaaaaagtgtgtgtgtatgtgtatatatatatatatatatatatatatatatatatatatatatatatttttttttttttttttttttttttttttccctcaaaactcagaacaaccctgagaaggaggcactgttattctcccgctttgcagatggggaaactgaggtgcagggtggctaaatcatttgcacaaggtacctggttaataggaagtggcagaaatcaagatttggaatcaggccttctgactgaaaacctttttcatcctattgagtatggtgacatagcgataggttctagaatctatcctagaatttcatagtcaaaccttatacctaaagttatttatgggctgtgtttttacagacagggaagctgaagctcaaagtcagtgatttacggcagttcacacctcattcttggcctctcaattcagtgctctttggcacccaaagtctacagatgaaaaaggacctggtgattcagtctaggactgaagtgtatatgtgcatctgtttgtgtgtgtgttatacacacacacacatattcatttgtagcagctgaacccttttaacatacaaaacaaaacaggtaagagaggaatcaggagaaggacgcggcctggagaggggtgtgtggtgcccccttcatcctcagcctgccccatgccaggtggactttaatgcccctctcctcaaggaaagaaagcacagcttgggggcccctgggagcagactggccccaggtagagtgtagcaggtgatatgtggccacaacagtggccacagtggataacagtgttatcccaacactgggaggccaaggcaggaggatcacttgagccctggagttcaagaccatctatagatttttcggtcatctatagaaagcccactgtgtgccctcttcccctaaatcccagggcctgcttcacataggggtagcacacagacaggcctgcagacccgtgcaggaatgccaagtgccaaatcctgccctctcccattgttctagaaacctgtggccctcttgctgcatttatttattttttatttattcaggagttcaagaccagcctggtcaacatggtgtaaccctgtctctactaaaaatacacaccaaaaaaaatagctgggcatggtggtacttgcctgtaatcccagctgctcgggaggctgaggcaggagaatcgcttgaacccaggaggtagaggttgcagtgagccgagatcgcgccgctgcactccagcctgaaagacagagggagactccatctcaaaacaatcaataaaattacacaagcaaaactttaaaatatccaagtaatgcaaagcagagatagcccttgactccccacccaccgtgtaccccactcaccccaaaggcacctgcatgtcccctaagaatctgtagcctgcatgtcccctaagaatgtttactcttcatttactcacacggaagcaccaggaagagcagcaaaaggcaagaaggaaggggagggcatgattctaatcagcacagtccagagaaagccttgctgagaaagtgatatttgcagaaacctgaaggcaatgagggactgagtctgggctgaggagtggcaggtgcaaaggtcctgaggcagaagcgtgcttggtgtgttcgaggaacaacaaggaggaggtcaatgtgactggagcagaggaagcttagagagagagcgcacagtaggagttgtagttggggcgagtgagcatccggatcactgaggaccttgtaggacagagggaggactttgatttttactctgagtgaggcgggcagtcactggaagacaaagagcaacgaatatgatgatttcactgactgttttaaaagaagtcctggccaggcaggcatggtggctcatgcctgttatcccaacactttgggaggccaaggaaggaggatcacttgagcccagcagttcaagaccagcccgggcaacgtggtgaagccccacctgtacaaaaaatacaaaaattagctgagtgtggtagtgtacacctgtaattccagctactcaggaggtggaggtgggaggatcacctgaacctggggaggtcgaggctgcagtgagccgtgatcacactactgcactccagcctgggtacagagtgagaccctgtctcaaaagaaaaagcctctggccaccaaacggagaatagaacagcttgggagcctactgcaatagtccaggcagagaaaacagtgattagagtgaatttaagtcaaggtcctgtgtttactgactccgcctttatttttctccctgccccattcttccttctgctgctttccctaggaggccctgccatcacagactctaataatatctataattttaagaaactagccataggaaggcatctcactagttatacatcaaaatcacccaagttgagggccgcagggatttgtctgggaggggtacagggttcccctgctcccagctgaagcaggcctccaacagataggagccacctaagcctcaggaatggcaaaaaaaaaaaaaaaaaaaaaaaaaaaaaatcatgttttgaatcctgaaactccctggcaccttgctaagtccccatagatagtgtttgctctgacttagacctttagaagagcaaattcattcagcatttcctatgacactggcaacgtcgtcatctgtggcaggtcagcaaaatattgattttatcaacgatggacttactggatggtgcatccaaaaatatatatatataactcacaccttaattctctaactcgacgtagttaacttggattgagattaaagggttttttcttaaatcacgttaaatacaaatatcaaacaaatcatagcacagtggtacacaggcccccaaaaagccaccgtgaatggggaggcagttcaggagtgtcatgggagaaactgcattctagcagttgggtggtttgggcccccaagtttaaatcccaacagatgggcctgggggtgaggcctctccagcccatcagagtcacagaggtgtcagagtgacctcaccctcaacccagtatggtgggaaggtttggtcatggaaagaaaccgggtctgtttttgtctgcatgtccccaggtttatgttggacgaaagaagttgaggttggctggcccagctgcattgaaaagcttgaaaactggccttttcatttctgtgtggccgtgtcgttcaggtccttccctcccgtcggagctgtccttctgcattagggctggggctgggcaaggggatgagatcatatgtttttgtgttacagaggtaggtttacacagcctcgtcgctatggcagttttaataaagcaggttactgtccccaaggggaggcttagcacatagcactgcccatgcacagatgctgctgtcattccggggcactgttgtcctttactcgtggattgacacagcgctcctccgccagctgatttgggaagggtgagtgctggccaagagcacctcacagctcgcttcctctggaatgaggaggaaggagatctaagcatttcgagaccctggatctgagcccattaaaaacaagaaatggttctggaggctgttcactgtttgccaaggcagcactgggggctgcggagtgcaggtgatttcatcaggtgacggcctgccctgcgttcccttccaggagaagggtctgaccagttaggtgggtggccagcttttgtcctttctgcagggtctggagaccgagagaggctgagctctcactaccagctgcttcgtcctttctccttcgtgtttgggactagggagcaaaggatcgattccacttggggtgccctggactcgtgcatttaagaaatatttatgagcacccactgcgtgccaggcactgttctaggctgagctgtggagccatcaaaagtcacagggaacagcaaacgggatcagtagataaaaacataaaagtatatcatgtgttagatgatgagtgcagggttgaaaatgtcaggcaaggaagggagtagaaaatattgggggccagggaagactccacggagaagggaacttttgagtaaagacaagaagggggtgagggcaccgctgcggggctccgggggagaggtcttccaggcagaaggaacagcagggcacaggttctgggatgggagcacgcctggtcagtctgtggacagagcaggggaccctgtggctgcagagagtgggcggagagggggatggggttagggaggggaggggattgggtcccaccacactctgtggatggccagaaagatttgggctcctctgagtgagcaggagccccggagagtgtcaggagaggagactctggctacaccgtggggaataagtgactggagtccaatcaggaagcaactggcctgatttcagggagagaggatgatcgcctgacccacgggggaggtggcaagggtacgatcgtgggtgtttacgttgaagagagggcaacaggctttgctgatggattggatgtgggaactgaaagatgggaggaaccgtagccaagatgattgcccaagtacccggaggaaaggggagtggcttcgggaggagcaggagggacggtgacatcagggcttggctgtgggtgtggcacctgaggtctaatcgacagccgaatgacatcaatggatgtcagggttgtaccaagccacacatcaagggatgtcaggtccgggttttaccaagccaatgattgccaaattctaatcattccctcacaattttcatcatatatctgtgtgccacttgtacgattatttactttttaaaaatcggctgcaattgtttgttgttgttgttgttttaagaggatttccaccaccctaaaggaaaagctaaggttacttgccctaagtagaaggaaaccaagccacgcaattaatctaaggcaatgccaccccctgcctggagctcccagtggcctttcacaccaccagcatccctggtgtttggtgatgtgaccctgggccacccccacccctggtgtgcctgatgaagtcaccactagaggacccccttctgggtcaccaagggaccattctgagcttaactgaagccaagagtggaccaagagcatggggacctctatgcacttcctcaggacactgttaccacctcccgtgtgactgtgacattttgtgaacgtgaaactcagcaccccgcctctgctaggcttgagtcttcactgccttcccagctgtgcagccttagccagtcattcagctccccaggttcagttccctcttctgtcaaatgggccattgggagaattaagtgatgaatgtcttcagcccagccataagcattcagccagtgatagtcgccactattaattataatgattattactggcatagaagactgccctcttccccaggaataagttggagtgctctcagttccttagctatatcagaaggttgcaacacccaagccttcaggggtcgggcaggtaatgagagtgggtgcaggtggtgtaagactgtagggagcacgggggagtgtggcaaactggagagcacatatcctgtgtgatgctatttaatgtcacatttttaaaacccactctacaagacaccaacacacaggtctgtggacaccaactggtttggattcctgagatatgaaaacccgagtgtaagatagtattttatatgttaatttagctggtctctgttgagcacattatgtgccaggcactgtgctaggcagtgaacaaagtaggctgagtctctgcccttgtggtgaaggcagcaacatacaaataagtgaaatcaaaatgacttatgtttgaggacagtaactgctgtggagagacacggagcggggaagcagagtggagagtgctatgggttgcgggaggtggtttcaatacaggccagggaaggcctctccaagaaggtggtgtctgatcaataacttgaaggagacagaggtagccctgtgattggaggagtgagagcatcccaggctgggggtacggctgaggcaggggccaggaggtgggagggcggccaatgtgcaatactgggacctcaggggcacgaccttggtgccttgattggtggtaaaaatttaaagtagaagcagctgattgctgagcagagggccttccccagatcccaggaggctgcagtgggtctgatgcttgttttcaggtttctagggggttgctaggtgattgggatcacagccttcacatgcctggtagaccctgttttggtttcccactgctgtcctaacagatcacaaactgggtggcttaaaacaacagaaatttactctctcaacagttctggaggccggaagtccaaaatcaaggtgttagcatggctgtgcttcctcagaaggctctaggggagagcccttccttgcctcttccagccctggggaccctaggagttccttgttccttggcttgtatgtgcatccctccagtctctgcttccctttgaatgtggccttcccctctgtgcctgtgcgtcttctccactttgtgtcctatgtggacacttgtcactggatttagggcccacctggggaatccagaacaaatctcatttcagtagcctcaatttaattacatctgcaaagacaccctgtattggtctgtcttcatgctgctgataaagatatacccgagactgggtaatttagaaagaaaaagaggtttaatggacttagttccatgtggctggggaggcctcaggatcatggcagaaggtgaaaggcacatcttacatggcggtaggcaagagagaatgagaaccaagcaagagggaaaacctttataaaaccatcaaatctcgtgagacttattcactaccaagagaacagtatgggggaaacaacccccatgattcaactgtctcccatcagatccctctcacaacacgtgggaaatatgggagccacaattcaagatgagatttgggtggggacacagccaaaccatatcaccctctttccaaatatggtcacattcacagcttccagaaattaggacatggtcttatctttaggggacgggggcaccgttcaacccactgcacaccttaagaactgcaaggaaaaggggaaaaaccaaggatggccatagaagaaggagagagggtttccatggaatatttccatcaaatcactaagggtctgggtaccaaccacagcatacaattgagcatgcactcgtcacacctatgttgagtacccactgtgtgtcacacacggcagcagtgctgaggattcagcgctgagcggagcacacagcctttgccctcctgggaccttggcctgcacgcagtagggctcccacacacgttcatttgcttccttccttccttcttgcctttcttcctaagtgtcttgctctgcttacagcttggttgagaaacaagagcaggcatggccaggcaaggtggttcatgactgtaatgacagcactttgggaggcagaggcaggcggatcacttgaggtcagaaattccagaccagcctggccaacatggcgaaacgtcatctctactaaaaatacagaaactagctgcgtataggggctacttgggaggctgaggcaggggaatcgcttgaacccgggaagcagagattgcagtgagtcaagatcacaccactgcactccagcctgggcaacagagcaagactctgtctcaaaaaaaaaaaaaaaaaaaaaaaaacaaagaaaagaaagaaacaagagcaggcatgaccgaaacctcgaagcctggggtatgatcagtactcaggacacatgctgcaagactgctcagagctctcaagcccagggtggtgccagaggctccctacgagagggtactaggccgatgggttggatttggggtgaggggtggtgggttccaggctcgaagaaaagtgtggacaagaggccagcagggtttgtggctgatggcagagcacctcagccagggaatactcagggagaaggtttgccaccaggttggcatgaccagatttcagtaagagcaaacaattattgggaaagttccaaagaaaagaaagtataatcttccctcaatttacatggtggttggtttccaaaagaaaaaacaaaacaatgtatattaataccctgcaaaaacaatgttgtgtttaaaatttgtaaaacagtttgattccagtctcaggtcatttataaacaggtttttacctgccttgcaggtagagatgcaattacagtaccggacagtgacagtacagtcacttacagtcactcacctccagcaccattgcaaaatcctccagactccagacctggacctcaggagtgtccaggtggactcgggacccagggtccttcctgattatgcaggacagtcccaccgtgcagcagtggcccctgccccgtctgccccgtaggtctgcagaatgtgcccactccagacctagggatgccacgtgctgagagccccctggtgccggtgccgcccgggtctcctgccctgcgccttacttccacccttgacttgcaggttccatgcaggtgatgaacaagacccggcgcatcatggagcagggcggggcgcacttcatcaacgccttcgtgaccacacccatgtgctgcccctcacgctcctccatcctcactggcaagtacgtccacaaccacaacacctacaccaacaatgagaactgctcctcgccctcctggcaggcacagcacgagagccgcacctttgccgtgtacctcaatagcactggctaccggacaggtgagcagggacgggggcaggtgcaggaagggagtgacagccagggcgggcgtccctaggtgtggtctgcacaccactgcggtacccaagttgattctggatagcccctagagcaactctcttataatttcagagttgtgcatttatttctgtgtgtattaaagaaatacagatttatttgcctacagtagtgatgtaaagtgaccttgtcaaaggaatttgagtcccccaaaaaagtgagtcttttcaaactatgaatcatagtgtggagaggccataaggtgcccatgcatgagtttgcatcctctgttaatagttattaagcccatcagggactgtttcgttgacttcaaaccattagcttggaagaaggttccaaaacataggggtgggggatgggaattcatggaggggaacagataatggggctgtgtggtcgctttctacgtggcagtaaccaaggtggtgcagaaactgacatggtggttgactgtccacactcacccgtgtcatcctgggtggagggcgacccagttcctgtttgcttatccttcaggaggtctttggtgggctctgaaggctcacctgccaggctggttgtctgaggtagagatgcaattacagtatagtcacttacctgtagcgccattgcaaaaccctccagactcaattcatttaacttgctttaattaaaaataaataaatactccccgccttgggtaagaagccgcggcggttgtgaaatcaagatattgtggctcagatgttgcaaccccaggaagttgcatccaagtgacaaggggtttgtttgggtgggagtgccgcaagggaaggatggactcctcctccagccctgtccgcagtgctggacctgcagccctcgaggctgggcagcttcctctcagatacacagtgtgggctggcagggatgctttggtgtggggagcaagccagtaaggtgtgtcttcttacagcctcatcccatagccagaatcacctagaaagtatgttctgctgagaactaggaaggcctcgttcctataccttgttcctgtgtattgtgcgtgccattatgcagaatcaaccacctgttggttcccctgagcctctgcagaaagccacatgtgtcagaagttaccatggccaccaccctagatgattggcgggggcctggatgttgctagcagaagcaggacaggcaggcccgcagcacagcagtgggcccttattgaagatgcacctgcaacttggctctagaaagtacagccatgcactcaagagtgaccagccttgaaatgttttaaagtctgaatatttcactgaaaatcttattttaaaatatgccggcacagcttattttttctttaatgtatactgggggccaaagaaaatatgtctgaggagtgagtgtgtggctcacagactctcttttcacaacctctgggtgaaaggtctgtacagaaacctttcgttttggatgctggaagatcagtaaagaccctagacctgttctcatcaatccccctcatttcacagccagggccactgcagcccaaaaaagagacctgcccagagtcaaagtgaggtgtttgtggcataatcaaaatggaatgcaagatcatgggaattcagagggggcatggaaatagtattcatcagactgaaaggaaactcatatattctgtgccattttgagggctcagggtgggagctaaaggctagtgtttcaaaatcttacaggcgacatgagaaaatcaatcatttcaagaataaacattctctaaagtggatttcccaaacttgtccttgaatgtatgcaaatcaccaaaaagctgtctccctaaataagtgcttttattcaactatgattcattattataccctcatgaagactgggagcgtaatgtcaagtgtaaagagccagataccgagaacatttacgtttttgtaaaactgccactgagaattttattcattatatttagaatgccactctgtacaaagaatcccattccagccttactttcagaactcaggaccctgaaaacacctgtttagtctgatgaactggtgtactccttgttattacataataagagccacataccctgtatagtttccctctttgccctggcagctaggaagctcaggtttgagttttatattgagttgttgtttaaagtggaaatgtttttaaagatccaactgcgtgatatgttatactgatcagtgttgactaagaaaaatgacaaaaatctataatgaattcaaaaccttttagattattttttccttttagattgatttgtacatacatattagaatatactgtaaatttttaatcccccaaggaccaaaagtaaattgttcctgctgagtcttcagccatgttaaaccctgtgttcacgtggccacctagcaaagttggttcagttggatttaagtttggctgtgtgtgtgagagagaccggggatgtcaaataaaattccaagttgttctggtggccctgctctatgaagtggtcagagactccgactccatttctccttatttcccattggtgagaaacaagtcatatggccatgcatggcagcaaaggggcctgggaaatgtagtcttattctaggtggacatttgcccagatgaaagttattttactgtgggagaagaagaaaacggatactgaaggacaagtgaagtctaggccaccctaacagttattagccatttgtgtttgtgatactcgtttgaatagaggagatcagcccaaactgaggaagactgaccccagaaaaatgctacttaagtggaccaacatttcataataaatagtgcttttaatgtatttagtaaggtatttgatcttgaaatgaaactacaatgtttcgagaataactctgttatgttacatctctttttttctttttctgagacagagtcttgctctgtcacccagactggagtgcagtggcacagtctcagctcactacaacctctgcctcctgggttcaagcgattctcctgtctcagcctcctgaatagctgagattacagacgcctgccactacgcctgactaatttttgtattttttgtagagatggggttttgccatgttggccaagctggtctcaaactcctggcctcaagtgatccacctgccttggccttccaaagtgctgggattacatgcatgagccaacgcacccggccctctgttaggttgcatctaatgatatttaacaaatattgggctctagttgcaactaatgagttgattcttcaagcaagtgaattgacgaagtgtagggaggaatataatgtgtttcacaaattgaaatggatggcacaagatgatatcctttacttcactagggacatttttgcaaaagtatttgaggatttgatcaattttttcaagggcctctcctaattctctgacatctgaatcttcccctgtgaagtgcatctcatacttcatcatccttctcaatagtctcttctccttcatgtagtatctttatagaccaggtaattattcgtcagtggatttgcatgtgttttttgagctatcttccagcgtcattttaattaattttacaaaccctgcatcttttaaaatatttgcaatttcattttgcagtgatcttgctttgcatggccccatgtttgcagtggagattgacaaaagacaaaatgagagaagctaagtttaagcaggataaatatcaatttgttcatgaatatttctctgtatggcttcttacaacttgagggacttggatctcagatatgaatacccttggaaggatcaattgcatcctcaggttttttgttttctttgtttttttgtttgtttttgagacagggtctcactctgttgcccacgctggagtgcagtggcgtaatctcagctcactgcaacctccacctcccgggttcaagcgattctcctgcctcagcctccccactaactaggattacaggtgcgtgccaccacgcccagctaattttttgtatttttaatagagacggggtttcaccatgttggccaggctgacctcgaactcctgacctcaagcgatccaccctcctcggcctcccaaagggctaggattacaggtgtgagccactgcacctcgccacatcctcagtttttacaaaggttttatagtcatcctttaacacagttcagcagttgaagtgctgttgccctgcctgtgatcacttatatatccacaagtcaaagttgtacagtgttcccagaatgagacacctcccagctctctgcagagtggttgagggcattagctttgcctgggtttgaatccagtctctgctgctttctgcctgcatgaacttggacaagttatttagcttctgtgtcttggcctcctcaaccacagttaataatgtcacttaactcatagagttttgtgaagattaaatacattagaacagtgtctggtacatggtcgtggtaggcacttgggaaatttagcaatgatggctgggtgcagtggctcacacctgtaattccaacattttggggggccaaagtggaaggatcacctgaggccaggggttcgagaccagcttgggcaaaatagtgagatcccttctcaatttttaaaaaacagtaataaaaaaaagttagcaatgacgatgacgatttgcacaatagcacaacatcacacagcccacctcaggccagtgttctgatgaatgtcatggtaagttgcactcatggatcaaaatgtggcagcatgtgctcagcctctggtaatcagcaaaatgcaaacgcagccaacagtgcattatcacatcccagccatgaccacagcaaatatgaagaggtcccatcgcaccaaatgttggtgagaatgtaggaaaacaggaaatcatatgcgccagcagcatgatggtaaattgttccctccactttgaagaacagtttgccaatttctggcaaagctgaaaatggacatctccttctactcagcaattttactctggctgtgtccccctcggttctgaggaggtgatgttgatgtgtgagttctgcttgagcaagggaacacacttcctggctgccctgtttgctcttgaagatgtgtgatgctcatggcaatagattccctttagatccaacggacaggaaccccgactgcagctggcttcaaaaacattgaattttttgctccctaaacaggccaggcacggtgactgaagcctgtgatcccagcactttgggaggcagggatgggcggatcacctgaggtcaggagttcaagaccagcctgaccaacatggtgaaaccccgtctctactaaaaatacaaaaattagccaggcatggtgatgtacacctgtaatcccagctacaggggaggctgagacaggagaattgcttgaacctgggaggcggaggttgcagtgagccgagatcgcaccactgcactctagcctgggtgacagagtaagactctgtctcaaaaaaaaaaaaaaaaaaaaaaagagaagatacaggtgagtagcaggcagagtcggatcttgtggtttacgagtatcatgatcatatcacgaggctggaggtctggacatggtggctggcactccagcagctgtgtgcctccttgtccacatctggcaggagcaagagagcatccttttccagaatgctcaaggcatgagatcccttctgattggaccaccctgagtcacatgccagcccctgagccaatcatcatataaagcacatggtttgtgccaacttgcccagcgtggatcacctgctctgcagcagctggctgagtccctttttccccagcacttggactgccaggtagaaatcaagggctgctggaaagaataaggaaaagcatactggagtgccgatcacaattttactacactgcctttggcaaacaaaaaacaaaaaaaaagtaacatcagctggccgggcacagtggctcacgcctgtaatcccagcactctgggaagccgaggagggtggatcacaaggtcaggagtttgagactagcctggccaacatagtgaaacccgtctctactaaaaatacaaaaattagctgagtgtggtggtgggcgcctgtaatcccagctactagggaggctgaggtatgagaatcacttgaacccaggaggcggaggttgcagtgagccgagattgcaccactgcactccagcctggtgacagaatgagactccatctcaaaaaaaaagtaacaacaacaaaaaggcaaccttttccagctctttctggtgaactagattggagtgccattttctccccattgggataatgcctttctccttccacacctgaatctggcagttctgaagttgtttcccagccccagcttctgccatccggtccagactttcgcagagatggtggcgggccctctgcccttctgcatcatgttctaaaatgcgtcaggggagcagggggtacatgctccttacaagaccaggccttgccagggctctcagttggagcctgttttggggtttggccctgagcgccccagttattttcactcttctcgcacaaagctgggtagagaggtcagctgaggaccagaacctggccatcagccttgggcagctaccctcaccagggtctggggggcctctgtgtcctgatgaccccaccccatctacactacactacacttggggcaccccatcgccctctcacacaggaggatggaaaggcgcccgctaggcattttggcatccccaacaaatgagacttgttttttccctaaagcggtttcattcaggaccgcaggggcaggagggctgctgcgtgggccgtcctcctctgcaatgctataaagtggcccaatgcccctctttccctgccactctctggatctacccttagccccttgccctgaaccccatccaccctggcccctctgcctcctggccatcgccccagagctctccccagcacatcaagcatgagtccagcatcacttcctggtcccccgcctccccggcgcctctcacaggcttctcctcggcacctccagttttccagttgctcaggccaaaaccttagcaccattcttgattttttttttcctattcctttcacactccacattcagttcatcagcaaaccctgtcagctctgccttcaaaatatgcccagagtcccctctgctgccaccagcccatccgcgccactgtcttccccgcctgccctgttccaggtttctcctgggatcccccagcttctgcgtttatgaccccttggtctgttttcaatgcagcagccagaggggtctggtcagaacctagttcagatgctctttctcctctgggcagagccctccttggctcccacctactcagggtagaggccccgacagccacctcagggtcccagtgatccttcccttctctctgaaccctctcagcctcctggtctcccctcagtcactgtcctccagccacagcttctcaagcagtcagccacacctgacatgcacccactcacagtgctttgcacttctttccttttctcaaaacttctacacgtctgcactttcctcgtgtctgtgttccaatgctgcctcctcaaagaagccttccttgactaccccatgcctcctgttcatcccagttttttcccaccagtgcccccatcaccactgaacaccactgactgtgtattctgcccatttgtctcattgattgtctcgtttctaaaatgccagctctcaggctgggcgtggtggctcacgccagtaattctaacactttgggaggctgaggcgggtggatcacttgaggtcaggagtttgagactagcctagccaacatggtgaaaccccatctctactaaaaatacaaaaattagctggatgtggtggcgcaagcctgtaatctcagctactcgggaggctgaggcaggagaaccactggaaccagggaggtggaggttgcagtgagccgagatcacaccactacactctgtcgcttgggtgacagaatgagactctatctcaaaaataaataaataaaatgccagctccctggaagcagcggcctctgttctgtgccctcgcgggttgccaggcctagagagtgcccaccccatcgtaggtgctcaggagaccttcccaggatgactggtgactaagtctccacattctgtccccgccagcagcccacccccatctcttccacactcctttctcctctcccgtttctctcctctccacccccactcccaccatctcagcctttcctcctctttcttctcagcctctctgcacacacagggaagagaagactgaaattattcccgggatgccgtccctgggcccctggtgcagctgtccctgccttcacaatggcagccttctctttgcttggctcttctcctgggtttgctccctgctctcttcctctctccttgagtgcacacaagtgtgcacgcacgcacgcacacacacagctcccttcttccctcggtccagctgcctctcatctgcccatcttccctccccctctccggcctgtggggggacagcagagcctctccattcaccccgtggagtgtatccactgctcacagcaggtagccttcctgtctctctgcagcgaacacccagccttccccactgtggggatccgagtatccacgggaattgcacagcccctcctgggacccaggctgacccagcgtgtcctcgagaggcacggatttgccgcctccgtgcacatcttcaagcgaaatttcttcctctaatttgatagtcacttcctttctctaagacctcagatttcaaaataagtgaagcacttgttttgagcaagagtctaaagaattagactccgccttaagcgcccttgtgaccttgagctgagacctcatcccctctgggcgtcagtctctccatctgtgcagcagtgttgtgacatctaagcactagtcacccagtgcctgtgataagacgccaccctgagtgatacgtgacctgtgcccacaaacccaggaggagaggttccctgcgccgtaagaggaagtggccacggggaaagaggaagctgatgtgaggccgatggggcagggtttccgattgtttccaggcgacaccctctctgtcccacccccttagcaggtgtatccacttccctagtggaccacagactgggtggcttagaacaaaaggcgattttcacagttccgggagccagaaccccaaaatcaagcatcatcagggccacgctttccctgcaggcttcaggggagggtcctttgcccttgagttcctgggggttgctgggaatcttggcaccccttggcttgtggccacatcactccagcctctgccttcatcttcatgcggcctcctccctgtgggtccctctcttcccgtggcctgctcctctctgaatcagtgtccaaatttccctcttctgtcaggacaccagtgattggactagagcccgctctgatccagcgtaacttcatcttacaacaccatgttacaaacacggtcaccctcacaggtacctgggcaaggacttgagcatatattttggggaacacattcatctcgtgacggctggtttctttcacacattaaaccccgcccccccccataaaggctgcagagccgatgtcaaactgagcaaacctgccgctcttcccctcttcactgccccagctgtggtcctgggtggggagcagtgtggccgccctgaagatcagctccatgcgtagccttcccttcccaaccatggtttctctcaaggaatctccacctgcagtgggcgttgaaacagctgcagggtcaaaagtgagggaagggtgactgtggtgacagacaggcacaccctgtctcctgggcctcaagaggcttccgggggtttcagagtgcatgagaccttttgtagtcctctcctaggtgctagctgtgactccctgaacattctggaatgagttaggctggagccaaatggcccagtaccgttgccactagccacagggagctatttaactttacgttaattacaattagcatttcagtttctcaggtgcactagccatggttcaggtattcagtaggcgcacatgggttctgtactggataatgcacatagagaatgtttccattggcacagaaaggactcttggacagcaggagaatagagcctatggctgggcctgtaatcccggcacttggaaaggtcgaggcaggaggatctcttgaggccaggagtttgagaccagcctgggcaacatagtaagacctgtatctttacaaaaaatttgaaaaaaaaaaaattagctggacatggtagtccatgcttgtagtcccagctacttgggaggctgaggcaggaggatcacttgagcctaggagtttgaggctgcagtaagccatgatcacaccactgtacttcggcctgggcaacagagtgagaccttgtctctaaaaaagaaagaagaataaagcctaatcaaacaaaatcttttgggagtggggagtgacacacagcactgagaaggggcaataaaaacgcagggggtggtggctgtcgaactttaggtgagtgctttccgtgattcctcatctgtaatccaatctcctcctcctcatccctgcactcacttccccttatgctcccagtaccttgatctgtcttcccaaaccttcctgggtctcgggtcagggtctcaggacaggttcctgttctccgagcagcagacaccatccatcccggggccagcaggttgtgccagcccacacagcgagtcctttgggaatccatccgtgtcgcaggggatttgagcaaatgaagggaaaccgagttcctacaccgaggccgggagcggggcttcctctgtcatccctgtgtgaacccgttctagcctgggggctccaaatgcatagagggctggcaggtagcccaaagcagagaggcaggctgggtggggagggggtgcccagatttcaactgtggactgttcactctactttttaagaatgagcaactgaaaacaccgggcaggcccacagcaaacacacctgagggatggattggtctgcaggccaccggcttgcaaacttctttctaagctggtggttctcaagggagcacaccgccccctaggggttaaactctgtgactgcattgccggtgatggtgaaggatttgactttgctggcttcctgggggcggagactaagaaggactttgatgtcctgctctgcacagcagagtccacgtggcccccacattgcattgtattccacatagcttctgagtttcctaccacatcactcatatgggtagattattttatgtttattgtcatctgagtcttgaacctacgtctattttatatgtaaatactggagggtttttgcatattcccaggaatgtacggaataagaaaatggaggcaatattatacttgagtgcaaaactttcccaagagtcattccttatttctgaaagtcccatccccgatgacagtgctacgccaaaggatttgaatggcaaatgtcgcccgcccacccagctgcccttgtaattgtcacattcccagtgaatctgtgtctaggtgcaggcgtctgcctgactactgtgttgtgccttcttgatggatgtgctgggggaatttcatattgaaatttatcttcattataaattgctttccttttattttccctgtagattgcagttagagcattatattgattttgtggaaatgacatgcataggtagcttttgttacctataaatttcctttcaagaaaacaagggcgctctacaaaatatttgtcatagaaatgggaggtcagtctgatggcgctgagaacagctctttgaaaggtgcaagtagtgtcagattcctccaaggcgataattaaatatccattgagtgacaggccttgttctgagggtctgttgtggattttctccccctcctctagtccatccctctgaacaaaaccacactttaaaaggcacaagacagatatttaagacacagcttgtcctcgtggtgactcagcaggcaataaaacctgtcactagagatggagccctccatacccagctaattgagtttccagggaatgaatgggcctcatcctcatttgcaggagctgcaagacccttctagggagcggatggctggagccagcatttaattaggcacaggcagcccgccctccatgccaccaacacccagagctccgcctggccctgctacaaccagtcagcagggccttggtgtcccccgcagcccagtcttcctcaatagccacagcctcactaaaaacaggcaggcggaagacaggaatgcatggagtggcaagacagaagcagctctcgcctctcgccctggcgatctgcttgtccctgtttgtccccagcaactggccattccttctccccacccacagccggaggacacttttaaaaattgtaaacctgaccacatcacttccggctgaaaacctcctacggctgcccactgctttttggataaactggcatctcctcgccagggctgccaagaccttgtttggcctgggtgtgctcacctctctgtccacatctcctatctgtcccttccttggtgacagcactcaggctgcctagcctctttgttcctcagaacttccaaggtccattcctgccccaggccctttgtatgtgcagttacctctgtctggagcactggcccacaaccattctggtacaagcaaccggtttcgtggaagacagtttttccacggactgggggtgagggatgttttgggatgattcaagcgcatttcatttagtgtgcactttatttctaatattatcacattataatatgtaatgaaataattatacatctcactataatgtagaatcagtgggagcccgagcttgttttcctgcaaccagatggtctcacccgggggcaatgggagacagtgacagatcatcaggcattagattgtcataaggagtgcacaacctagatcccccgcatgcacagttcacaacggggttcacgctcctatgataatctgctgctgatctgataggaggcagagctcaggcagtgatgcaagtgatgggaagcggctgtaaatacagatgaagtttgctcactcgcctgccactcacctcctgctatgcagcccagttcctaacaggccacagaccgctacctgtctacctgtctgcagcccaggggttggggatccctggtctagagcgttgttcacacactgcggagaacttcctccatccattctctcttccttcctgcccttcctgtgtcggttagtactcctcaaccctctcattctcgaccatgacacccggctttatgttcttcttaggacttctcgcccccttgaaattatcttgcatgtttgtgaacttttttttttttcttttttttgagatggactgtcactctgccacccaggctggagtacagtggcatgatcttgactcactgcaacctccaactcccaggttcaagcaattcccctgcctctgcttcccaagtagctggaactacaggcacccaccactacactcagctaattttcgttttttgttttggtttttttttgagacggagtcttgctctgtcgcccagcctggagtgctgtgccacgatcttggttcactgcagcctccacctcccaggttcaagcgattctcctgcctcagcctcccaagtagctggcattacagttgcatgccaccacaaccggctaattttttacatttttggtagagatggggtttcaccatgttggccaggctggtcttgaactcctgacctcaagtgatccacctgcctcagcctcccaaagtgctgggattacaggcatgagccaccgcacccagccaatttttgtactttagtagagacagggtttcaccatattggccaggctggtctcgaactcctgacctcaagtgatctgcctgcctcggcctcccaaagtgctgggattacaggcgtgagccactgcacctggcgagtgaacttgttttttacatgttttgtttgctgcccatccaaaaatagcaccaggcaggtattgggtactcagtaaagatttgaacaaggccaggcacggtggctcacacgtgtaatcccagcacttcgggaggctgtggtgggaggatcacttgagcccaggagttcaaaaccagcctgggcaacatagagagaccctgtctctacaaataattttaaaaactggccaggcatagtggcacacacctgtggtcccagctctttgagaggctaagatgggaggatcacttaagcccaggcctttaaggccgcagggagccatgatcgtgccactgcattacaacctgggcaagtgaaacctcaactcaaacgaataaaaaaaatgaacagatggagaactcttgggccttaggcttgaagtcagcaaaaaaataaaaacaaaatggaatttagattactatctcatttatccagcatgaagaaacataatcgaaattagttcaggcaaactttgccaggtcccagtgctcaaacgctgtcagaaccctgtctttctgcttcttgcgttttctgtcattgggttggctttattaggaaggttccctctttgtgatggcaagatggcccccacaggtccatctccccagtgtggtgaccccagctgaaagagaggcctctttccaagggctccagcaaaagttccagggaaagctctcattggctcatctagggtcttatgtctctttcacccaatcacagcagccaggcaaaaggagataccctgattgtccaggccaacctcatgggcctggtccaggattcagagctagaaagagcctcatcagaacatgtaaggctgagaaaggggaaagattggttccctccctctttggtgactgaaggcacaattatgaaaagacaggagaatggattctgggcagaaaaataaaacagatatccactatagaaacccacatgcaggccgggcgcagtagctcacgcctgtaatcccagcactttgggaggctgaggcgggtggatcagttgaggtcaggagttcgagaccagcctgaccaacgtggtgaaaccccgtctctactaaaaaaatacaaaattagccaggcgtggtagcgcatgcctgtagtcccaggtactggggaggttgaggtaggagaatctcttgaacccgggaggcagaggttgcagtgagccaagataatgccactgcactgcagtctgggtaacgagtgaaattctgtctcataaaaaaaaaaaaaaatagcttcttcttaaagggcaagtgggaggagagcatttctcccagcccccagctcgctctgcttccaacataagatgcctctttcgtgcggaatcatgaccccaccttcctcatttgttttcacacagctttcagttcagcaagatcccatctctggcatccagaacttttatagcattgatttatcacttcgtgcagtgatttgcatttggtattttttttttcaaaagcagaagaactcgactcaggctgtaaccttgcaaagcagcacaaagttaaaaggatccagttacagaatatcagaaataccccagccctgagagctgtggagctctgggtttatttaatgcatttcttgccagccctgcctcctcagccaatttgtctgccaaaaaaacaaagacttcagtcctgtggcatttcacatctaatatttatgctgttctagagtttgcaaaagggcttccttttcatttatcactgttcctcaggaacctccagctcccctgctaggttaatgggattgttctctgctgcccagaccgggagccccaggaagccaaatgacagatcatgaaagtggcccagtggaggactcttctactggtgtcaggggtaggatcaaaactcagcctgaaccagctcagtttctattttgtgaccctgggggccaaatatggatcttgcaaaatggcagctggcagcctgagtctacacttcaaccccaaatttctgtcagagttacaagatgctttttaaaatctggaaatttaaccaaaaatacccagattacaaacttctctttaaaaaaaaaaaaaaaaagattatgataggcctgtaatcccagcactttgggaggccaaggtgggtggatcacttgaggccaggagttcaagaccagcctggccaacatggtgaaaccctgtctctactaaaaatacaaaagaattagccgggcgtggtggtgtgcacctgtactcccaactactcaggaggctaaggtgggagaatcacttgaaccaggaggcagtggttgcagtgagccaagatcatgtcactgcactccagcctgggtggcaaagtgagaccctgtctcaaaaaaaataaaataaaataaaggccaggtgcagtggctcaagcctgtaattccagcactttcagaggccaaagcaggtgaatcatgaggtcaggagatcgagaccatcctggctaacaccgtgaaaccccgtctctaataaaaaatacaagaacaaaattagccggtcgtggtggcaggtgcctgcagtccgagctactcgggaggctgaggtgggagaatggcgtgaacctgggaggtggagcttgcagtgagtgcagtggcactccatcctgggcaacagagcaagactctgtctcaaaaaataaaacaaaaatttgaaaaagataataatgataatgatggtattgccattactggtaacattcctgcatggtggagattagtaaactgtggcctacaggagtctgctgccaggttttacaaagttttctggaacacagccacacccattagtgtatgtactgtctgtagctgctttggctctacggtggcagaattgaatcattgcaatagagaccttatggctgcatagctgaaaacacatagtctggccctttgcagaaatagtttgctgagccctcctaagtggcgccagcccactggatttgtgccacagatacccccaggatttattagaatataggtggagttgagggtacttcagtccctaattaacagcggattagagatgataggtgcttatttctctcccatttgacagtttgggcataaacagcctagagatgatgtggcaggcatggtgttggctcccaggctcctgatgggtgatggtcagatggcgttccatcatcctgggcgatcgtccttatctaaagcagcatcccatcctgtctgcatccaaccagcaggacacagaaactataagggaagctcacttcccttcctggaggggagtttccagaagtcacacaccacctggtgtacccctccagttcatagaaaatacagagaattacaaaggaagccagttatatgaaaacatatttatcaaaatattttataaactgtgatatgtatgcttctttacacataaaatggcacgatgaagcagttatttaatggacaatggataggtctgataacttccatgatttcgaagtagcgctggctcaaatgatattttaagaagtccatgttgactacaatgtgatatgaaaatatccgtaattcccattggtgacaaagtcccagggaccatcattcataattgaaggggatgctagttataggttaatgaaaataaacaaatacatacttttgccattcaatttcaggaaattatatcttgggacaacagattaagaacctcttcctcaggtgatctgattcgattccatggcattaagtgccatctaaatgcttacagctcctcagtttgtaattccgtagcttttctgtgaacctggtctgtttccacctgaatgtctaacctgagtctcgaggttaatgtgtctgatttctttatcaacccccatccccaactctgcccctcccagtgtccctttcctaaataagggcaaatctgtcctcctcattgcttggaccaaaaaccttgagttatccttgactctctttacttctttcgcatgccacatcagcaaatcccattggttccacctttaaaaatagcctggaaccaaccacccaagcccttcgcctgccacgattgtggtcatcacagtctgtctcctgaatgactgtgagagtctccaaacattccagttccctgcctcggactggccttaattctaggacagaagctccaggaagatgcaggttttttgctgctttaattttttctgttttgttcactggtatccccagtgcctagagccatcccagccacacaggagtcctcctttaatgtttactgattgaatgaatgaatatataacatcatgatcaataatattatgataaaaacagtaaccatttagaggcagttaacatattttctcattgaatctttcccagcaactttgtcatgtagggatattattattattcctattttgcagttgagaaaactgagctggaaggcagaggtagctgaacttaaatgcaagctgttggctccagagcccatgcccagccctcagacctgcctgcctcggaggataaaaatcatttctgaggccaggccaggtggctcacgcctgtaatcctagcactttgggaggccgaggcaggtggatcacgaggtcaggagatcaagaccatcctaaccaacaaggtgaaatcccatctctactaaaaatacaaaaaattagctgggcatggtggtggcgcatgcctgtaatcccagctactcgggaggctgaggcaggagaatcgcttgaacctggcaggcggaggtttgcagtgagccgagatcgcagcactgaactccagcctgggtgacagagcgagactccatctcaaaaaaaaaaaaaaaaaattatctctgaaaccctacacttctggaaagactgatctggataacgactatggctcctacctgtgtcccccacctatgcttcaagaaaggcaaagtgcccgggtcctgggaatgaccttccttcaaaagcccacggccggatgaattctgggaggatgcagcatgggaagataacctcagtgtggaaattccctttgcctggaattctggcagaaagcacttcggagatagtctgagccacatcggagaggaggagctctcggaggctgagtcccatttgtgtgtgtccccacctttagccatggggcagtccctctgctgttccctcttccctgcctctctgcgtccccgtggatgggaagagctccagtctgtggtcgctggagtcctgctgagaggctgaacagggtagtcaccaaaaggcaggtggagacagacaacctgggattgagcctcatttcagctctgacacttggcagttgtgggatgttcggtgaaaaggggactttgcctctctgtgcctcagtttctccatctgtaaaatagggaccaaaaaaaggatctacctcactgggatgttgtaggtcatcgtctaaaccagtggctctcaaagcgtggtcccaggatctctagactcaaaactattttcatgataataccaggacactgtttacctttttaccgtcattttccttctggtagacagtggagttttctagcaggtacatagcatatctagttatctaaaaaggattaaaatactcttcccttttccatctgcatacccattttattttattttttagaaatagggtctcgcttgtcacccaggctgaagtgcagtggcacaatcacagctcattgcagcctcgaactcctgggtccaagtgatcctgccacctcagcctctcgagtagctgggaatacaggcacacaccaccacgactggctatatttatatatatttattttttagtttttgtagagatgaggtctcactttgtcacgcaggctggtctcaaactttttgcttcaagcaatcctcctgccttggcctcccgaagtgctgggattacagacgtgagccactgtccctggcctgcatgtctgtgtgaggctggatttttcatgttaaacaaccaaaacaatatatctcagcagattgaatgccaaaacagatttaagaatcctgctgccttccagtaaacaagacattgaagagattggcaaaaatgtaaaacaatgcaactcttctcattaattgtattttgtttgggaaaaatatagttatttatctttttttctccccaagacagagtcttgctctgtcactcaggctggagtgcagtggtgcaatctcagcttactgcaacctccacctcctgggttcaagcagttctcctgcctcagcctcccaagtagctgggattacaggcgcccgccaccacacccggctaatttttgtatttttagtagagacagggtttcaccacattggccaggctggtcctgaactcctgaccacataagtcatcacgcccagcctctatttatcattttttaaatgtatgctaacaagtagtgagtttattatttaaatgagtgaacaaatatgttttaaatttctcagttttcatctctaatataataactatcactagatataaccaacatacacaggactctgggttccttaataaattttgaccatattgaaaagcactgctgttgccttacactgaccttgagtgcttttttggttttataaagcacatccacaaatggaagtcatgtcccgtgtgggccaaatagatccaagttcagccagccaaacaccatacaagcaaataggaagacaagaatttaacaattctacccactcctccactcacagagggtgtgcaccggatgataaaaaaacaaatctacgttctcagccaggcgcagtggctcacgcctgtaatcccagcactttgggaggccaaggcgggtggatcacttgaggtcagctcaagaccagcctggccaacatggtgaaaccctgtctctactaacaatacaaaaattagccaggcatggtggcgaacacctgtaatcccagccagtcgggaggctgaggcaagagaatcactggaacccgggaggcagaggttgcagtgagccgagatcgtgccattgcgccccagcctgggtgacagtgtgggactccatctcaaaaaaaaaaaaaaaaatcgacattccctcactcagctgtgtctcccacaggcctcccattacgaggtgttcgttggttcagttgtttacccatttattccacaaacgttcatcgaggtctcgtcactgaccaagctctgttctagatgtgaggacacaggggacaagggactcagaaagccgctgccctcatggggctggtactctggtgggagaagcacgtgataaaaactagaagacagataaatatgaccagtgaataaatatgtggagaagcaatgtcgggggaaaggggagagcctgggcggtgtggggagatgccatttgaataggagggttaggattgagccccagtaagttaacatttgaggctggacatggtgactcacacctgtaatcccagaactgagagaggccaaggtgggcagatcgcttgagcccaggcattgagaccagcctgggcaacataatgaaaccctgtctctacaaaaaaaaaaaaaaaaaaatacaaaagttatctgggcatggtggcttgtgcctgtggtcccagctacttggaaggctgaggtgggaggatagcttgagcctggggaggttgagggtacagtgagccacgaccgcaccactgcactccagcctgggtgacagagtgcgaccctgtattggaaaaaaattaaaagctttgagcaaatagctgggaaaggtgaggaagcagcccatgcaggtatctgaggaaggtgatttctttcaggtaacagcaagggcaaaggccctggggcaggtatgagctttggggttggggtgctggtaggatagagggagaccccaggacaggaggctggggggaaagtgggggcagatgcagtcacggagcaggacaggagacagttataggactttgtagggcatggcaaggactttggattttagttgaggtggatgtggagccactgaagggctttgcacagagtggggggcttgatcaaatttgtgatttaatgggatccttctggctgctgtggaagatgggctgaaggtggaggcaggaggaccagggacgaggttccagcaaggtccaggcagaggcagtggtggcttggaccaagatggtgacaggcggatgatgggaagtggtcagacctggatgtgtcctgagggtgaagctgctgggacatatgtgagggaggacagaggagctgaagtcccctccatggtgcgtagccttgacccactggcattgacggatgtatggatcacagggcgaaaatcaagaggccggtgtgaagtgctgatttgacaccaaatgaagtgatttgaaggaaattactaagtatgcagcggtccaaatgatacataaaaacggccaaacgtgtgtgagaggcacgcggacaactggaattgagatgatgccacgaagggcaaagaccccgttttgttttcgcagactccgtgcctgcgaaatggcgcgggtctgttttgggaaggacggactttccacaggcttctgcttcatctttcgccgacctctctgaattgctttggcaaacactgtttattgtcattggctcggctccgcgctccagcccatctctgctgatagatgtgtgtcatgctcagccgacttcactgtgcggcatgaacactcctccccaagctcattactggagtctcggaggggccttgccattttccaaaacggtgtcacatctggtttctaacaaccatttttatttctccagaggtccaagttttcatccccctccctgaaaacggaaagcagactgtattttgggaactcacagttcttttttgtttctgtttttttgttttttattattttttttttttcagagacagaatctcactccgttgcccaggctggagtgcagtggcacaatcatggctcactgcagacctaaactcctgggctcaagtgatcctcctactttggcctcccaaagtgcttggattacaggcatgagccaccacgcctggccctttttcagagttctttatgcacaatctcatttgttgctgcccccatttttatagaagaattcactgaggctcagacaggagcactcgcttgcccaaggagtcagagtcctctgactctgcaaaccaagctctttaaagccacactgcaaccctgtcgttaatggtacatttggacaactttttaaactgtgcactttacacagagtttcacaacctcggcactggtgacactttggggctggatcattctttacggggggaggagggccatcccatgcactggaagatggtcagcagcatccctggcctctgcccgatagatgcctgtagcacattcccccaccccgccaggtcatagcagtgaaaaatgtctccacacactgcccagtgtcccctgcagggcaaaatcacccctggttcagtgtattctgcacacagatgtgcttcaggttggcagccctgcctgctccgttgacccatttttttcagcatgtagcactgtgctgcagacactataatagaaatcccttcctttctttttctccccccacccctgccccccagacagggtctggctctgttacccaggctggagtgcagtggcaggatcttggtccactgcagcctccgcctccacttcctgggctcaagcgattctcccaccccagcctcccaagtagctggaacgacaggcgtgcagcaccacacctggctaattttttggttttttggtagagacagggcttctccgtgttgcccaggctggcctcaaactcctgagctcaagcaatctgcccatcttggcctcccaaagtgctgggattacaggcgtgagccaccacaccaggcctagaatccctttcagtaagacatgcagttgccacctctcctgcactcctgggcgaggggtgtgacgcttaacattagagggcgctgccccaccttgcacagctgtgtacctcaatcaggtgcacctacccagccctcctgtcggccactgctcaccgtgtgcacactctgggccaggtactgcgctggggctacagtgcagcacggctcctgccttacggaccccacaccctagttggggaaatgaggataaacaagaaaacaaatgcatctataggataatttcagagagtgcagagtgctgtagaggaaataaacagcccggtgactatagagggatgggtgaccagggacaacttctcatctgacctgaggtgccacggtgaggaggaggcaggcgtcccaggcagaaggaagagcaggtgccaatgctcggtggggtagagagcttggctcctagggagcgtgagacctagagaagttgaaacagagtgagctcagcagtgcgtccctgaagggagacggcctgatggctcttggactcagaagggccctctggccatttggggaagtctgggctctgggaaggctgcggaggcagaagtccagttggaagttggctgtgagaaggaaacaggtgaagaagcaagatgcatttctgtcttttttgggattttatatcctgtgtatatgtgtatgttgtgtattcgtgtatgtgtgtatatgtgcttttactgtattttcctgcatcgtgtatatgtacatatgtacctgtatattcatgcattgtgtatatgtgaatgttgtatatctatgcatgtgcgtatgtgtgccatatattaatgcatatgtgtatttttatatgtcatgtattcactcgtgtgtatatgtgtgttgtatattcatgtatgtatatgtagtgtatttgtgcttgtgtatatgtattcatgcatgtgtgtatatgtatgtgttgtatatttatgcaggtgcgtagatgtgtttgtgtgctggttccaaaatatgaggacaaattgccaaatcaaagtgaataaatatttaatgaaatggtgttgcatgattcagcgagtcagctctggaacatttggactcttagagagctgtttgtcgattacctttaatgtagtgtgtgggtggaaatggtgtgggatgaacatgtaccgaaagttgctgatgtccttaaagaagccctgttggtatttccagccagatggcccgtcgtgggggagagaaagtcctccgaaagcagcgggtgctttctgtcctgctggctgcctcttgggaggcccctaggacagatcaggtcctgtttcacccttcgcatgcctgtcagttcatccacgtgcatagcagtgggtgggggtgcactgtcgtttcattgccaacaaccacaggggacaaagtcctttgtggtcccacagctaggaggtggcagatccaggattcaaacccagacagtctgactgcagagacgctttgggcactctgccacattaccacctgtgttactgggaaaagggagaactgatgctgggaggaacagcgtgttcctacgccggcccggcatggcggggacatgtctgcagcagggagaggtggccgaggttcccagtggtttctggttgcaggagccctctgtctcccccattgtccgtggcttgcttagtatccccagtgatgccgtgtgtgcccctgtgccaggtttttcaccagctaatctcagtccctggtcgccacgagacacagctttcacagaccacaaatgcaattattacaaggcaatttcagttagatttggggctgggagagaaaacagaagggtctcctcctcccatcaggctccgaatcgttccccaggagcacttaactcagacaaatggggaagcagccgcgtggagcctccaccgtagagctgcctgcaggggaagtggccgacctgctgggccacgaagcagggtgcaggaaggatatggggagctagtgatcctctccaagggggcagggggactccattaaaccagatgttaacagcaagaagttggctataacaggggacgggcccattggtggataatgaaaatataacccttagtaggcacttgctatgtgccagttccaagcaatgtacagtcgtgtgtcacgtaacaatggggatacatgctgagaaacgtgtcgttaggtgattctgtcattgtgcgaacatcatggagtgcattacacgcctggatggcatagcctactacacacctaggctctgtggcgtgacctattactcctaggctacaaacccccctacagcatgtgaccatactgaatcctgtaggcggtggtaacacaatgggaagtatttgtgtatctaaacatacgtgaacatgttaatagagtacagtaaaaatatggtgggcatggtggctcatgcgtgtattcccagcaccttgggaggccaaggcgggaggatcacttgagcccaggagttccagaccagcgtgagcaacatagtgacaccccatctctactaaaaattaaaacattaggctgggcacggtggctcacgcctgtaattctggcactttgggaggctgaggcgggcagatcacctcaggtcaggagttcaaggccagcctggccaacatggtgaaacctggtctctactaaaaattaaaaaattagctgggcgtggtgttggacacctgtagtcccagctactcgagaggctgaggcgggagaatcgcttgaactcaggaggcagaggttgcagtgagctgagatcatgccactgcactccagcctgggagacagagtgagactccatctcaaaaaaaaaaaaaaaaagtggtttcaggtaagagtggatccccagggcctcaaaccagcatctctctatctctctatctcttgtatctctctatctcttctgtctctctgtctctatctttcccacctccgcatttttccatattgctttacacacacacacacagactcttccctcttggtggcaagatggctgccagcagcttcagttatgtatcccaccagttccaagccttgaggaagaagaccttctcttttctagtagctccctaaaaatcccagggctgactcgctgcagttggcccagcttgggtcacatgcctttgcctcaactaaccagtttgtgcatgatcaccaggggaatgcggtcctcatgggagtcaaggatttgcacacattcctggagtcaacagtcaaggtcagcccgtgcaacttaaataaggaagtgttggtgcccaaaggatgacagagccaggcaggtgaagcttccacctagtgctgggcacacaggaggcagtaagtgctctggcctttcagcagatgccagccctgctgcccaggggcagtcgccagccagctcattgtcaatggcctttcctggcctgccattaattcctcttaatctgcctgccaaattttcccacccccacgccagcccccagcttgcccctcctcttgtgctgtccttgcctcgaaagctcagcgaatccaagcttcccaggcaccagccacctgccacaatttgggctgggcttttaatcttggttttaattccagctcattctcttggctgtatctcccagcccaggagccccggggcccatgctaatttgcttctcccacctccactggtgccggaataaccatttttaaaagtgccttggggaaatataatcaaatgagagcaaaatctaatttggcactaaaagcctctgactgaagccctgttttctagggcctggtggagactgaataatacaccctttttgggtttttaagggttgggggttggagaaaggaaagagacgtgaaaggggagatgctagcagaggaaacagcttgcattaagctgacatccgtggcactgaaaagaatgggcaggaggaggacccccacccactccctatgaagaaattcatatcccagcagccaagccaagaagctaaactccagcattcatcagaaagaccttggcccaagtcttcaagaaccagtaggttcactggctggagatttggaagatgtgggagtgtagcgggaaacccagttccccagtggggagttcagtgaagcctttttctctgactttcagttcacttttctgcaaactgagggggtgaaaatctgtgcttcttaaatgacttgtgatctgggctcctttcagaatgtgtcaaaagctgtggacttgtttccaggaaaatgcacaaaaggcaaaatctggcatgcaatgttccaggagcggtacgaaccctgccactcctcatgacagtctccaggaccctatgggatctgtcccctcttccccgtgatgtcatttcctccctccctcactgtcccccttgggttctgcgatgcccccacgtttgtactggcttcagggactttgtacctgccaattccctctgcctggaacagttttcctcctatcccctctgactcttgctcttcagcccagcgaggcctctcacagcactgcgtggggccactctgtcctatcattctcctttattttcttcatcgcatttgtcatcattccccactagaacatcaactgcacgagggcagaagggatcctggtggtcttgttcactcctgtgattccagtgcctgggaagctccctgcataccgtaggtgtttaatcaacacttgccgaatggatacaggcatgcataccttccctagggcagtgggaccccaaattcagcaatttcgagtgccaccatcatgaggtgtaccatgcccaggtacactgattctgttaacattttaccctagattgtttcactctggacttcagttgtttcaaaaggaatcttttacatcactgacagtattgtttgccacgagtagaaagtgtcggggctctgtaggggtgtaacaaaaacgcaggtaataagagcgagatctggtataaagaaagtgattttttattccaaagctagcttaggggaagaagtacagtcttcctgccttaagggtactgctttgcttttaggagcagaaaggagttgctttttaaaagggggcctggcatgaatggcacacaggggaggaattgagtgctgggggggtccgcatatctcactcgagtacttcatctaccgggaagtcagctggcagccactggtgcctttgtgggtggaactaggttgtaagggtggccagaagctctccacctgggagggagtttcgcagcaggcatactttgggttgtagtggaccattgtctctcgaggcaacctcccagtgagtgagagttccgctccagagcctctaagcacgtgattagatgaacttgccctgaagagagtgtctggtgtaggggagataaaaggttataattgcatttctaaagggcgaagtggggcacggggaaaatggagaaaaaagaagaataaaaaataataaaactgccggacagggtggctcacacctgtaatcccagcactttgggaggctgagatgggtggatcacctgaggtcaggagttaaagaccaccttggccaacatggtgaaaccctatctctactaaaaatacaaaaattagccaggtgtggtggccatgcctgtaatcccagctactcaggaggctgaggcacaagaattacttgaacctgggaggcagaggttgcagtgagctgagattacaccactgccctccagactgggtgacaagagcaagactccatctcaaaaaataataataataataataaaactcatctttttcttagaaaaaatgggaataccgatttatgtgggggcttattaaattttaccctcttccttgttgaggtcctgagccgattaagaaatcagacccaagagtcagctgatgaaagtcaacactgcactctgatgaatctggtgaaggctgggtttgagggcatggcttccttctgagagcatttgggcttcctgactaaactccagagtgtgacagacttcccactgatgcaggtccacacctctcctccccgcgcagacaggacaagcctcctgaaaactagccctccccgggggcagctcagtccccagaggaaaagcaagggaagggattgggctatgcatgcccacttcggcccttcaaatccactaggcacatgctaggggtcagcaaaccacagccaatggacctaaccaggccctccatttgttttagtaaataaagttttattggaacatacccgcccacttgtttatgtcttgtctgtgacttcttttttttctttctaacaatagggtttagcagttgtcacagagaccctttgaccctctggcccacaaagcctaaaatactgactatctggcttttacaggaaaggtttggtgacctctgctgtatattgtccccctcggaggaggtacgggagagcatggagagaggccaggagtgttacagaagtggagcccccccgcatggagggcagcgttagaggtgggggtcaaggtcacaaggtttaggaaatcttgtttcctgaactacacttggtctccaggggccttcctggctctcacaatatggctccaaagacctgaggggtgagatgctggagggttggaccataggcaggtttatttaaataagatagggtttctcagcgacgtatggtggctcacatctgtagtcccagaactttgggaggccgaggcaggtggatcacttgaggtcaggagttcgagaccagcctggccaacatgatgaaacctcatctctactaaaaatacaaaaattagccgggcatcatggtgcacgcttgtagtcccagctactcgggatgctgaggcaggagaatcccttggacccaggaggcaaaggttgctgtgaggcgacatcacgccattgcactccagcctggaaaacagcgagaccctctctcaaaaaaaaaaaaaagaaaagaaaagaaaaggtttcttggattaggcgctgctgacattttgtcctggctcagtctttgtagcgtgggggctgtcacgtgcgtcggcgaatattgagcagcatccttggcctccacccaccagatatcaacagcacaccaagttgtgatgaaaccaaaaatgtctccagacattgccaagtgtctcctggggacagaaattaccccctttctggccaagagccactgctttgaggagctggatgcattgaggcatctccaacattccaggtcccagagaaagagaagtgcaggcctttagcttgcccgggaatctcatgctgcctccactccatcagttactccctgacacctagccagggacgcccagtcgctgtttaattaggcacccaccacctaattacatttcactctgtgaaaactggatatgactcagactcagagactgcagccggttccccgcctcctcctctgcagaacgccaggttcttcccgtttatttttgctccatcctcccacacaaagggaggttccatcccggaccttacccctgaggctgctgggggatcctcccttcctattttcacctcccctgtgtacccagacccttacaggaggtgtttcatcagctcctccctctggagcggtcacctcccggccctgcatgatgggcaagtcatttaatgaagtgctcccctttgccttgtattttgggggtttcagaatccagccgcttgggttcctaaggggttttcccactcctggaaagtgtcagccatctgccaggtcaccaggaaaaccgctgcagagggagccagctccatcacagctcccccagggccaggtggctctgtgctttctccaaggacactggtggataggttgtcctctcctctaggggcaccagagccccatcccacccactctcctccttcctctgggggttcacctccctggcctttctctcttcatcctggcttctcggccaagcactcacgtgcacaaggcccagcgctgagctgtctgttagcaagatctccttacatccctacaacctcctggaacgctcatattctgtgctctcagcaatactcgtcagaaatttcagaaccgcagtgtcctcatctagaaagagacgactagaataggattgctgtctctagactcaaattttcccatttcttaaatatggctttatagattataattattaaaaattatacatgcaagccagacacggtggctctcgcctgtcatctcagcaccttgggaggctgaggcaggcagatcgcttgagctcaggagttcaagaacagcctgtgcagcatggcgagaccccttctctacaaaaactacaaaaataagccaggcatggtggcatgcgcctgtagtcccagctactcgggaggatgaggtgggaggatcacttgagcctgggaggttgaggctgcagtgagccgtgatggtgccactacactccagcctgggtggcagagtgtgacgtgtctcaaagaaaaaaaaaatgtacatgcaaaataaaaacagaagaggatcatgaagaggtcttgtctgtctccttatcacagagcttttaggcacatccccttcctgatgaattagggtgattttctttaagctttgttgttgatgtaaagcgtgcatgtggaaaagtgcatggctcccaaatctccaggccaatgaggtgtcaccaactgaaccacctgctccagcaagaaatagaacaagatcatcacccgagaaactccccttgctgctcccagccaccctcccccagtctccaggatacccactgtttttattctaacatcatagattagtttggcctgttctcaaatttcacatagatgacgtcatatggcatgtattcttttgtatctggtttatctctcttaacattcttaggttgttgagatgcatccctgttcttgaatgtagcactaggtctttcgttcaagtttcaatgtagccttccgttctgtaaatatgcaacaatttctttacccatccttttgttgataaacatttcatttgtttctacctatttactattacaaatgtgctgtcatgtcttgtacctgagtttaggtgagtgtatgaatacttttctgttgggtaaatacccaagatttaaattgttgggtagaagttaccaatgcattcaaatttagcagacacagccaaagagttccccaccgtggttggaccggttggggcagccactcagtgtgtgagggctcaagttgtcccacatccccacccatactaggtgttgcccatttctttaatgttagccattctggttgctgtatagcagacagaatccaagggatccacaaacttcaatgggaaaaaaagtgacactctggttttcactaacctacagctgagacttagcatttgcttccaatatgagcataagccataaaccacagtatgttggcagaatctgtagctttgtcatctgtagaaatcaccagtatttaatatcccattgcagtttttgcagatactgcaaaatataatattttcactcataactattctgaaatgatcgctctctacaaggttttaaaagacacagtaggccaggtatggtggctcacgcctgtaatcccaacactttggtcaggagttcaagaccagcccggccaacatggtgaaaccctgtctctactaaaaatacaaaaaattagccaggcatggtggcagacgcctgtaatcccagctgaggattactcgggaggctgaggcaggagaattgcttgaaacctgggaggcagaggttgcaatgagccaagatcgtaccattgcactccagcctgggtaacagagcaagactccatctcaaaaataaaaaataaaagacacactgtatcgcaaatgtgtttagtattttgataaccgtatttccaaacaattgattttctctgtaatcctatatcttgtattcaatgcacgtaataacattggagaagggatccattgctctgtgtgccagagggctccatggcagagcaggtgtgcatgctcaggcctcggacacacaatagtttaataaacatcgtcaggcactttctcacgtggcctcctgatccatctccctccgcagctttcttcgggaagtatcttaatgaatacaacggctcctacgtgccacccggctggaaggagtgggtcggactccttaaaaactcccgcttttataactacacgctgtgtcggaacggggtgaaagagaagcacggctccgactactccaaggtaagctgcaacctttccagcctgggagtggctgtgtggcccagcagttagaggcccaactcaggagccagactacttgggttcagattgtgactcaggcacttaaaagtgtgaccttgagcattttacatacacctcctcctcagtttttcatctctcagccagggacagtggctcacgcctgtaatcccagcactttgggaggctaaggcaggtgaatcacttgagtccaggagttcaagaccagcctgggcaacatgacgagaccctgtctgtacgaaaaaaatacaaaacttagccgggtgtggtggcacatgcctgtggacccagctactagagaggctgaaatgggaggattgcttaagcccgggagtttgaggctgcagtgagccaggatcttcccactgctcttcggcctaggtgacggagcaagactctgtctttaaaaaagaaaagaaaaatgtattcatttctcaaaaaatagtgtctgtttccaagagtttggttttttaacattttgccgagacagaatattcttacagaaagtacatacacagagtgtaccattcaaaggcttgccgcacactgaacggacatgtgtaatgagcacccgggtaggccaagaagagaatgtcaccaccgcccgcagcagtcccctcacggaattcccccgactcgacacccctcccgcgaggataacgatgattcagactcttagcgttacagattcactctgcatctggcttctcctgcttagtattatgttgagttcattcttgctgcccagcattccatcatgcgcttataccacaatttgtttatttcttctacttttattgggcatttaggtatttccagtttggggttattacaaatagcgctgctgagcactgtctagaacctagctcctggtgagcatagaggctcatttctgttatacccgttcctcacagcagcgttgctgagcacagggcgtgtgcatgttcggagtgagtgggtgctgcctgagcacctgcagcagtggttgatcctcagtcgtagttttttctgtttttaacataagatgaattgacatgaggtaacatgcacagatcttaagtggaccgctggatgaattttcacatacgtgtgcatctgtttcaccgcgcatctcttccacatatgcgtgcatccatttcaccgcggctccgatcaagacatagagcacttccagaagactccctgagacccctctccagtcatgaccccccaccctggggatgacgtctactctgacttctgacagcgtggattatttttgcctattctagaacttcacctaaatggaatcgtatagtctgttctcttctgcatctgccttttttcacccagcgcaatgtctgtgagatctgtattatttattcattcaacaactcatggacattttggttgtctccagtttgggtctattataaactaagctgccgtgaacatctttgtccatggcttttagtggacatatgcacccatttcttttggttatacacccaaagaaggattgctgggacataggatgtgttaagatgttgcgcccggccaggcgcagtggctcacacctgtaatcccagtactttgggagactgaggcgggtggatcactttaggtcaggagttcgaggccagcctggccaacatggtgaaaccccgtctccactaagaatacaaaaattagccctgcgtggtggcgggcgcctgtaatcccagttactcgggaggctgaggcaggagaatggtgtgaacccgggaggcagaggttgcagtgagccgagatcacatcactgctctccagcctgggagacagagcgagactccatctcaaaaaagaaaaaaaaaaaaaaaaaaagatgttgcaccagtttacactccagccggaaatgggagttgccctgcatcccttatcagcacttggtgttgtcttttttgtcagggctgctttgttgggcatgtagcggtgtttcattatggttttaccacaaaggtttttgaggatcacgtgagttagtacatgtagaacattagaagcgccccttgcacgtagtaaatactcagtatgtagtagcttagatcagggcaacaaatattttctgtaaagggccagatactaaatattttaggctttacaaggcttacagtcctgttaccactgcagaagtctgccgttatagtgtgaaagcagccatagataatatacaaacaagcatggccatgctctaaggaagctttgtttacaaaaacaggcagtcgacctgcttggctgtagtttgctgacccctggcttagatgatgaggaggagaaggaggagaggctgacagtgatgtttcatccagatgtcccattttaaaagaaatatggaaatgaacaaatcttcctgccccatctgaatcctcagagtcagctctgacatccccccacagctggtacattctttccccagaccagctgccaaatccatccctctttctcttttcccatccccactgccaccagtcctgggccctgcctactgtgacttcccaggttaaagtcactagagaacaggcagtcactgaaagagggtagcaagccaggagtgtgtggacaatagggagtggtggagacggtggagaaggtgtctgtccaaaaggggcagatcaggcccaggtagaactgtgggcccagatggccacttttcctgatttttcaacagaagccacaaatttgtattttttacctatgaaatctcctgattggtaaatattggcaactaattcagacttttctaaaatcttgcatcaattgagcatgcctgacccatgggcctgcagcccttcagcccaccatgtcgttcttctgccagcaccctccggggactgtacggtgagtttcacatttggagtcagtgggatcaagttgagagccccaaccttgacacatattacgtgaccttggacatgctacgtactcctaagagcctcaactcccaaatctgaaaaacaagcatacccttgcatacttaatcatgtgtacttccatttactgagcacctactgtgtacccctgagcacctactatgtagtgctcaggggtacacagtagtacttctgataacatgtagtacttctgatattcacaacaatcatatgaggggagtggactagtcacatttggttccattattcattcaccacccccaacaagtattcattgagagcctgctgtgtaccaggtaccatgccaagtgctggctattccaaggtgaatgaaaacagatgacccaatcatggtcctcctggagctcacagtctggcacatgaagatatgatataaactgttaagtgatgtgcacacatcattaatgcacacacacacagtcacatcacacccgtctattttgtcatccccagtatgagccatttcaacctccaagcttgctagttattacagtcatctcagttttgttttgttttttgagacagagttttgtgcttgttgcccagactggagtgcaatggtatgatcttggcttaccacaacctctgtctcctgggttcatgtgattctcctgcctcagcctcctgagtagctgggattacaggcatgcaccaccacgcccagctaattttgtatttttagtagagatggggtttctccgtgttggtcaggctggtctcgaactcccaatctcaggtgatccacccacctcagcctcccaaagtgctgggattacaggtgtgagccatggcacccagccactatagggtaattttttttaatcagactaggctcttgaagttgtttgtgaacagaaatttaactcccagtggcttaatcaaagaggaaatatattcacctatttaactgaaaaccagctataggggtatcaggcatgggtggatccaggagttcaaatgaacccccaaggagttgatttctctctactgtcagctctgtttttgtctgctcgactgtattcacagaagctctctctcctcctggtagcagtgcggccttccttatatcctcccagcttcctggccagctgcaagcatgggagtctctttcccaggagtcccagagagtctcagtgcatctcattggctctggatcagtcccatgtctgtccctgagccaatcagagtggccaggaggatgcctggttccctggactataagtcacatgctccactcctgagccagacatgggggtagcaggagctctacgctggaacgttggctgggaatagagccccaaataagaatggagtttccaccaggagaaggctgactaggtgctcaacggccaaaaaacactctgtcccacttctgttctggaaaccccggcacacatggagatccctctgcctccgacaggtcatcctgggctccctgtaagtctgatgggtccaggcccaagtggcagaagccgcccccggcctgccctcaagtctcattctgcacatagtaggcctccagcctcccaagtgaattaattccaaagttctgatgaggcagtccggcatggactccttggaatataaattccagtcccagggctaagcacgctgtttccctcctcccagcctcagtgcaggcggattctctaaatatcctgaaaaatacattccctcctttttaaaattcttcaccacatccacgcctcatctcagagcagcccgataatcaagttatcccggggtgctcaggattcttttggggctaagcatggggacatagaacgtccgtccttttgccctgtttcctgcccacacacatctccccctgtgaatgagaacagccctgtgagggaggcgtgagaggattcctggccccccagttaccaggggcctgggaacagagatgctctaacagggacgtgggcagagggcggggcggtgaagtcagaactggctcaggtccagggttcaaatcctgagggtagcagtgggcagcaggagcccaagcgtcaagggaacaggggtgagcccggggtttccagccaaggcagagctcaggagccctgtgccctgggccctagatcaggcagtaagatgcctctggcaaggcagaatgtcactgctggcctcgggcgggccttgttgggaggcccaggcagggaggaagcggcaacccttcgtaagcccccctcagaaggcctctgaggactctgtcccaagtcactaatccacagatgggcacatgccaccaaaggggtccagatgtcaagggcagaaagagaggcagtggtgatgagaaaagagtgatacaggacaagcgctaatggcagaagagggttggagaggggaagacagttgttagtgggaagggaagtgagaatgacctagagttgagtccacccgaaaagaggcttccaggtagctggcaaaagtgggcctgggtgttgggtggctctgcagggaggtgatggcagtgcacggccagtgtgggggcgacctggcagattctatgaacttcatgtgccccgccccttgccgcagcgtgtacacttctctgtctatctggagaagcctcagtcataggcaggagacggcgtgatggagcagctggttgtagctctgtttattactgaaagaaattagcaaagtccaccaatacacgaaataactaaatgaccgtgaagcatccctcctctggaagatcctcggcaaaggatgaggccggtctgccttatgtcctgagcccatcaggcagagtgggaaaagcaagttccagaactcctgaggtccttattcaaatgtcacctcactttagccttcctggaccaccttgtataagggcacccccaccacactccttactgcaacaaatcaccatctggtgcattacaccctgtgtatattactgattcatttgttaagtatctgtctcttctcataagaatataagccccatgaaggcaggaatgctcatttgttttgttcactgctgtatttgtcagatagataaatgaatatgtacagtatgatgtgattaataatataaaaagatgcataaagtgatactataatgtacctaacaaaacactggaaaggttattcccagtaggggacagaagagccaaggttatgggggtgggggggtggtaaggagtaatctaatcaaatgagacttcactgtcctttgtactattttaattttcacaaagaaaatgtaggcatatggttcttgaggaataatgactaacactcatttagacataccatgtaccagatactgtttgaatcattttacacaaattaacccatgcatttctcatcatagtctgtgaggtatatactgtgtctattcccaactgtcagatgagaaaactgaggcccagagaggctaagtaatgtaaccgggccacatagcctagtaagtgataaagcagaattcgaacccaggccatctggcttcaaagtccatgcactaaaccacagcccgtgggcccagactggtggtttttgtatggcccctgagctaagaatggtttttacattttcaactaattgaagaaacaatcaaaagaagagcatttttcacatggtatatacaaaaatgaatgtcattcagcctttaaaaaggaaatccggccaggcgcagtggttcatgcctgtaatcccagcactttgggaggccaaaccaggcggatcacttgaggccaggagttcgagaccagcctggccaacatggggaaaccccatctctactaaaaatacaaaaattagctggacatggtggcacatgcctgtagtccagctacttgggaggctgaggcaggagaatcgcttgaacccaggaggcagaggctgcagtgagcccaggtagcaccactgcactccagcctggccgacagagcgagactctgtctcaaaataataaaataaggaaatcctatcatatgcagcaacatggatgaaccttgagaacattatgctaagtgaaataaaccagacacagaaggacaaatactgcatgattcccttacatgaggcatctaaattagtcagacaatagcagcaaaaaggagaatggtggttggcagggctgaggggagggggaactggggagttcctgttcaagatgtatgaggtttcagttatgcaagatgaaacagttccagagatctgctgtacaacatggtgcttagagttaacagtactctacttcacagataaaactttgttaaaaagcatacagctcattttttttttaccacaataaagcttttaagagtaattttcatgacatgtgaaaaatacatgaaattaaaactgcatccatacataaagctttactggagcacggacatgcccattcattttcctgatagctgctttcaagctgcaatggcagtaatgagtagttgcaacagagacagggggcctgcagagtctaaaatatttactgtctggccctttacaggaacggtttgtgcatacttgctctaaaccactatgtatgcttctcattaataatgttatctgtggcggggagaaaaagatggacctgacccaaaaatacaaaggccttggctccagctctggatgcatggcttatttgtttggggacctcacttccttatctgtaaaatgggtataatgtccacttgtcaaagttgctgtgacgatcagctgagctaaggtatttgataacatgaagagcctatgatcattcattacgagttgtctggagcctgtggagctgctgccacccacacgcactgccttggccttggagggaagcccggtgcggagtgcccactcgagggaaacacgcttttgcctagggctgaggctggcagtctccgcagacactagctactcagtcggtgaagcttgtggatgcctgcaggaatcacctgaggctcagagggtgcttgccagagggggccggttgcacctcggggtcccagctgtggcttctcagccctgtggagctgtgcaggccagcagcacctgggtagagcctgactcctgggcgccgggttctggaaaatgcacctgggcctgtggacctccacccatctcaccctcctgctcacaggtctgaatttcagagttcttcctcatggcttgacccgggcaccccaaacacagtttgcccatctctgaactcagcctttcccccggcccaggccttctctacccttccctcaactgcccaaaccagagaccaacaggggtgggggtcacccgcccctcccgcaccccacatccacccagtggctgtcctggctgcccctgagcatcgctggatgctgcccccgccaccctggcccaggcctcctgttctctccctcagagagaacagggcatggctgaagccctgtggccggagggatgggtggctcttgttggctggcctggcactaactgcccactggtggagcagggtggcagctttggaggcaggtgtgtcatgtggcattgcggagctagcagagatcggggaagacttagccgaggagtggccactgaggaggatggataaggaggggagctctcagacatggagaaatctgcccagccaccaagacagtcctgattcttagctgaatggtggcagagagctggctgtgcacaggacactatggcaagagcttcacatctattggtgctttaacctgcctgtcagcctcaagaggcaggtactgtaatcaccccccacacactttgaaacattagactgtgggagcccctgacccaccctcctgggtctcattcctgccccggcctgagccctcccctggaggtagccagtatcctggagcttctacccacacatacctttattctttcatcccataggtggatatctcaaacaatgtacgatgctgtgtttgtgtccttagactttttataaatgatatcatatcatacacatccttccacaacctgcttttctcacccgatataacattgtaagatttatccacgtttgatccgtgttcatccacgtagctctgttctttttcactgctttagaatcccattgtatatcttctcctaggaatggaggttaatggtagctttatttttaaaaaagtttaaccacggccaaacaggcatatagttctaagatgaagtagtgaagatgagtctgttatgaagagcaacggtggcttcccaccccaccccactggcgggtggcagcaagtgtccaccactggcggttccatctcattctcatgccatttcctgacttgaccccttcaggccctgactgttgatgtcagggtacagagctttgcaccatttttagatccattgtaaattacctttgtcattttaagaacttttctaatacctttatatcacgttccaaaactatagcagcagctctttgatttatataacatatattatttttatgtaataaattctgtagagcccccttataaaattgtttttactccccaaaattaatccataaataatattcaaggagcaatatataaagaagcaagtaactttctccgcttctctcctcttcccagtcttcaatcagcattttgatatccttccagatttttccttgatgctcaaaaatatatgaggttagagtttggtttctcctcttcaccttcccttccctctgcccccacaaaaaatagaatgtttctgagtttgactctgttgcttgctcttacccttaaccatgtatcttggacaactttacacatgcctttttaatgtctgcacagcattgcatagtatggaagcaatgccaccaggtgtgttggctcatgccttaatacctacactttgggaggctgaggcaggaggattgcttgagaccaggagttgaagatcagcctgggcggccacttgctagctgtatctacttgggctaaccactgttagatactcaagactctgtctgtagagaccctgtctctacaaaataagaataaaaatgaaaaattagctgggtgtggtggcacatgcctatagtcctagctacttagaaggctgaggcaggaggatcacttgagctgaggacctcagggttacactgagctatgattgtgccactgcaccccagcctgacagagcaagaccttgtctctaatatgtatgtgtgtgtataatatatatacatgcatactgttaaacatatatcctcctgctggtcactgcaatgtttttgttttataaacaatattgcagtggccattcttgtgcatatggatatagtggatgagtgtacctgaaagagtgtctgtagatatatgaatacatcatggtatgtatatatgttgtatacttcagggtggaagctgtagacacctcttcacctttttttcttgaaaataatcactttttgaaagtaattgttttgggcagagctgctttctagcagagggtatatttcaagaagtcattaccttgaagaaagattagcagctaaatatttactaaattcaggaagagttgtatgggtgctgtggctcacgcctgtaatcccagcactttgggaggccaaggtgggaggatcacttgagcctgggagatggaggctgcagtgagccatgatttcaccactgcactccagtctaggcaatggagcaagaccattgctccattttttgctccatgaccaaaaaaaaattaaagagtataggcaaacctcaacttcttagctgagcttttaaagcctccagttctggccatttacttttcctccaactcttctctcctcttgcccaatatgtaagtcagttccttattttcctggagacattactgcatccccatcccttttttgtgtgtgtgctgctccttatatcatttctgcattttaccctctgacattttatcctctttccaaggagccagttgccatctgccctctcttctatttttagagcacatggcaagcacattcctgcctcagaccccgttatctctgcctggaactctttcctggatcagtgattctcaatcctgagtacccattagaatcccctggggagttttttaaaagtctgatacctgggccaaaccgcaggccaatccaaccagaatctctgggggtgggcccaggtatcagtaagctctccaggggattctggcaaaatccagtgatacatatcttcctatgcccagctccttctcatcattcaggtctcaactcaaatgtcacctcctcagagaggacctccctgactgccccagctaaaatatgcccctcacctcagctcccagttactctttgttacatctctctgttttatgatatttccttcatctgtcataacttttaactaccttggttctttatttatacatgtgtctgctcctgccccagtgtaggcaccccagggacttagggatatacccaccctgcatgacagtgtccccagagccttgaaaaaacttcagacttaggagccaagactatgtagtgctgggtccaacatttactagctgtgtgccattgggcaatttacttagcttctctgtgccttaatttcctgttctggaaaataaggattatcatcatacgtactttctatagttatgtcagaattaagcgagcaaatacaggtaaacacagaacagtccttggcacatcgtaagcactcaatagtgttagctattattcttttaatatctttttttttttttttgagtcagagtcttgctttgtcacccaggctggagtgcaatcatgcagtcgtggctcactgcagcctccacctcctgtgttcaagcgattctcctgcctcagccttctgagtagctgggctacaggtgtttaccaccacgcctggctaatttttgtatttttagtagagatggtgtttcaccgtgttggccaggctggtctcaaactgacctcaggtgatctgctcacctcagcctcccaaagtgctgggatcacaggtgtgagccatcccacccagcctattttaatatctatctaaagtgatctattgcaattcctgccctgttctccctatccacttctctgctttatgtccaattagcttagcaccatttgcatcatttgtctggcatttcatttattttacttgcttatttcttgtctgtctgctccctagactgtcagctccagaagggcagaaattgttttgttcactattgtgtccccagtgcctagcagggtgcctggcacgtagtggacaccagtatgaatacctggctcctcacctgttctcctgtctctccccaccccccaggattacctcacagacctcatcaccaatgacagcgtgagcttcttccgcacgtccaagaagatgtacccgcacaggccagtcctcatggtcatcagccatgcagccccccacggccctgaggattcagccccacaatattcacgcctcttcccaaacgcatctcagcacatgtaagcctcagcactctgcctgccagaggcactgcttagcatgaagggggagggtcaggctttagcaacagtactgtcaccaccatgacttcactgtgcctcctctctaatcctcctggtttaaagaccccaagaacatactgcttgtccatggtgaaactgggatgcaactccagacagcctgggcaacagaccaaggcaggagaatttttaacttgggatacacggcctcccaccaagaggtgtgtggatggaactgcatagaataggtttccttttaatgccatgtgtattttatttaagacatctaaaaacattcttttgaggagggggtctatagttttaccagactaattatttgccaccatttattgagctgtgggctatgtagcaggtgctgtgctaagcccttggcattattgtccagtccctgaatattcacagtgacccttggtgtaccagttatctattgccatgtaacaaatcatcccagaatctagcaacttaaaacaacaaacacaaattatctcacggtgtctgtgagtcaggaatctgggagtggctgttctgagcttctggcccagggtctcctgaggttgcaatcaaggtgtcagctggggctgcagtcacctgaggcttgactggggctcagtcccatggctgggtcttgccacaggagcctctgtccatagggtgtttgagtgtcctcacagcatgatagctggcctcacccagagcaaatgatcagagagagagtaaggccaagaaggaagccacagtgtcttttacaacctaatctcggaagtggcaccatcactgtgccacattctattggtcacacagaccggtccttctacaatgtggagggtctacgcaggggtgtgaaggccaggaagtagagattatcaagggccatcttggaggctgcctgtcacacttggtattcccattttacagatgaagaaactgaggcacagagaggtaaggtaacttacctgaggtcacccagctctaagtggcagagccaggattcaagtccagccccccacttctgcttcccatgcctctgcccacccctgtagtactctatccagctggctgggaaacttcctggaaagttctcctgcttctctctgcctcagaccaccccctgcttagcagtgactcagcagcccttactgtgacattctggggctgcaaggatggggtggtttggaatctgcctgaatattcagggtgtttggcttcattacaatctgaatacattgccctcctcaagcccctcctgtaattactttttgacagacctcgaagcagctcagagagggtaccgaaggcactgttcaccttcccatcccctgatctctggggaggaggctttgacagaagacgatgagctgcgtcccaggggctgcagcattgctgctgtgcacatctgtctggctccccctccaaacccaagcccactcctctccacccaagaaggccagcctcccccagcagccggcaccccgccctaccgccacttagaactcatccctgcagcgggtggaggccactcagccctgtctaagggagaagccgtgggtgagggaagggacgctttgcttcggcagcatctctaaaagaggtgccggcttcaccccaaacagcagcgagcggtgccggaatttcatgatgaaattgtttggcattgcctgctggtttattttccctttgaaatgaaaattacagaaattgaaaatgagcagtgtctgctcttatgtggagaagccccctttgccttcttaggggcatgtttggaaggctgtctcatctctggagtataatcatttccgaaagaaaccaaaaaagagaaagtcctgcagctaggatgttaaatgatgacagtcaagaaggggtggagaggggacagagccggggcgcacggttagagcactggatctttctgttaggggtctcctatcccatctctcccctagaaagccggcacatgccctttcctggggcaggccttgtgtactctggcaaaagttggtagatggtggtaccatccaccccgcagaccccagggccctgcaccctccccatgcacccccccacacacacagtcacatacatacagacacacacaaagacatgcaaatacacacaggcacacaaagacataccacacaagcagatacacacaatgaaacacacacaagcctgggcaacttagtgagactctgtctctacagaaaatttaaaatcagccaggggtggtggtgcacacctgtagtcccagttactggaaaggctgaagcagaaggatcacttgggcccaagaggtcgaggctgcagtgagctatgattgcgccactacactccagcctgagtgacagagtgagaccctgtctcgaaaaaaaaaaacacacacatgcagacacacaaaaatacacagttacagacacacacaaagacatacacacacgcaaacaaagacataggcagagatacaaagatacacacaggcgtgcccacagacacagcccaccagccctcagagcttcccttcaaagggcgctgattgtggcttcaagggctttggggcgagggatgttggggctgctgctgatggccccagacacacagtggaggggctgtgaggacaccaccatcttcccgccatttccccagcagaagggaagggggatggtcttcttcacgcccttttgtgaacgcaccagatattcctcggatgctggaggaggtgaagttttcagatgtttgttgaacaggcagctgggcccatgggaagatgccgacatcctccctgggggagcctggcttgacacaggcaaccagcaagctggcgtcgaccccaagcaccacccggctctgctgccttctggcctcagtgtccttctccaaaagcgctctctccgagccggggctgcagaaatcatcatcctctgaacagtcacccctcactgttctcgagggccgatgtcagcctaacttctcatggattcagggatgattgctgaaaattgcatcctggaatccgggcccttgggcctgcgggaccaattttcccacacgctcgctgctctgagagcgtctctgtccgactgctgcccccagcagccccctttcagttcctcggtgggagagatctgagaggggagctgagcttgttcctgggaatgttctacatggcgggtcaggccctgagacagcagagccagcccacaggagagcctggccgttctgtaatgaaaggaagcatgggccctgatggattcagtggcatgaggctgcagatcagccaggggctgagaaagccgagtccaggggagccttggagacagtgactcacctcccgccttacatagcaacggtgtccacagctgccaagctaccccagcggcagcgtcacaatttctgccccggacgattgtgatatctgagacgctgctgaagtcccgacgtaccaggccagagggagacatgtctgtgcccctctgaccaggcttgtttttcctcctcttcttcgcgggagctccttgcccccagaacacccactgtgaaaagcagtggaaactcaccctttacttcagccttgactgggaagagaggccagatttgcagggaacctggccttcaagaaccatcaggcccagggcgaggaagcccacgttttgtgaggccttaaacagtgcctcctgtcaatggtgcaccccacccaggagactcccccatgctgcggttttcagtagctcggagccaggggcccggcataaactgaggtgacaaggaggtgctcttggtttgctcacaatgtttcctctggttttggtttaatctcccattgactaaccaggaaatagagaggatcagagaagtttggggacctgcccgctgtctcacggagtgagtgacagacccagtgtacctgacttctgccgtggagtcacccgtgattactaatgacaaagggacacaccaatgataacctctcccaagcagtcatcacgcactggccatggttagaagggttccccttacagcctctccctcagtgctcacaaccttcctgggaactggcactgtctgtattctccttgggtaggaaatgagggaactgatgccttgggaggggactaactggccaaagacagaactggggctcgaaccccagcagctggtatagtcaaccactgccatgatatcatcatagatacctgcttggggtccctccatccctcacatcacaggtgctcagacagaactttgcccaacacactcctgctgcacgattaagcagcatgccaggtgcagtggctcatgcttgtaatgccaaaactttgggaggccaaggtgggtggatcacctgaggtcaggagttcaagaccagcctggccaacatggcaaaaccccatctctactaaaactacaagaattagccaggtgtgttgacacaagcccgtagtcccagctactaaagaggctgaggcaggagaatcacttgaacccaggaggcaaaggctgcagtgagctgagatcccaccactgcactccagcctggaccacagcaagactccatctcaaaacaaagaggccaggtgcagtggctcatgcctgtaatcccaacactttgggaggccaaggtgggcagatgacgaggtcaggagatcgagaccatcctggctaacatggtgaaaccccatttctactaaaaatacaaaaaaattagccaggtgtggtggcacgcgcctgtagtcccagctacttgggaggctgaggcgggagaatcactcatactgggaggtggaggttgcagtgagctgagattgcgcccctgcactccagcctgagcgacagagcgagactgtctcaaaaaataaaaaagaatgtggcatgtcccaaatgtgcacattcaggtgccttcctcacaattctggccttacacataaaactatgacttatttcatttttaaatccatttctattatttcaaactaaaatctattgcaaaaggatattccgtggtcctaccttaaccacaataactgccacctgccattcaccaaaggtaactgccatctaccaataataggtacaaggcacacaaagcaatgctatggaatttgagttgggtactggttcccgatgaaggctctgaacttgactttcttcccttttttcaaaaggaagacgagcaaagtctagagaggtgttaaagaaacactagcaccaaacagactttgccctgagagagccgacaagggactggctgtctcactttgtcactcaaggtcactgaatgctgtgcctcttaggagcttcccaagtgcacacttcacacgtggagaaacgctgaaacagggtttggataagcccctgacatgccaatgtcccctttcccaccaggagatcacacctggccctgggctgcagacacagcacagggtggctgctcatccgggcgggtctggcgggggccaggcagggtccaggctgtccctgggtttgaccgatgtgtatgtccttgcccaccagcacgccgagctacaactacgcgcccaacccggacaaacactggatcatgcgctacacggggcccatgaagcccatccacatggaattcaccaacatgctccagcggaagcgcttgcagaccctcatgtcggtggacgactccatggagacggtaggcgcccgctgcatgcctcttggtgggcgtggctccgaacccccagccaggccagggccgagacctcctggcccttcagggttttcctggaggaatagaaatcaaaggcagaatgaagaggccccatgtgctagacctggggaacagcttggagcaatccagacaaaagcctcttccttcatgaaacattttctagatctgtgttgcccaatacggtaaccatatatgctagttatattttttcctgctatttacatttttgaacacatttattgggatgtaattcacataccatacaattcccccaattaaagtgtgcaattctgtggttttaatatgcccagagttgtataaccatcaccacatccatgttaggacatttttcttaccccaaagagaaacctcacagcccttagatggcccactaaatctccctcacccccagccccagacaactggtgatctctttctgtctctatagatttggtgttctgcacacttcctataaatggaatcgtacacgctgtggccttctgtgcccagcgcctttctttcacttagcgccacgtgttcaagcttcacccctggtgtcgcatgaatcagtccccctcattccctgttattgctgaataatatcgcattgtatgggtattgtcacattttatttagccatggctatttaaactgaatgcagtaacattataaagtcagttcttctgtcacacaagcctcatttcacatgctcagtaggttcgtgtggctggagccaatatgtgtccatatcggacagtgcagacattaacacggccaccaatgcagaaagttctgccacacggcgcccttccagatcgcaagatcctgccataggctgcagcccaagtttcactcattcattcattcacctgacagcattattgagtgccagtgtacgtgggatacagcaggcagggaacaaaatgacaaaagtgtctgccctaatggaggcagcatgccaaggcagggacacagatgatccacagataagtaaaagagatggatgccaagaagggccatgaagaaccgtggaggggagggcgggccaggggtgacaagaggcaggaaggtgcagtgacaaaggggacagcccctgggaaagttgagcaaagacctgaagcaggggagggacggggcctgagatctcaagcgcctgtcaccccgggtcggagacgggccaggcacccagtccccactgtcccttgcctcctcgcccgtgttgcagatttacaacatgctggttgagacgggcgagctggacaacacgtacatcgtatacaccgccgaccacggttaccacatcggccagtttggcctggtgaaagggaaatccatgccatatgagtttgacatcagggtcccgttctacgtgaggggccccaacgtggaagccggctgtctgtaagtgtgtcatcccccagggacccagggaggcccctgggcccagctcagggcttcaaccatgcagcccaaacccaagcccaccctgggtggcacacagttttcgcagatgtaccccagggccagcggaaagcaattatgtcatgcatgttatatccctctgctggggaaggagaggccgggagctgttagcacctgtggaaacaggtgtggtggggccgtatgccaggaaatccagggagctgggctgtatacgtgtgtgcgcgcacatgcatgtcaccagcgggtgggaatggtgcttggatttctgttctgggctgggcagtctttgagcctggaggttgtcagggaggaaccccggaccacagcacaggcagctggttgtcagctgggatcagctgagccaactctgggcagcagcacaaagggaaatgctcttccctcccatccttcctggaggaccacgtgggccgcagccctcagccagccattctcctcgggctaacctttgagttgacatgttctggcagcgaacatgctgcgtctggggcaggggagcggacaggccactgttcccggcagcagcttccttggatcggctgggatattatggaggctggctcaaatgaggtttttgaaaagcagatgtgttgctattaagactgtcatttggtctgccttctgctcatgcccagatgtgggaacacacacccagcactcacacagggctggctgcggaattcctcctgaaaaggcgttgacagtgcagtgtggaattccagactgacatgttcccactgccttggacattttgcgagaattccaggaggcaggctgcatgagttcaaggccagagaaagtgatgactgactgttgaccttatcagatcacgcccgtctttggctcttagcgtccccattggactaagagctgtaataacgacagtccacacgtatggagtgtctactcttcagggcctggtctaagaactacataataattcattgcaagccgggccctgtggctcatgcctgtaatcccagcactttgggaggcccaggtgggcagatcatttgaggtcaggagttcaagaccagcctggccaacatggtgaaaccctgcctctactaaaaatacaaagattagctggacatggtggcgtacacctgtaatcccagcactcaggaggctgaggcaggagaatcgcttgaacctgggaggtggaggttgcagtgagccgagatcatgccactgcactcgtctgggcgacacagtgagactccatctcaaaaacaattaataattcgtttcagcatcacaactgccctgtgacgtggatgctcatagtagccccattttacacccaaggccactgaggcacggagaggttaagttgcctgagtttacagcaagtaagggaaggggctggggcttgaaaccaggcagtctctattcccatctgccacgcctctcagaaacttcaaaccatccctgtgaacagaaagaatctgacccactgagggctctacaaacactgacattgggggtttggtcagcctcggaatctgtgatctgactcatagggcccaaaaccacatcccacatggtcaagaaaaagagagtgctcatgtcaggtttgggaccaaagacacacggtatctgtcagccaggactcctttggttgcaagcagaaatgacctttgaaccagataaggcatgtaagataaaaggaacacagtaactatagttactgaaaagtccatgcacagctccagcctcaggcatggctggatccagcagtcttacaatgccattggaaagctctcatttcttatctctcagtcccacttccgccgaattggcttcattctcaggtgggtttttctccttgtggcagggtcagcagctccagattttcagccatcctgtttaggaagccaaactgctttgaacagaagacctgaggctgactcccactggcctgacttaggtcacgtgtccttccctgaaccattcactgtagccagaggtgacagaaacccttgagtaaccaggctgagtacattgggcaggggactctgaatggggccaggtagttcctacagaattagaagctgtgacacagagcaaggcattggtgctggccaggaaaagcaaccactgtcctccttcccctgagcctgggggagcgggaccactggacaagctcagccccattagctgccggttgctgggttctgcagagcgcccgtcgctcagcagtcttcccagctccctcgcctctggattcagttgtagcgcctcacgctggccttcgagccccccatgacacagccccatcttcagcagctgcacacatgcttggcagcctgcccgacgttcacagggcactggactggggagagatgaggggttaaagatgacggaaaccctaggacccaggccctgccctggtccccagggaactagcggggaaggcactcagatgctctgacgggactgtccaccattcaacaggtcctgggtcctgtgctgggcacaccccttaagtcccttaccctacattgggaatgccatcagccagaaacaagagccaggagaggtggctcatgcctgtaatcccagcactttgggaggctgaggcggatgtatcacctgaggtcaggagttcaagagtagcctggccaacatggtgaaaccccacctctactaaaagtacaaaaattatgggtgtgatggcgcatgcctgtaatcccagctactcgggaggctgaggcatgagaatcgcttgaacccaggaggtggaggttgcagtgagccaggatcatgccaccacactgcatcctgggtgacagagcaagacacctctcaaaaaaagaaacaggagccaggaaaggtggcagatgtatgggaattcacttagccaatatttactgagtagctcctctgtgttctaagggtataagtcctggagatacagaagtgaccacctgagccagccttcctgcagcttagagtctaactgggcaatagacaataagccagagaaataagtaaattatatagcatatgagatggtgataagtcttcaggagaaagataaagcagggagggtggggagggggcgcagttccgaatagggtcctcaggaggggccttgtgttgggtatctgtgctgcagaacaaactgccacaaactcagcagcttaagacaacacacatgtacaaactcacagtgtctgagggtcagaagcctgggcctagccctgcagggtcgtctgcttaggctgaaatcaaggtgccggccagggctgtggtctcatccagaggcttgactggggagcatctgcgtccctgctcatggggcaggtcaagtgcaagcagaggacttgaacccatgcagtctgcctcccagactgctcacagtctagctgctgatttagagtggcttgcttcttcaaagccagcaaggggagaaagaaaccagagccagactgctagcaggatagtagttgactatctcataacacaaccacgggagtgacagcccatcaccttcacaacccactggttggcagcaggtgcaggttggtccacacccaaggtgagggggtcacattaaggtgtgatcaccagggacagggattctggggaccactgaggcctgtcacgggcctccttggtcatagagcaaagaactaaaggggtgagggacggtggcccctgatctccagggaaaggacattccaggcagagaggatggtaaagaagaaggccctgaggctgcactgtgcctgggctgtcaaggaacagcgaggagccagtgtctgccccagaggttcaggggaagggttcaggaagggccaggatttgggctggctgtaaagggggggtcgccttcactcaggaagtggggacaggaagggcaggagggggacagggtgaggctgtcagctcacggcatgagctgagacacagaaactaagggggggcgagcacagagtgggggttcagctgaatctgggccgcagaggggagctgctgaggttgaggtgccagactgcagcttccatacctgcagatgtcagcctcccacaaactgctgcccacctaccgctccccaccccccacgcgaggctgaggcaccaccacctgagtgactgagtccccgatctcctgcctcccccaggaatccccacatcgtcctcaacattgacctggcccccaccatcctggacattgcaggcctggacatacctgcggatatggacgggaaatccatcctcaagctgctggacacggagcggccggtgaatcggtgaggacggagcagggcaggtgttgagggggccgggacattgacctgcgggaactcagagcaaaaccctgtgggtctagaacgtggggtctccaagggtcgggagctggggttctcaggtcccgccatgccaaccacttacctgctgtgggagagaagcatggtcccctctccgagattctgtcttcccatctggaatgtggccaaggtgaccagttggggaccttctctgagctaaaattacccaaagcttgaaatgatagcagcagtgatggtaggagatggtgctaactgcacggcgcttgtgtgtgaggccctattctaagtactgtgcagggaaatctaggaatttgatcctcacagtaacccagcgaggtggacattatcatcatccccattttaccagtttggaatctgaatcccaaagcgattgagtgacgtgtcggaggtatcccagcaagtctggatgtagctctgggaattcagatgctgactcaccacgccccataactttaatgctggagggtgtgatgggaacatattcctaggtgtccagagaggcagaataggaaccgtgagggtgagcaagtcagacaggtgggaggtgggctgagtcagggcggggaggctggtgtggccgcagcgacatctggtggccagcgctcttaacagccaccaggttcctggcctccaggtgctacttcaactcctggcttgcacctctggcagcggagcccttcccctgtggcctcccagaggctccagccaggcgagcactgtgtgcccacatctggctgccctgtagggggaccgtgtccattgaggctcctcccctgactgtgaggccaggcaagctgtaatggtataaaatggacatgtttggggacactggcctgggagccaggacacctgggggtcaggggacagggtggaagcttcccctctcagcttcagagtccccatctaggaaatggaaatgaccaggtggcactggatgaaacatacaaattacatacatgcaactgcaaagcaccaaagaagaaaatactcccaaaacccaatgcaattaacctgacatcaaggcaaccactgcgcctgacactgagctcaagacagagctcaagacgccaaaccactgcgcctgatgctgaaccactgcgcctgacgctgaactcgagatagagctcgtctagtgccgggggagttgctgggcttcctgggaggggcttgagatgtgtgtgcgcgcacacacacacacacacacacacacacacagttacttgggtgggacttacagtgattttgacctgggtcatttctactgtgtgtgtctccagacccaagtctctggggaaggggtggctcaactcagaggagggtgggcaatgctctagtgcccagctgggcacactcaccacaattgctgtccaggctgaccgtaaaccaaggctgactcctggtgccgtccctgctcctgggggaacggggggtcgtgggaagccctcatgttgctgagaagcaggagccgtgcttttttccaggtttcacttgaaaaagaagatgagggtctggcgggactccttcttggtggagagagggtgagtgccgggtcctgggagggacacccctgcccacctccctccctctgcccaggaagcttctgtagccccaccgcatcatgctattcaggagctgcccatggctctgaagttggtccaaaggcccctaaacacaaagcccattcactgctcctatagacacagaattggggtctgaggtcacgtgtacgcttttggcatgctttgtccagcctctacaatgtcttcaatttatttaatttattgccaactcatgcaatttgggaagtttcttataaaattccaatgtcttaagtttcctaaacatcagaagacccgggcaggtggccctgcgccctccactgtgaggaaaagccggagccgagggggcacccctctaggtgggcacacatgcctccggggctcctccagagctgagaggccggccccgcggctcctgctctctgccccatagcaagctgctacacaagagagacaatgacaaggtggacgcccaggaggagaactttctgcccaagtaccagcgtgtgaaggacctgtgtcagcgtgctgagtaccagacggcgtgtgagcagctgggacaggtaagaaggctcccttccctcccaacggctccccctcctgactgcagccggccctgacctgcgaggctctgagagccgctgagccagcagggccagggcctcccaacgggtagtcctttgctgccgtgtggtgcccaagatgctgtttggtggtgcaggatgatgctcacaataagtgattcatttctcagcagcctttggaccctgaccgtgtcagaggccaagtgtcccgtgggtgtgtgtatgcccttagcgcctctctagcccttgccgatctctcttgcacgaaggccccagcaggagttaaattattttattttcaccatattcactttgacagtatcctctttgtgactggttttccttttataggagtaataagacatggctttttaaaataaatataggtaaggttttaaaaagtgaattgattgcaagagaaatattaaggaaattatggccaggaacagtccgtggctcatgcctgaggtcccagctactccagagctgaggcgggaggatggcttgagcccacgtgttggaggctgcagtgagctatgattgcgccactgcactccagcttgggtgacagaataagaccctgtctctaaaaacataagaaaaaagaaaattatctgggaagtatcagagatagccagaaactgacatgtttgggaaagcctgaaggaggcttttctgaggctggaaagccagggcaggcttggagaggagggtcgggggcggggcagggcagggaggggagtgggatggaaactctgccttggctggcccaaggggtgccggaggtgtgtccctgccctgcctgtcaaaggctgggactttgagctggggctggagctgtgtgcctgtttcacctatgagaaaaagcaaaaccagggccctggtattgaaggccaaggcctgaagtggatgcgtttctgatggactgcatttgaatgactccatcttaacactgcacacagaattagtacaggcccatacaggcctgactgtgcctccccacccagtgtgtgtttgtaaacccacagacccctcttagtcacacaattaacccgtatctgccaccgggcaggagctgtggatttcatccctccgttgtacagcatgaatgcgtccccccgcttgccaggcactgtcctaggcgcagggccacagcctcgaacatgctcaacagaagctcctgccctcccagagctgatgttctggagagagttcagccttgactttgtaccgagatcccagaagtggttctgattttagttctgggctaaaaggagtgaaatgaggaggccaggaagtctttgcccctcgacgagggaacgttgtcaagtcccccactggttctttctgatgtctcccctgacccagatcagggcttgggcagccagaatgacctctttgctggggccaagaaagaggaggtatcagcattttccaaacaatcagagcacaccactgaagccaaaggaagagagtgctgagggcggagtttggggcacttagcctaggccagctgggaggcagcaacccacggcccccgacccagccccggagctttggggacctcaggctcagacgtctgccccccatcccaggcaacggccctgctcacaagccggtactccccgagtgccgttgccatgtccctgcttgtgccgtgccttctggaatgccctgcccagtgtagaagctgtaccctgtggcccgaggacgtctcttaggggcctcacacccagccatagcattgtcttgggtaccttgtccgtgctaccccacgtggtagatgtttttttgtcatttgctgaacaaacgtgcccaggaaccgagctcatgtgcatctgtctgtctcccggtgacacggggacatcctaagggcagggcccggctagaattcatgtcatcattgccaaagcccagaccagggcccaggccgggcaggagtaaatgtgccctgggcacctcgtaatgatgatcatcacgggcaacacgtgagtgtaagctctacctccagccaccctatctggcaggtatgttctgtacacggggaaactgaggcccagggctcaggcaaactgcccacagcctcacagcttcaagtggtggaggcaggatttgaacccaggtagttgggctgcgggaccttcgttctcagcagctgtagggaccccaagtcaagccgacactggcccagccctgtggggctcaggcgccgcccccgccaggacagcctcgggacgggccatgtggacacggcttctacatgagtagttgcaggggcagcaaaccctttccgcacaagatcagacagtaaatagtttgggctttgcaggccacatatttgtttttgttcttgctttttacaactctgaaaacgtacaatgtaaaaaccgtccttggtttgcaggccatacaaaaacaggctgtgggctggagttgactagcaagagggctgctgtttgccgacccctcaagtcgtgccccagctgagtttgttgggttggagcggggagcaggcagtggggaaggagaattccaggcagagagagctaagtggacaggaggctgctcgccagcgcacacagctcagggcttcacgcagaactcagagccctggcttttcttgaaaaatcagacctgggcttctgggcctgtgctcccctctggcgacagtcagatgggtatagccggtcacagtgcccactttagcctccccaggtcccccaggcgcttctgggctggcctcattcagggccatgcctgctggcccatcagtctacttctgcactaaggaatccaggttgctggaagggcctgcatgcattgaaggggatgggagggtggcagggcgctgtgaatgcaattagattcagcctccaggtgagaacagatgggcgggacaggggcaagatgagcaggtgaaaggcaccagggccttcaacggcagcgggcgggggcagacggtgcagcagagggttgggggggatggtggcaccagactccacacttttccttacagctcttgcacctcccagttgtgtgacccaggacacatctctctacctccgtgtgcctcatcttgaatcggcacagtaatgacagcacctgcctcgtagggtagcgtgaggtgtagtaagcaagttaatatattaacacacagtgcttggcacatgctaagtgctggagagacacagggaacagatctgacccatggcctggaaaggtcactttggcacagaataggccctaaagagtcactgggtcaatgggctggagcagctgtggacagaagggaagagaatccagtttacaggtggttgcagaatcccgtgaggggatccaggaggctggaactggggaagagcagaaggatcaacacgagagatttggacagtgattctatctacattcagcgtctgaccacaggcctggagttgagtgcacacgtggagcctctgcacacactgcactgattgagtctgggaaggtggtcaggggagacctccttgcgctggagcagacgggaaggaagagaagcctccagcagcaggaagggctggagaaaaggcattctaggcagaaggaacagtgagcgccaagtccctggggcagcagcccacaggggatactggagagagggctgagggagaggaggaccgatgggtaggccagggccagattgcagaggatgttcaaagactagtatcaggagcttgggtcttgtcttaaagacagtgggagccattgaagggttttaagtaggagagtaatatgatccaacttgccctttaaaaagattcctctagctgccatgtgggtggattttaggagcagacagaagcaggtaaccgtgagagtggtggctgtcggaggcatctcgctgggggatgatggtagctctgcccaaggttcaagcagtggcagtggagagaagcggcattggagatagcagaggtggggctcggtaacagctggatgcaagcagggagagggatgtctccagggtggatgggggtggcaggggagaggcgggtttaggggagcagatgagcagctggccgaggccctggcatgtctttcagaagtggcagtgtgtggaggacgccacggggaagctgaagctgcataagtgcaagggccccatgcggctgggcggcagcagagccctctccaacctcgtgcccaagtactacgggcagggcagcgaggcctgcacctgtgacagcggggactacaagctcagcctggccggacgccggaaaaaactcttcaagaagagtaagtgtcacaacctggctgagtgggacaggaggagagagaccatgcctggggggccccattcattcactccgacagttccacagagactgtcactttgccaggtggtgatctaggggctggggacacagccacatctcctcacgagccacccattctagtggggagcagtagtaataaacagataaggccaggcgcaatggctcacgcctgtaatcccagtactttgggagtccgaggcaggcagatcacctgaggtcaggagctccagaccagcctggccaacatggtaaaaccccgtctaaaaatacaacaattagccagatgtggtggctcacgcttgtaatcccagctacttgggaggctgaggcatgagaatcgcttgaacccaggaggcagaggctgcagtgacccgagattgtgccactgcactccagcctgggcaacagagcgagatccatctcaaaaaaaaggaagaaacacacatacaaggttctgtattgattggctggtgaaaatgctaggaccagaggttcacaggaacccagctctgtgcttcccctaggagccatgtttcagcgttcaattagtcagtgtttgtggtgagtttatagaactaccctgggctgggcgcggtggctcacacctgtaatcccagcactttgagaggccgaggtggacagatcacttgaggtcaggagttcaagaccagcctggccaacatggtgaaaccccatctctactaaaaatacaaaaaattagttgggcgtgtggtgtggcagcagagtcgcttgaacccgggagcagaggttgcagatagctgagatcacgccattgtgctccagcctgggcgacagagtgagactcggtctcaaaaaaaataaaaaataaactaccctgaagaacaaaaatagactatagttgagtggggaaaagcctcactcagctgaagaagtgtctacaccttcacacctcattctcggcaagggccgaggagaggacagtcagacagaagccagggagcaggcgaagtggagagagggactcttctagacccagccagaaggctcagccgccaccctgggccatcgcttcaccattctgaggctcagctcccaccatcaaacaggaagaatggtccctgcatgactttaaaacaagaatgagcctgtgccctgaaaatgtgtggaggcgtcggggtccgccggctagaagtgtgccctccaaggctgggcagcttcccacgtagcccatttctctggcctaaggacagccaaagcctaatgagagattttaggtgttgtttttaaaaaaaattatggtgaaattcccataaaatttatcatcttaaccatttttaagtatccagtagtgtcaactatattcccactagtacgcaacctatctgctaaatgaactcttcatcttgcaaaactacaactgtccccattcaacgttatctccccattctcccaccccgctcccacccccaccccgttctcccaccccgctctcccaccctgctgtcaccccattctcccacccgttctcagcaaccactcttcttctctatgagcttgactgctttaggggcctcatgtaagtggaattgtacagtatttgtccttctgtggctggcttatttctcttcgcataatgttctccgggttcatccacatggtagcctgtgttggaatctccttcctgatcgggcacagtggctcacgcctgtaatcccagcatttcgggaggccaaggcaggcggattgcctgagctcagaagttcgagaccagtctggccaacaaggtgaaacccgtgtctactaaaaatacaaaaattagccaggcatggtggtgggcgcctgtagtccctgctactcaggaggctgaggcactagaatggcttgaacctgggagcgggaggttgcagtgaactgagatcatgccacttcactccagcctgggtgacagagcaagactgtctcaaaaaaaacaaaaagtctccattctttataagacggatgatattgtaccacagactagttagagattgaggtctctgacggcaggcgcagtgatctcctctggtccagccagccaggcagcaaatgtcttcatcgtggagcagataagtctctctccataacagcccagccactgcctgaaacaccgtttcccagctgatgaccctccgttacatttcctcaccagctgattaggaactactacattaacttttctagctgaacagaatgattggtttccagattggattacacagccagcatctccttgcttcaatatgtggcacagtcgataatctttaaataatacaagatctggcagggagaaattcagctcttttccccttattaatgcttagaggaaagaaaaatacctaaaagtagctgagagtcagctcagccctggtcagaatcctcatgtgagtgtaatgtcagagccgggacctgcacctctcaacagccctgtgagcagggcaggggtgatcatcaggggatgatggacaggaaagactgggtcacgtggctgatttggggactccagccccatctcctgcctggcattcttccccctgctagagtctccgacaagacactctgtccctcttttctgagcagtcagcctagagcaggctgaactgggggctttctgtcccccaggggacacttggcaatgtttggagacagttttggctgtcacaattgtgtgtgatggaggggtgctgctggcgtctagtgagcagaggctatggatgcggcaaaacatcttgcaacgcacaggacggcccccaccacagagtttgatctgaccccaaagtgtccgcagtggtaaggttgggaagccctggcccaccttgatccacggggatcctggctgtggcgtggggaggttaggcagagccagccagctcacagcagaagggggacccaggaacaggagaaggggacgaggactcgggggatgggcccagctgactggggttcattcatttcttgaactttgtgcaagacactgagattagagttgacctggagagacacggacttggacctcatggatgaaacaagatgtgaacaagtgaacaaagggccacttccgctggtgaaaaacgcatgaaggagacgcagcggtggcgggactagcagagaggggtggcggctccagaatggcgctcaatggacatttaatgagaacaaagtacagaaaggagcaggtcttgtgaccagccagagagcaagtgttctgaggaggaggaagatggagtacaaagaccctgtgctcagaatcagggcggtgagtcccagtcacagagaggtgaccggtgtggccgagggtggtgagaagcaccatgggcatgggcagccacatcacacaggcggtcaccggcgtggagaggcagggagtgggcccagggttgtcaccttaggtgaggacgtcagctgcaggcagagtccccaccccctgcagtagctggtccacaccagctcatcaggcatgaatgcttcactagttccgtttcgtgccatcctccaaggagcctttgtagggtaggcaccatcctgagaagttacccaaatcgccggggccacacatgtgctcaggggtttgcacctgagccatctgattgcagagtcaaagctcttggccgccgggttatgaagtcctgtcccattccctgttggtgtggcaggaagggtacctccaggactctggacatgaacacagagtgatggggagagcaggtagtgtggcttcagtccaggaaaggattcacacagggctggcataccgcttctgtgaagagccagagagtaaaggtcttgggctttgcaactcagccctgcgactgcagaggtataagggaatgcgagcagctgtacccagtgaaactgtattcacaaagacagatggaggctggcctgggcccttaggccatggtttagggacccctgaatctagagctgggagatggagggtggaaagaggcaaagcagctcacttatgagccgactgagacaaaaggagtggagaggacacgctgggtctatttcctgagcctctcggggcaggacctgcttggcacagggaccatcctcggcaatttgtgtacttgcatcgggagactaaaccgagggagagaagtgcccaggagaaggctgccctgtgtcagaaaaggcccaaggctctgctggagaggggaggcctttcccggcccctcaggatccttcggcccttgtgactctgatgcaaggtgtctgagaactgaaagatacaaaacatcccccaagagtgggggtggcacccgggccacgtgagaagggagccctttcctccctccttccactgccttccgccaccacctgcctccagctggtcctctttggtcaccatctcggggtcacttgggatccaacaaaacctgggtcactaactggctccaggcccttctctttaaatgaggcacatctggagaaggatgacaactgcagtgcgtgcctgctggggccagacatgtgtcaggtgggcagaggttttaaaacaggaaggagtggcgggggctgtggccaacagggaagacagtgggcagccaaaggggccgcccatccccggcccgtcctgaccatatggaactgtgggcccgtgagacatctgtttcctttctggaagctggaaatctggatccctacatcaccgccaccacctcccctttttctttaatgttaccaactcagatttgtttttgagacatagaagatacaggctacctggggtgtcacttcagcctgcacccctgagttttcagcgtcagggcgtatgcaaaagcccccctcagccttgttgccggcccacctgggtgtagcacctgcctaccacctggtgggcagcctccagctctctgggactcaaagaagctaagtggcttccccagtccccgtccatttctacccagagacaggcactgcagggcccctttttcccagtttaaatcaacatttttacatccatgatactttttttcctttttaattgaggtgaagttcagataacatcaaactcaccatttttacaattatatacaatgcagaggcatttaataggttcacagtgttgcacacctctacctagttccaaaacatttcatcaccccaaaagggaaccccgtacccacaaagcagtcactcctcactaccctctcccccagcccctggcaatcaccaatcttctttctgccgctatagatttacctattctgggtagttcctataaatagaatgtaacaatacgagcccgctttgtgtctggctggtttcactccgcctgcttttgacattcatccacgctctagcgtgaatcagaacctcgctcctggttctggtcgcatattccgttgtacagatgatgtaccgccatttgtttacccgcaagcagctctcgcttgaaatcctcttgagtcagtggcttcttggctccaggacttccgtcttgccggtgtgatcacctcgaggccctcccctgcggtccaggatctgcgagcaggcgggtagattccacgacccctcgagtcgcaggcaaagctgagcctcatgcttggaagcccggccctatcttgatgaaggacccactgccctgggagcctggccagcctttcctgcctccctaactctgccactcctctaatgcccacagagtacaaggccagctatgtccgcagtcgctccatccgctcagtggccatcgaggtggacggcagggtgtaccacgtaggcctgggtgatgccgcccagccccgaaacctcaccaagcggcactggccaggggcccctgaggaccaagatgacaaggatggtggggacttcagtggcactggaggccttcccgactactcagccgccaaccccattaaagtgacacatcggtgagtgtccaggtggaagtcgagggtgaaggggacaggacagacctcggcaaagggcttcccacacctcttgggcccctgaggaccaagatgacaaggatggtggggacttcagtggcactggaggccttcccgactattcagccgccaaccccattaaagtgacacatcggtgagtgtccaggtggaagtcgagggtgaaggggacaggacagacctcggcaagggcttcccacacctcttgggcacctgggctgctccccctccaccacctccgagccacacgtgatcccttctctcaagcaggtgctacatcctagagaacgacacagtccagtgtgacctggacctgtacaagtccctgcaggcctggaaagaccacaagctgcacatcgaccacgaggtgagtggagagcgggagaggagcatgctctcggccaccacgggcctggcaggacccccggttcacagtgggagggcagtgaggccagacccagggaagaggctggagaggtgaagtgaggtccccacagattcctcaacgcggggataggtgtcagtcccagcatgagacagatagcttcctgcccaggccgtctgagggacgatggcttagccacgttgtcccccttttgacttacaagaagtctacgctacaggaggcctttcatcaaacccaggggagacactggaggcctcagtgggctcagcgggttcctgcgcaggccaggccggaaaaatgactcggttcccttgcaagggctggctggaggagaaggcgggcttccttcaggcagaacaagtacctcctccccacccagacatgccggtgcttgccctggggcccggggagtgcaggctgccgctgctgagcacagacacggcagcgtgggggcagtcaccaggccaagtctttgttgtccagccttgaaggtttcaaggcctcctcttctgcccctccctcagattgaaaccctgcagaacaaaattaagaacctgagggaagtccgaggtcacctgaagaaaaagcggccagaagaatgtgactgtcacaaaatcaggtgaggcagtagcaaagggacctccctaagaccccactctcctacaggacagttcagttcatcccctctcgtgattgacccctttcattttttatttttatctttatcttctcccctcatggcattaaaaaaatccgtaatttacctccctgttgtcagccagtgtggcacacggacctgctcctcagccaggctggcgcccagattccagtactgctagcaagagacccgtgctggctgcgcagagccggctccaggccggaaaagtgcctctgccgattgccctttcagaaatcccccatgtggtttgaggtccatgttcccggcttaggggtcccctggcccaaaggactgaactctagaacagctctaatagaacattctgtgctgacggaaatgggctatatctgcactacaccacacgtggctggtgcatacttaaaattttggctagtgtcactaaggagccaaattttttattttgcttaattcaaattgaagtagccacctgtggccagtggctaccatactggacagcacagctgtagaagccctgctgtctttccagaaagtgttgcaaaacacaggcttccctgtgttgaccccgaccaagtgtgagtaggcagggtggtgagggaaccaacctcaagatgctgaggctttgacatgtaaaattaaccatcaaaaaagaaaggaaaaaggatgctgaggctgatgcacctaaagccaggcccagcttctagtcgtggctaaattacaattaacccaacctgctaaagtctagcaaaagtccaggcagagtcctggctcatgcttggagaaagaagccactcaggcaggcacctgctgccctgaggatagggtcatgccctacccaccaccaccccagaaggagggacaggggtggggcagcagcaacacatgggagtcccagaaatcacagcttgcacctgccagcggagccctctgagccactcctgaagcctggggctgggggggtctgttacagctaccacacccagcacaaaggccgcctcaagcacagaggctccagtctgcatcctttcaggtaagagcagcttgaggtcctggggaagagatgcagaggcctgcatgaggaggtggccctcccttaagctaaaactcagaagaaaaggaaagaagtccaggcccttccctgggaagtccacggtagccctcgaagaggccttacttcccaatcaacactgagcgggcctccgacgcccccttgtggctaaatggggttaccgcaactccaccaagcagggcaggacacaggaaggaggggaaaggggtgtcaacaggagtcccagtagctgcctggttctgtccccagcttgtgcccccttgggagttaaagtagaatgacaagacccaggttctggtcccggctctgccttggagcagcactgggacttgggaccctgaattgctatgcccatggctctctgttggagaagcctcagcgaagcccttaggtggacaggaagagcagagacatggggtcactgatccctcagaggcccaaggtgtgtgtggccctctgcgcccataggaagggcctgcaagagaaggacaaggtgtggctgttgcgggagcagaagcgcaagaagaaactccgcaagctgctcaagcgcctgcagaacaacgacacgtgcagcatgccaggcctcacgtgcttcacccacgacaaccagcactggcagacggcgcctttctggacacgtgagcaagcccagggcaggggtggacaggctgaggcccaggggttcaagaaacttctccacttagtgacccagacctctctcagaaagggggtccccaacaccaggggtccacggtgctcgggacagcctcttggcatttgacgaactggttttaggggctgtccctgacaggaatcactgttggcagatggggcctcctcccgcaggcactcaggacatgctctctcttccttggcagtggggcctttctgtgcctgcaccagcgccaacaataacacgtactggtgcatgaggaccatcaatgagactcacaatttcctcttctgtgaatttgcaactggcttcctagagtactttgatctcaacacagacccctaccaggtacaggcaacccgagctagagggatgggggtgtggggtacaccagtgctgccaggtaggccccccccaacctcagggaagtgatgacaaattgtccaagtcccactgagtccctgagccggtgggagtaagttgtgaagctgctgagattgggggttctgtgttcaatcagccttttttgcctccatcaccctgctttttgcctccatcaccctgcgtgtgtaatatatatggcttcttccctctaacttaacatgcagcatgcaaccaggttttgccggaacttgtgaagactcctaacactgtcaggctgtaggatcaagccaaatatcacccactgcagggcctacacggaccgcgcagctaatataacagtaacacactgcaccaagcactctgctaagtgcttccgtacagtaagccatctaaacacacatgcgactgaagtggcccaggaccacacaagaccaaaaggagcagtggcatgtctggtcatcggaacatgtgggcccttgtacagggacagtcactactgagctccagcactagagctttcctgtactgtggccttggtattgcccaggctttgacctttcaagaaaagcctgaaataatttaaatgaaatctgatgtttaaatgtcagcagcacaaatgctttaattactatataggtgtgcagtctttctccttagataggttcaccctcatactttaccaaaggggtaggttaagtccctcaccggtagctcccagactacacaagaacccaggccacttacccgtcctttcatcaaatggctgctttgcaatcaggaggagctgagggcccctgaatgaaggctgctgataaaaccaagacttggaaggctttctttccaagcttgggaagtttcctgaccagtggctgcagaactccaacgttaaatacacagacgtggtttttattctcctgagttttcactctcatgaagagtgaacctggtgggacttgaagccaaaaagtcacctaactcttccaaacgctggctcttgcagaagttggagtaaacaggtcaccagcccctagcaccttccacccgccacctgcctgaaatatgtcccctggttggtagaagggcagggcgagagtccctgtacttaccttgttgacagactaccttttttgcaaccagctgatgaatgcagtgaacacactggacagggatgtcctcaaccagctacacgtacagctcatggagctgaggagctgcaagggttacaagcagtgtaacccccggactcgaaacatggacctgggtgagtaggcaccccaacgtggggcccttggacagcagggtaaccaaaggaagggactcaggaggtggtgtctaccccaagaatgagcctgaaatcaccaggctttgggaggtgatacagttccagacgagtcatgggagcccctgtccatagcaggcagatgacctttaacaagctgtgattcctgagagaggaacacctgcaccaactgcccaggaaacacacggaattccgtctcatttcattgtcctcccttttgtccactcatgcattcaacaaacacttcctgagaacttacacctgaaaccatgttgactaaagatgaccccatcctcgctgacttgtgtggagccagtgttgtcctaagaagagcagtccacagcaggaggcctcttgcttgtatggaaagggtaaaactggatggtagaatccagtgtgactggggaagggcactgctaaataaaaccagggtcagacctctgaactgagtcctgaaaagtaggatgcaatcgaccactgagaaaacgtggagggctggcgctccaggaagcttaaagtgtgaggagcagaaagcagctcagggggtgcagccaacacaactgaggccagtggagagtggcgggagggcatcgggccaccctgtgtggggcttcctaggccacggtagagtttagatttcatttgtggtgtatcaggaagccaatggagggttttaacctgggcaccgacatttgctaggtggagaatgggactttatgggagaaaacagcgaagatggcccagttatccagggagaaatggtggtggcttggactagaggtgggagcagtaaagatgatggatttcagattcaggtggtgaagcccccagacaacatggtgatgggaggtgcgggattaggagtcccaggtaaatcctgagttttgtttgggacaggacaaaatctgcagttttaagtttagaatgccaaccagatagatattttaagatgaaaaaagctaaacaggcatggttgctcatgcctatgattccagggctttggaaggctgaggtgggaggagacttgagcccaggagttcaaggttacagtgagctatgatagcaccactgcactccagcctgggagacagagctgtcgccccatctctaaaaataaaaaaaatatattaaaaaaagaaaacaaagctaaaagaaaaatgaagttcacttactagtgagagagagtggcctaaaaaaaacctttggtatttaaggtcccttggggaagggactgtgtctaggaggatgcctagagttcatgtcaggaaaatggctacacagcttaggaggaattcagacgctaccgtcggctctagttatgaagagggaagagctaatgtgtttacacaagatgttgcactaatacttctggtcaggagcctgatatgatcagaattttcactagtagcttcctaatctctgccactcaagtgctgctactcttgtgatcaaagtgcaatgacatattagtcactgtgtgccaggctctgtgctgagcattttacatgtgttagctgataagctttgaggtgaatcttatcctcattttatggaggagtaaggtgaacaaggtgggctgaccccggagcccacgcacttgatcctgccacatcctcgggaaaacttccccagagcccaaaggggaactccctcctgcacttggtcagggctcttggctttctgtcctctggagcacagatgttcatgcctgcatctacctccctcaccataactaaggtcagcgctgaatgaagccatcagggtcctgaaactgatcatggtgacactggattttaggcaatctacaaggctatctaggagacttagggcaggttcccctcataattcagtctacccctcataattcagtctactctgagtagggaacactatcagcatcatgggattgtgacaaaaaagcataagatggttttctggtgtgttggggttgttttgcctaaactatctgctcctgttttgtttttcatttctccttcatttaggacttaaagatggaggaagctatgagcaatacaggtatttcgttttattattaaagcctaaacaaagttctcctatcttggcccatccttcagtctcatctctgtgagtctgcacctgttatcttgagaaactgcccttccctctggtctgcccgagaccaggatcacccaccaaagataggtgtcacctaggagaccttctttgtatagttctttggggactttttctttcttggtgatggttaacattcattctcctttgacacttgaaaacttaggcagtttcagcgtcgaaagtggccagaaatgaagagaccttcttccaaatcactgtgagttgaggaaccagcttacaaatagaaatctggttctgaccgcttcattttgccaatgctattctatttgcatgccatttcttacataccaccctttgtttgttctcatgatgagggtgggggggaagtactaatgcacatctttccctaagaaaacacttgaatccatttcatgttttagattaatgccttgtccagtacactgctgttctcgctataatctgtgcttggtaaacttgagctattacttagaggttgagaagcatttaaatattacaaattgctaggcatcttgaaggctgtggctacaaaagtgctaactgatatacaacatcagtagtaggatggcctcattaaatggtttccaaaaagcccatgctacaaactctcactccagtgccattggaggctgacagggactaagagactggcaacctgtaaagttcacctctattctaaagggagcaggccagtttgctccctgcaggaatgggctgaggttcgccagattttctcattcgtctaccaaatccaaaaatgcaagtatgtgtgagaattctttatcattatcatctaatttgacattaagttaaccatgtgggcaaattatcgcccttggtgaactgccacttgcaacctctggtctactcatttcttcctttatatgcatataaacctgtgtggctttaataggacattagtaacaggtcacctaagcctttcttcggtgcttctagaattaaggtacagaatctttacatatcacaatctccttagccactattctgtccagatccttaaatgccatccttgccaggcattgggtgtataagtaaacaaaaaattgaggtgactaggtggtggcaatcccgttctaagtaacctagaaatattcattctcagcagccttgaagcaaagcttcctcagctataggaccgattaggaagtcatgataaagaccatgatagctaagtgctaagatgagtttgttttgttctttaggggacaactgtgggaaggctgggaaggttaagaaacaacagaggtggacctccaaaaacatagaggcatcacctgactgcacaggcaatgaaaaaccatgtgggtgatttccagcagacctgtggtattggccaggaggcctgagaaagcaagcacgcactctcagtcaacatgacagattctggaggataaccagcaggagcagagataacttcaggaagtccatttttgcccctgcttttgctttggattatacctcaccagctgcacaaaatgcattttttcgtatcaaaaagtcaccactaaccctcccccagaagctcacaaaggaaaacggagagagcgagcgagagagatttccttggaaatttctcccaagggcgaaagtcattggaatttttaaatcataggggaaaagcagtcctgttctaaatcctcttattcttttggtttgtcacaaagaaggaactaagaagcaggacagaggcaacgtggagaggctgaaaacagtgcagagacgtttgacaatgagtcagtagcacaaaagagatgacatttacctagcactataaaccctggttgcctctgaagaaactgccttcattgtatatatgtgactatttacatgtaatcaacatgggaacttttaggggaacctaataagaaatcccaattttcaggagtggtggtgtcaataaacgctctgtggccagtgtaaaagaaaatccctcgcagttgtggacatttctgttcctgtccagataccatttctcctagtatttctttgttatgtcccagaactgatgttttttttttaaggtactgaaaagaaatgaagttgatgtatgtcccaagttttgatgaaactgtatttgtaaaaaaaattttgtagtttaagtattgtcatacagtgttcaaaaccccagccaatgaccagcagttggtatgaagaacctttgacattttgtaaaaggccatttcttggga

SEQ ID NO: 15836 - DNA, 32086 bp, Homo sapiens
atgtcctatgcccccttcagaggtacgtggtggggggagggggagggccatatggggggcaacagggggaggggcagggggcgggggagagtcggggccgagggaagggagcggctgaaatggagggagaggggaggaccgggaaggcaggggtgggagcaaccgggaaggagggattggaggccagagggataggggtagataagggatggaggggccaggaaatgggccttgaaagggggctgaagggaaaatgatgaaggggaaagaaagcgccagaaaggggtgggaaggtagaaggattgggttggggaaaaagctgcagaaataatttgggggtgggagctgagtgatgaggaaaacatcaaggaaatagagggacagagtcttgggagaggggctaggaaggagaaatgaaaacataggggtgaaaagagaagccaagaagatgtggggggataatttggtgggggactcagagtatggtaaggggcggaaaaagagaggaggatggagggagagaaggggccagatggagagagagggaggcagtggggggtggggggatggagggtccagatggagggaagagagaagagagagggaacggtgggggaggggagaccagggcagggggagggccaaattatgtgtgcttgggggggtggcagtacaagtaagatgaaatgatgggagtaggggacaggttaggatcctgccccagactctgaccctcttaaaggctcttgaccagtaaaatgtaacctctggggtcttaatgctgtcttcacttcatcacttttacccccttcccccacccctccaatccttatttccattccccctccctcctctgctgtccatcacctatatctttccccccatatggtgtccgttccttatatgagtcccccttctgtccttcccctatatcagtcccctctctggtgttcattgcctctctcttatctcttttctatgtggtcgctcccttatatctctatcacttctttactagtccgtcttgaccccttctcatagcctccgcattaggtctgcctcctttgctctgacacatgtccagtcgagcccttcaggtgtattcccttgcccctgggcatttaccatcatttctgcctccttttctatctactcctattatttgtctcccagaccattccttgtcaccacaagtctgtgcctacccactttcccttaatacctcaactcttattatcatttctcttttcttgtctcctctacttattggggtgttggagatttggggtacaaagacacaggttttgatgattagaacaagggatccccatctcagcccttgagggatttctcatcctagtaaaaatttcccgtttctcagccatgttgctctgcctcttgcatctgcctcccagaatcattcttcaccaagtccagacagtatgtgtgtgtgtgtttctagagttgttcctaagttccctgctgccaggagaaagatgccctctgaagtctaacccgcctcccttggctgcagcctgaaccagccctttccccaaatgcttatgtgtatcaacagatttctcctctgggtataccaagtgtctaagtgcggtgggcatgttgcctgcaatgtctgtagtttcagaggctaggtattggtgatctctgtatctagagaacattagttagtctctgagatgggttgagatagagtttcaaagtatgtggtttctaaatggtggacattctgagggttcatcgctcactgtgatctggaggttgggtaaatttgagagacatatttatagacagaaaagggctgaatttgcaaaactctgctactcagtgcattctgttggaatgaagctcaaagaccagttctcctgcagtatactcatggttatcccataaaggtgacagagtttgatcttttttccatctaaaatctgataccttaagcctaatttctagctctttgctgtcgccaatgtgacatctctcttacttcaatagggcctgtgtggcattggggtttaaaggagaggcagtttgcagggagagcggcatggcaagaacaacagagctggggaaggaggaccctggtctcatctcagccataggcgacacttggtctactgttctctcttctcaaagttttgttcccatctccagctcttgtctttggaggcccctctgtgtcaccaggcctggatattccattctttccccctgacatctttcttcctcaagctcctcactgtgccttgagaaggctcctgacctatggagtggcttccatcctgtccactgagactaggtggggtgaggtggtgggggcagtgttgaatctctgggcactgaatgggagaagagataaatttggtctctacttgtccaaacaagggcatatttcccaccttctgccctggggcctccacagccagatgccgacaaaagccatcttctccttaccaccagaagaaccagaactttccctaaaggatgagcagggttgaactaggggaggagggcacagaggagggaagagttgggaggggaggccctctcatgtctctgactgtgaacaggtaagctccccgacttcttcttttctagatatttagccctcagaatctcatgatcccaatgttcctacacacacaccccatccttctttcccacagccatgtagctttcctcatactcttttatagaggggtggtgccaccttccaagtccttgtcttctgcagctatttggatgccttcctctacccagatatctgacaccaacttctctgtttttctcctgccaattttgcggcacctctaccttattttcctgaagtagatggagagctccttcatctttctctgcccccaaacgtgtaccttctctgtcatataattcccatccctgaacctctgcatttcttcccccaagtctccagagccttctgtgatgtgatcctctcctcttttcccctttgtataaatgcttgtcttgtgttcctttagagttgccaggtgtctcactttcaactgtgatctcctgaaggccggtagggtccccttctcactttgtggactctcttcttgccattttaggcctctgcttccaaatgcatagagcctcccttactgtttctgtgtgtctctgtcctccagatgtacggggaccctctatgcaccgaacccaatacgttcattccccgtatgatcgtcctggttggaaccctcggttctgcatcatctcggggaaccagctgctcatgctggatgaggatgaggtgagtgtggtgagaaggctgggaaaacgcatgtgggagaatggggagagtcctcattagtgaaggggagagagacacaaagaaggcagacaaagaagaaacatttgcaaatggcaggagggtggccattgagacttgggttggagtgtgacaagaggggtagtcattctctcatcttgggcagggagtctttgagggttatgagctgtgttggggaggagatgtggttctgaagatttcgggggtggggaggctcctgttttcacactgtccatattgtaggataggttagaatggggaaggggaactgaagggtttggagaaggggtgaagacatggaaggccctcccaaccaaagcaatcctcaggacccctctctgctttgcccactgagcaagactcccagtcctttctccatcagggggcagagtgcaagaagagaaattgcaggacgcagagaaaaggcaggggatagaggaggttttaggtagctggaggatactgggaaagaagactgaggtcagtggatcttggcatgatggggtgaagactgggagagtgattgagatcaaggtttagagagacactgagagggcttctgcaagggagtggttggacatcaggaaggaatataagggaggggaactgggagtatgtggagttatctaaaggagtacaagtggagtaggggcagggactagccagagtaaaggagatgaaacggacagaggcctcttatgggaggtggtggccaggtatggagatctgagagccagggaagtgtgggttctgatttgggagctgggtcagcaggagtgtccattggaggaaatagaggataaaaactggaatggtgccccacaagtgtgagtcagggaatgggggtgatttgggggacaagctttaaaaaatggtagggtagcctggaaaaccaaacgtggtgagagatggaccctgaaagttattgggaatggtgtgatgaggaagggttagaatttgagtcagggctaactagagtgtcaagggacctatgggggcaggtgagagtgtggagagatggctgggtagacagcttccaggccacagagtaaagtagaggtgttaaggagaggatatggtgactttgaaaggagaggtggcttggggagtctaagttttggacaccattgggagacatttgagtgactgtggtcaaacccctagatcaaggtttggagtctgtaggagaaatgggggaaactggaacccagagtggggactgttatagggatgaagagggaagacaatggattggggtaatgaaggaatgacagagatagggacagactgaagggaccagtggccagcaagttgaggggcaataggaatggccggtctggagcaggaagggcgtgtgtgtgggaggaggagtagatagaattgggaaaatgagcagcctgaacagacgcagggagttggaattggatgggtggtggaactggggctgggggatagtgaggggtctgttcctgtggctctttgtagaggtggaggagactgcaggggtggaggtgtatggaggtagggatggaggtggacagggggagctgggtgtgaagcttagggaaaggtgatggctgaggggaagaagggaactgagagatgctgggtcgggtgatggaaggagatgaaaggtgggggaaggtgaccaggccctctggcgggaggggaggttgggtcccagtctggccgcaagccgggccgtgggagggagacaagctgtggatcctgattataaatgcagcttctgctacccccgtgacaggctcggagggagagaagggggtaagggaggtgggaggttgggaggaaagcagggagaatggaggaactgaaggtcaagggaaaactggattcaggaagtagctaacttctgaggagttgcagaagagctgagtagggtttgggagaattctccggaaggtgtttcaagacaaatggagggagaaaagagggtgggacggcaaagaatgagagagagagactgggggagagaagggagagatccagtcaccaagtgtggaggggccggggcagaaaaagtgggcaggcttagggggaaaaggaggcccgcccttcctgggaggaggcggaggggggaagagggaggggaggggcggcgtgggccagggaggtctgacacacccccacctcccctagatacaccccctactgatccgggaccggaggagcgagtccagtcgcaacaaactgctgagacgcacagtctccgtgccggtggaggggcggccccacggcgagcatggtacggcggccgagcaggctctcatgacccggacaggcgcggggagagggctgaagatggaccgggctggcggggcgggggcgtcggggagcggcgggagctggccgggggcgggagaaggcggagacaaagtcttgcttcccgaggggagatggcgccctcctctggaaggtggagcgggacaggggctgtgggtgagaggcccctgtgggtcctcgctcggcttcgctccctttctcctctccagcagtgaagtttgactattttcctggtgcttgtaaaaatagtctccttagatctttagcttccagtccgtgtgttcctgcccctgcccctcccagcccctggtctgggatcttggaaagaatgacctagttcctgccctccccccagacctcttccccacccctatgctcctgattcttcttccggaccttcagtccttgaggtctccttttattaccccctgttttctcctctcatcagctgcttctattttctgcaattgtatcaccctttctctttcctccctgatttctcttattttctgtacccctcttgattaccccgtccctcccctctgctcccggcgaaagtccatcagactcccatctcatctcctttctgtctgtagagctatctgcgcggtctgtctctccaactctctccctctctccatctgtctcttcccctccctccccctttctgcccccccaaccccctctttagtcatttaaaaaaagatttttgtcttcctgagaagttcgcttaaaaggtttccatgggaacagtgaggggagatgaaggcagagaacagagatctgcagccaaggtgcagagagacgccctcagcccccggaaaccccctcgtcactgcccccttccacttcatttcccttcccggacctagcgatccaggttccccattcctccaacccccaggtgacccctttttcccaccagctccccctcccttcaggaattcaagctaccagtttctctcccttagagagccagtgacctgtccccatcctttggctccttccagccttctgataggtccaggccctactagccttgtgggccggtttggggaccttgggtgggtgggtgggtggtcagggatgtgtgtcattgtcatggaaaccccataccatcggggtgtgtgggtagcacatctctgtgaggcaaagtcaggtggtggtggagtgtatacagagaatgtgtgtgatgtctgtcacatctgtgtgtatatgtatatgtgtgtatgtcatgttcatgtctggggaagatgtgtgtgtttgtgtgcatgtgtgtacacctgcgtttccaggccagaatggtcacatgctcacagagcatgtttatcatgtgtcctgtggttggcagatctgcccacttattccccatctttctccttatcctgagtcctcagggtctaggggtctctggcgggggtctcccgtgtgttttgggtggggacaccgtgtgtgtttggagttgaggtggcatgtggaggttgctgtattggggttcagtaggggctgggaggggttccaggggcatatgtatttggggggagggcttagtgaaagttgatgggggtgaacgtttagggtcttcaggcagacatggaatgtgtaaagggcatggaggatgtgcagtggacataggggtcgttgggaccttggggacttggcaatgccaaggtgtttgctgaggctgtggactctccagcccgggagaggtcgccggacctttgaggggcattggaatcctgggctcctcctctgctgggtggagccgcgaaccctcgttctctccgcggttttgtgtgtgtgggggggtcctgctcaggaggggatggtgggtggcctggtttgttttgggggtccccttgcccccctcccccgtctctctcgcgctgtctccgggcgacagggctcgtgacagaggcggccacggcagcagcggtcgcctagcaacggcggcggggcccgggcaacggcggcagcggcgggagcggcggcggagggagccgttcccgcggccgtcaccgcgcggccgtcccggccgtcccgggccccgccgccgcccccaccgcgccgggcggcgcgagccgggccgtaccgccccctctccctccgcaccccgcccttcccccgcgcaggggcggggcccctcccccaccggggacacccctggcccccccggggggcggtgcgaggtaagggcggggccgggcggactaggagcgcgcgtagaggggggggcgccgcgcgcgtggggcgggggcgcgcgtgtgcgtgggcgcggggaggggggtggggaagccgcggtggcggcggcggcggcggcagctgctccctccgcatgttctcgctgcatcttccgagtggggggagttatggtaaccggagggggacagcggaggacgggagggtcggggaccggcctcgtgcggacagggtcttgagcacgcgggggcggccggtgtgtgtgggatcttggagcccctggtggaaggggcagcccgtgtgtccgcgtgtgtgttcgtgcccatgctcgtgtctcctgtgtgtcggtgccatgtgcacacgggggcccagttcctcgtgcacacatgtgcagccatccttgtgcaagtgtgtcctgtcttatcttgcctctgcctgtttcctgcctagggggctgttgggccagccacgggcttgtggggcagtccgcggccttgctggtccatgtcacctctgaccctgagcatgcatatccctggctggggctcacctcctgtcaggcttctgtgtgtgggaatgtgtggccctatgagcaggattttctgtgtccctggtggcaggtgtgtgtctttgcatgtgtgttccagcactggcctgagtatctgtgtcaatcccagcatgggtgtccagggcgtgtctggatgtgggtggtgtggctggggggagtaagtgtgtgaatgtgttccttggaattctactgtgtatgaaacacctttgggctgggcaggtgtaagccctgcttggtcagtaagtggggacagaaaagcttaaaaagggaagaaatggggtaaagaggaaaagtggggaggggataggagagaaggaatgagagaggcttgaagaagagagcagagagcagcaggccagggagaaagaatagctggagaatgggaatgtgggagaaagccaagccagacttagaagagagaacaggggataagagcttaagatggggaactggatagagatggtgggagaagaaggggtctgggagctggggaggcagtggggaggagagagtcaggccttctggtaaagtgatctctgaaagaagaaagggaagaagatgggagaaggcactggattcttgtaggccttgcaggatcaggcttggttttggatcagggaaggccactcaggcatacgggctggctcacagtgaggcctgtcatagcagggactgtcattagaggttcatatccccagcacagagctctgtctcccatttctctgctctgtgtccaaccctgttcttcgcccttctctggcaacctccctcctctggctccccttgagagctgccagctgggtgtggagaggaagaaaggccaaagggaaggttagggatttggagggcagggggagattctgtgggtgatggcaagattagagatgttggaggggcaggagtccaagcccttgctgtgtgtgtgtgagtgccattgtgtgtgtacacagggtgtgtacatgtgtgggtgtgtgcacaatgcctgtgttacgggtttgtgtaggtggctgttatgtgtgtgcatgcgtgtatacatcgtgcaggcatgggacatggagacccaggatcacagtttgtgcttttcaggtttgctgtgtgtgtgtgtacacgggtgtgtgttgttttctctgtacatgtcactgcatgcagcattaataacaggatgttctgtgtttctgtcactctgccccccctttcctctgtgtttctgctattcttttcctgcggcaacaaaagtgtttaataagcatatgtgtatgtggcctctgtgtacctgtgacttatgagtgagttcatggatcttagttcttggtaatatgtgtaaggttatattacttccaagaaccaagcaagccaattagcaaatttgttcttctgttaatgctttagttccaaagcggaattttaatgcatttaaagttagactttatgcctttattagatgagcttgcacatgaaaataatggctgagctcggttccctgaaatgagagtgaggcagccatacctgagaaatgcagaaaaaatgttactagggaagagatatcctgaaccattggatgcattgcttagtgtgtaccagaaggataattaacacatttgctcctggtttttctttactctggtggcaatctcggatgcctgtgttagagtgagagaagggctgggggaggaaagggggttgtcctgagacagagtggatgtggttgtacttttcacgtgaatgaaaggatgtttgtgcttctgagatatggggatacctttctgtggtcaggatcatggtgtactcaagcatgtatttcaggggttaaactggaattcccctgcatggggatatgtgtgtcttagggttataggtccatttctgtagtgtgctgtccacatgattgcccaagagacttgggccacaaagtccacaccagcagctctcatgtgggtcactgggttcaagtatgtactcccttgttgcagagctcacatatgtcaaagcatgtatcctgtggggtgtgtgggcctcagggtctcagaatgtggatccgtgctatgcccgtgctcacagttgtctgtatgtctcaaaagcacatagatccccagttatttttctgtattgtggttctcatatacacgtacctccatagctcagtatatgtttctgtactatacacctgttcctgagggagtgatagggttctcgtgtcatggggtccacatttttgtatgcaaacctcctaacacctgggttttacaggtaaagggaagctgaggactgattctagggcagtttgcaggcaatttgcaattctggaagcagacagtgaaaatataattgtggtcctcccttgttctgttctggaacctagagggttaacaggcagctcttccggtccacccccctccttccagcctgtagcttcttgttgccgtggagatggtggccccgccccgatgcagcacctgcccccccattggctgcagtggtgactgtggggctgaggggggagcccaggcctgggcagccattctggagctggagccggagcttggcatccccccacttacattctcttccagcccctcggcccctctaaattcccttgcagccgagcctcagcttcctttttcagcgcttgccatccctctaggctcttggcagactgagctgcatccgcattcacctcccctcctcctcctttccctatccttacttgggagtcccgagaacccccactgtccatccttcctgctccctgcccattcccctgcattctttgcttttcccctccccccaccaaccttctgagcccctgccactgcagtgcacgtggaaccggctccttctcccttccccccacctgccccttccttggattttctgtccccagcttctccccctgctactcttcacaggtctcttccaagacctccccctccagtccagggagggggtcatgggaggcagccctggccctccagacagacaggggttccaggaggtggggggcaggtggaagatgtgcccaccagggggaagaggaaagcctgcctatgggcaatgacctttaacccatctttccccccagctagccccttctggggtgggtgggcaccagggacctagcctccctggatctttggtgtccttcattactggggttttactgaccctctcagccatgctcccctgctgactgccagccccagtcatgggcctaaggcctcccaccccatccccctcagggggctcctgctcaggttccttgccccctccttcccgctgccagcctctccgccgtcgctgctcttcctgctgctttccggggggtaggtgaggccggagctgaggggcagagggaggtgggggcatgcactggggtcaggggtgggaacctgggttaacagcttcccttctggccccctccccaacttcccttctggccatttcctcccctccagaataccacttgggtcgctcgaggaggaagagtgtcccaggggggaagcagtacagcatggagggtgcccctgctgcgcccttccggccctcggtgagtggtgcctaccagatgtggctcagttgggccccctcccctccagccccaactggggccctaggagtctgagaaagagggcaggagggggagagagggagtgagagtgagaaaaagagtgtgtgtctgtgtgtgtctccccacctctttggtttcccccttcttggctctgcccccctgcttctgagaccagccctcccaccttctccaagctgtgtgtgtgtgtatatgtgtgtgtgtgtgtgcttgcactgtacccgtgggagcaaggaagacaaactggtattagggttcctatccccctttcctcgcctctggagacttcccttttccccatcccactttcatccaggggctctctaccagctgagggatgagtaggtagaactgaccctgccccaacccaccccatccccatttcccccccagcaaggcttcctgagccgacggctaaaaagctccatcaaacgaacgaagtcacaacccaaacttgaccggaccagcagctttcgccagatcctgcctcgcttccgaagtgctgaccatgaccggtacaggggctggagcatgtgggatgagattgatgtaatgtagggtctcctgtgtgagatgcagagggagggggttatctgtgtgcaaaggttgaaggattcaactcaagttggttgggggatgtcatggcacaggggacagaacagaaaagaactagaatagggatctgtgagcagcaggagaggggtagggtggcagagagaagacagacagacaggctggaaagggaatgaaggtgaagccaaggagggactcctcagggactcctcaggccaagaaggatgggctctagcccaggatcaaaggagctgtacaggaggagagtgaccctggaggaatgtttaaggaatgcagggaaggggttggtaggtgagtgagcaataggctgtaggtggaagggtgtcagggaaggtcaggaaatacaggggcagcaggttggagtggggctgggggtggctgaatgaatggatgatggctagggctcaaggacctcatcagtgagggaagagacagtatagagcatggcagagaaggggaggctgggacaggtgtgcagggtgacagaatgggaagcaacccatggactgaggcatgaagaagcagccagcggagaagtccagaaggcactgtccctgagaccaggctgaaggagacctccactgtttgcctttgttgcctgccatttggggttcctctctgggtttccccctcacccagtcactccccagggagaaccatgccctccctttcccccatgtctggccacccccaggattgggcaggtagggaggttgggataaagtgagtcacacctttccctgcccccctcccatgttgccagagctggatttggggccggcagggggtgagggcatggtattcctggccgcgggggcgggggggggggtccgggggccgggggagcgtcgcgctgacggcagccagagcctgcgatgacggggctgctataaataacttcttggaggctcccacacccaagctcccctcccgctttcccactgctctctactcttcatcccctgcccatctccataccgcttttgtattgctatcctacccctcattattccatgcccctagccccctttatcttctgccctcctgcagtgatttttttgcattccatcccctcttagccctcacctcggttctcccggccatctctccagttggccttcctcctcttctcctgtcctctgtcttgctgcacatacctttgtctccccctttcttcttcttgccctacctcctcttcttccctagtccgtgtattctgtcttttatcctctttgagctcttttctgcccacagctttctcctatttcttatgcttttccctcactctttcccctgcttctgctaaaacttgtcctcttatgctgtgttcattcattctttgaatcattaaatgtttatcaggcactagccgtgtgccaggcccaggctagacatatctcttctctgtgccttcacttctttacttccactttttcctttatactgaggctctggtttctggggttacctggaggtactacctagaagtgccccaggcccactttgttctctccttttttttttttcttttctgccatggtccatttctgggttgagatatttctagatgtccccagtcctcgcaatcccttaggtgtgagatggtgggagtttcttttttttcctttttttttttttaaatagaaatagggtctcactgtgttgcccagactggtcttgaactcctgggctcaagtgaccctcccacctcggcctttgaaatgttgggattacaggtgtgagccaccaggcccaggtggagcaggggagttccttaaaggattctgatttttctcacatccctcacgtccttcctgataggcagggtttctttctgtgtctgtttgggaagggtgttcagggggccttctctccaagtctccatcctggaacagactgatgatgcagggtacctatgtgtctaagaagagtaggggggccgggcgcggtggctcatgcctgtaatcccagcactttgggaggctgaatcacttgaggtcaggagtttgagaccagcctgaccaacagggtgaaaccccgtctcagctaaaaatacaaaaaaaaaaaagaaaaaaaaattagctgggtgtgctgaggcaggagagacgcttgagcccaggaggcagaagttgcagcaagccgagatcacaccactgtactccagcctgggcgacagagcaagactgtctcaaaaaaaaaaaaaaaaaaaaaaaaggaagagtgggaagccctgatcccttcctctcctgaacctcctgcctgccagggcccggctgatgcaaagctttaaggagtcacactctcatgagtccttgctgagtcctagcagtgcagctgaggcattggagctcaacttggatgaagattccattatcaagccagtgcacagctccatcctgggccaggagttctgttttgaggtactgggtctggtgggctggggagggccaaaggacaggggtgatggaaggtggggggcagagaggtctagagaaagtggcacaggtggggacatcaaggaaacagaaacttctgggactggaggaaagggtaggccagggaggaagagaaggtagcagagtctcctcccctctgtagccctttccctcaactccacactcctttctaggtaacaacttcatcaggaacaaaatgctttgcctgtcggtctgcggccgaaagagacaaatggattgagaatctgcagcgggcagtaaagcccaacaaggtattggggaataaaggggacacaacctgtgcagggcaaaggttgcaccaacacgggaagctgggggcctagggaggaaagtgagttaaaggaggagaggcttggggaaggagaggattgaggtacagtgtatctggacaagcagggggagacccccattattctgagtcccccatttcttttcgctttctgtactgctaccctgccttacgatctctttccctgccatagaagtcatagacttacagagttgatggggctctggaaattctttagtctagcttccctgcaggcaggaatgcttcactaataccccgcaggacacatcaaatacacttagccaagtttctgtaccttggtttcctctctaagacagagggaactggtggcaatgggttggattaaatgatctctaaggtccctttggcacataaattctatgagtctgttcttcccaaaacttcatgcttccagttctgtcagctattctctgtatcccagtttctagcaagcttacagtcctagtcacactcctctggggggaactcttgtgtcttgatgtccttaaagaactcaacccaagatgctgacatgatctgacctatgcagagtacaaacaccatgttccctttcaacacactgcaatatcacctgagccttaccattagcttgtgctcaattgtatccccccaggcccttactgattcttttttttttttttttgagacagagtctcactctgtcacccaggctggagtgcagtggcgtgatcttggctcactgcaacctccgcctcctgggtttaagcaattcctgtgcctcagcctccccagtagctgggattacaggcatgcaccaccacacccgactaatttttgtatttttagtagagacgaggtttcaccatgttggccaggctagtctcaaactcctgacctcaggttgtctgcctgcctcagcctcccaaagtgctaggattacaggcatgagccaccacatctggccaagctttacccattctatatgcaattcttttttcacaatttctgatagtctctgcaggactttccagttcccttcaaattctacattaatatttttggcttgttattccagcttttgaaatctttccaatactgtttgtgttgtctagtgtatgtctacgcttctacagtagcttcctggggctgctataacaaactgctacaaactgggtcacgtaaaacaacagaaatttattctctcacagttcaggaggctggaagtccaaaagcaaggtatcagcagggccacgctctctttgatgctgtagcagggaatccttccttgcctcttcctagcttccggaggttgccagcagtccttggcattcctgggcttataactgcatccgtctaatttctgcctccatcttcatgtagctggcttccttctgtgtgtctctgtatcctgtatctctgtgtctccaaatctccctctccatataaagacaccagtttttataaggtgggttaagggtccactctaattcagtatggcctcttttttttgagatggaatatcgctcttgtttcccaggcttggagtgcaatggcatgagctcagctcactgcaacctccgccttccaggttcaagtgattctcctgcctcagcctcctgagtagctgggattacaggcacgtgccactatgcccagctaatttgtttttgtatttttattagagacggggtttcactatgttggccaggctggctcgaactcctgacctcaggcaatccacccacctcggcctcccaaagtgctgggattacaggaatgagataccatggctggcctcttcttagtttgattacatttgcagggatcctgtttccaaataagatcacattcacaggttcagggtagacatgagttttggtgggatactattcaacccagtacaccgtctcaccttatgattgctgtctgtatcccactttcttactgtctctcctcttttggtgtctctctgtcccttccccctttaacatcatgcccaccccaccatgccaggacaacagccgccgggtagacaatgtgctaaagctgtggatcatagaggcccgggagctgccccccaagaagcggtactactgtgagctctgcctggatgacatgctgtatgcacgcaccacctccaagccccgctctgcctctggggacaccgtcttctggggcgagcacttcgagtttaacaacctgccggctgtccgtgccctgcggctgcatctgtaccgtgactcagacaaaaagcgcaagaaggacaaggcaggctatgtcggcctggtgactgtgccagtggccaccctggctgggcgccacttcacagagcagtggtaccctgtaaccctgccaacaggcagtgggggatctgggggcatgggttcgggagggggagggggctcggggggtggctcagggggcaagggcaaaggaggttgcccggctgtgcggctgaaagcacgttaccagacaatgagcatcttgcccatggagctatataaagagtttgcagagtatgtcaccaaccattatcggatgctgtgtgcagtcttggagcccgccctgaatgtcaaaggcaaggaggaggttgccagtgcactagttcacatcctgcagagtacaggcaaggccaaggtgagtgttgtgccctcagggaaaggtgacttgggaatgggcacttgcttgggggttagtgaggacagggcaaattcacgagattgggttgtgcagaggctgacacttggattttcctgggcctcaggacttcctttcagacatggccatgtctgaggtagaccggttcatggaacgggagcacctcatattccgcgagaacacgcttgccactaaagccatagaagagtatatgagactgattggtcagaaatacctcaaggatgccattggtatggcccacactcaggccctcttcttcccaaacctgccagatgtccaccccagaccccaagtccacccttccacagcttgatacttcctaacccagagtcctaggactccagcctccaacacctgattctgaaatttccccaaccctggccacccccttccctgcccttggaaagtgtgaccacaccctcttgtgcccccaccccccaggagaattcatccgtgctctgtatgaatctgaggaaaactgcgaggtagaccctatcaagtgcacagcatccagtttggcagagcaccaggccaacctgcgaatgtgctgtgagttggccctgtgcaaggtggtcaactcccactggtgagactgggaacgctgggctggggggccagggtcgggggaattatgtgttcatctgttcatctatctgtccatcctcaaagaggactgagcaccatttatgggcaaagcattgttctaggcgctatagagcaaacaggtgaaagaggcctggtccctgccctcagagggcctccaccagaatggggacaaattagaagaaaaaaaaaaaaagccacagagccataatggtgtgtaagtgctgagtaagggtccccccaacctctgtgtgacataaggtcagagagaaggcagagctttgagataagtggggaagaggtgcccccttgggtaggctttgaagactggtttaggttctgatatatggacatagttggcaagaaagacatttcagaagaaggctgtgagaaaggcacatgtgtgatggtgaaaaggcccaggagttttcaggggacattaaagtaggttagtagcaattacatcaggtttagtggagcatgtgcctcataatggggagtggcgggagagatgtctgggcaggaagattagctttagaaactggaaggcctcaaggagtctgaggtcattggtaggccttgggatgccattaaaggtgtcagaaatattgtgatttagaagattaatccataggctgggcacggtggctcacacctgtaataccagcactttgggaggctgaggcgggcagaccacctgaggtcaggagtttgagaccaggctgaccaacatggagaaaccctgtctctactaaaaatacaaaattagccagatgtggtggcacatgcctgtaatcccagctattcgggaggctaaggcaggagaatcacttgaatctgggaggtggaggttgtagtgagccgagatcacacgattgcactctagcctgggcaacaagagtgaaactccatctcaaaaaaaaaaaattaatccataagtagagtgtatgtagtagagtagagggatgtatgttgggggatgactggaatagagccagctgggggctcggaggcatgaaagtcagatcctgaatcagaacagtgacagaagttaggaaggagctactggaaggaccctctcgggaaaggatcagtaggaattgtcagcttattggaaaggagggagcatgtctgtggggagtcacggatgactcaagaggccatgaggctggtggttgggagaccggtggcctcattgacaaccaggaaagtcaggaggaggagccagttggaggtgtgggggcgatggtgagctctgctttacaccagccgagtttaaggtgtcagtgggacattgaagtggaactgggaggtgcggggagtgagctctgagccattccagggactggggatcatgcctggggcacctccatccccatttccctggaatccagaagagttggggggtccgagctccctgtacctcaagtgaccctccatctctctcccatctctgtctctccctggtgtctgtttttcttctcctcctctccttgtctctctcccacacccctccatctctctcccacgtgtctctcccctcaccttctctccccctccatttctctctccctaatctgtctgttccctctgccatggcccccttcttcaagcagcctcccatcttgctcctgcggtccctccttccctgtctctctcacccctgtttccacaccctcacctcctaccacccccctcagcatgttccctggaagctgagggtctctggggctcagtcccggtctctctctttctctctctctctctctgtctccccgacccttccccccagcgtgttcccgagggagctgaaggaggtgtttgcttcgtggcggctgcgctgcgcagagcgaggccgggaggacatcgcagacaggcttatcagcgcctcactcttcctgcgcttcctctgcccagcgattatgtcgcccagtctctttgggcttatgcaggagtacccagatgagcagacctcacgaaccctcaccctcattgccaaggtcatccagaacctggccaacttttccaagtgagggaagcttcaggagtgggcagggcagggagtggcagggcagggagtggcagggctgggggtcggcaagaagggtctcctgagtccccagagatcctgagatggggaggctatgataccttgtgtgtgtgtgtatgtgtgtgtatgtgtgtgtgtgtgtgtgtgtgtgtgtatgtgacctttatcttctgcattcttggctaggtttacctcaaaggaggactttctgggcttcatgaatgagtttctggagctggaatggggttccatgcagcagtttttgtatgagatctccaatctggacacgctaaccaacagcagtagctttgagggttacatcgacttgggccgagagctctccacactgcatgccctactctgggaggtgctgccccagctcagcaaggtcagcagatcccctctttgccctatccccagatggctccagaggttcctggagcctgagaaactaccctttgaagattttttttctccccttgtttctcgaggtgtcaccactactatcccaactcaggccccctccacctgcaccctcagaggccctcttagagctgggcactgagcccccaggtaacagcctcacccttccaggaagccctcctgaagctgggtccactgccccggctcctcaacgacatcagcacagctctgaggaaccccaacatccaaaggcagccaagccgccagagtgagcggccccggcctcagcctgtggtactgcgggggccatcggctgagatgcagggctacatgatgcgggacctcaacaggtgagcaccctgggacagccaggcctgtgccctaggagcccttctcctattctagatactcctcactgggccccacatgcatctctctagggcttgaaagaagggaggaaaaagcaccaagttctcaggggagacgataaggagacaggtacagtcagtggtaggctgagagccctttacagcctgagggagtgagagatttggagctctaggaatagggctgaggctccaccaactcacggcttagttgtaagcctagagcatccctgctgcaagctctgatttgctgtccctctgcctgcccatgctagtccccaggctgaggttcagccagcatgtcatgtcagccatgtgtcaaaatgttcaaacatctcagtaatagctagtgaataagcacttcccccagcccccgaccacaaccccacagacctccccatgatccagcacttagagcagtgacagcagaagcctagcagggcctgcagcctgctccagagtcccagcctccattctgataggtggtgcccgtgcttcatttgctgctcattattttgatgatggccctgctttttcctctgcccgtgtcttcctccatgacaccatacccatcccaccattcccgcctctcctttcatttgtccacatctctctccttctctgtctgtgctcgcccctctttccatctctctccagctccatcgaccttcagtccttcatggctcgaggcctcaacaggtgaggggctctcccctcccccgccctcctctcctctcctgtctgttccctctcccactccactggccttcgccctactcctctcctctcctcctccatggacctcatctcctccatatgtgcccagccctgcccccatcccttctcttgctgcccccatctcccctcctctaggcctcacccccttcccggaggggccctgtcctttccctttactcacctgtcccctcccatcctccctgcctgccctcttcagggctgccaccgctagctctcagcccttccctctgggtcccacttttcaccccaaggcctgtgccagaccacagcaaggttcaattgctaggagccctgaccttaccttctgcttgtgtgcccccttcccttctgacagctctatggacatggctcgcctcccctccccaaccaaggaaaagccacccccaccaccgcctggtggtggtaaagacctgttctatgtaagccgtccacccctggcccgttcctcaccagcatactgcacgagcagctcggacatcacagagccagagcagaagatgctgagtgtcaacaagagtgtgtccatgctggacttacagggtgatgggcctggtggccgcctcaacagcagcagtgtttcgaacctggcggccgtaggggacctgctgcactcaagccaggcctcgctgacagcagccttggggctacggcctgcgcctgccggacgcctctcccaggggagtggctcatccatcacggcggctggcatgcgcctcagccagatgggtgtcaccacagacggtgtccctgcccagcaactgcgaatccccctctccttccagaaccctctcttccacatggctgctgatgggccaggtcccccaggcggccatggagggggcggtggccatggcccaccttcctcccatcaccaccaccaccaccatcaccaccaccgaggtggagagccccctggggacacctttgccccattccatggctatagcaagagtgaggacctctcttccggggtccccaagccccctgctgcctccatccttcatagccacagctacagtgatgagtttggaccctctggcactgacttcacccgtcggcagctttcactccaggacaacctgcagcacatgctgtcccctccccagatcaccattggtccccagaggccagccccctcagggcctggaggtgggagcggtgggggcagcggtgggggtggcgggggccagccgcctccattgcagaggggcaagtctcagcagttgacagtcagcgcagcccagaaaccccggccatccagcgggaatctattgcagtccccagagccaagttatggccccgcccgtccacggcaacagagcctcagcaaggagggcagcattgggggcagcgggggcagcggtggcggagggggtggggggctgaagccctccatcaccaagcaggtaggtgaaggcaggaggaaggcgggctgggtcacaacagggagggaagaaggagatggggggtggggttgaaacagagtctgtggcctgaagttacaatcttcttgcctccttttggccattaaacaaatgtgtatagagggcctgctatgtgccatgtgctatgccaggcactaaggatacggcactgaaccctcttagcactctcattccagaggggattaatccataagtagaatgggggtgactggaatagggccagctgggggcttggaggcatgaagatcagatcctgaatcagaacaacaggagaaattctctggcattcaactcacatctctggcattcagaggtgataaaggctacagcagggcaataggactgggactgtcgtctcctttggctgtgctgttgccctctaaatgtaccctgctttttcccaccttttctttctctgttcgccctcactgtgccttgtcccagcattctcagacaccatccacattgaaccccacaatgccagcctctgagcggacagtggcctgggtctccaacatgcctcacctgtcggctgacatcgagagtgcccacatcgagcgggaagagtacaagctcaaggagtactcaaaatcgatggatgagagccggctggatagggtacgatgggctctaccagctccaagccccagtgtttccttttacccacaggggagatctctagtcacttccaagggaaacctccagggtcagttatggtggtaagaaaaggcaaagacctgatcacctcttgagaagccttccgtccatctggggagaccagatacacacagttgttaaaagtcactttcaactctattttgtaggttatatatatcatagactatctggggatcatctattttaggcttacctccatgttcttccccaggaggaacataagccctggctcctgtgactgcttaggaaaggaaatgttactttactggcagtaggagctaataaattggatggggatggagggggttgcagctatattacaagtgatgtctggcctacccagtcactgtcccatgggcataagtgacagtcagtgggcagggaatgcatgtggtaaagtagtatgtatcagtcatgtgtgaaaagaccatccagaccctcacttggtggaggctgagggcaaagggcaccaagagctctggggctaacacagataacttagcagaaagttacttgaggaagctgttgttcctagggcctgaggaagagggcggctgcaggattaggtcatatataaagaacatatgatcctaacacggggaagtggtctttgagcataggaaatgttgggactgactcagatgggcttgaccagcaaatttaatgagaattaaaccctaatattagccccaaggcagccaccgtaggaagttaattcacatctctcctctgcatgtagaagggttggtgatatatgtatgtatcctcttcagagaatgaggaaatagtcttttgaatcatttttttttctgtgcttcagatgaggaaaccttgttgagaaaggctgtagactagcactatccaatataactttctgcagtgatgaaatgttctgtaatctgtagtgttcacatgtgtctagttgtgattcaggaactgaatttttagatctatttaattttaattttgtaatttttttgagacagggtcttgctctgtcacccaggctggagtgcagtggtgcaaacatggctcgaggcaacctccgcctcctgggctcaagacatcctcccacctcagccccctgagtagctaggactacagggtcgtgctaccatgcctggctagttttttttcttttcttttttttttttttttttttttgtagagacggggttttgccatgttgcccaggctggtctagaacttgtgagctcaagtgatctacctgcctcagccttccaaagtgctgggattacaggtgttgagccactgtgcctggcctaaattttaaatagctacatgtgggctggtggctaccatattagacagcacagctgtagactctagagccaatagggcagataaaatgactcttctgagctcttccagctctggaattcctagattctcagcctagaattcacttgtagacctcctatccttggcaccttgacagagccaaggagagggtcacatggaggacagcacctgcctttcccccgtcaattgccttttcttcctatgtctccagcatgtgttctggggcctggcttagggctgaagagtcaccctatttttaatttctgagcacagttactcaaggtgtgtttgtgagtgtaggtttctgtgtgggtcttcatgaggggccatacatagacctcagggtgtgggagtctgtgaccttgctccattttgagggaacctcagcaccatggcagggtcttctcaaaagcaggtgtgtggatatgatccacaggcagggaaggggttggggaaggcagctggatgtccctcaacatgcagtggctgtgcttggcagacagggatggaggctgggtggtgggcttggggtggggcgcccctcatagtgcggggtcgtgtgcccggcgggcaggtgaaggagtacgaggaggagattcactcactgaaagagcggctgcacatgtccaaccggaagctggaagagtatgagcggaggctgctgtcccaggaagaacaaaccagcaaaatcctgatgcagtatcaggcccgactggagcagagtgagaagaggctaaggcagcagcaggcagagaaggattcccagatcaagagcatcattggcaggtgaggggcggcctggggagggggttgtgagggagagcctgaggctggagagagcaagtgggtgagctactccgctgactcccatccccaaactcaggagcccaccaggagagcccaccactctcctccccaggaagccacccactcactcatcaccagatggagagaaaccccaacctgcttagtgcattaaatatctctttaccaaaccctgacctctcttctgatagagtagcttcggaagcccttggaaaatgtacctgttcctgtccaaccatcactgcatttgcatttaccctaggccagagctccccactagttattctcaacttaacctgtgatgttcactccaaacctaagcagggctccctagccagagtaggccctgcccttcctgggtggaccctccctctctagccttggaaaggtgttctgttagaaagggtcttttagcctgtgtatgttttcagctgctccagcaagtcctgggctccaaagagggtatcctcagcaaagaggtcaattatcttcagagtggtggggtcggggtgggggggaccctgggcgcactccaaccagagccacctccattttgatccattctaaatgtattttatgtaagatttaattagaagaaaagggcttcttgaaatattttttgaaaaccactgctctaattgatatcctttatgataaatcacctcgaggatcttcacagtgaggtgacatgggggatgcagaagccaggtcctcagccatggaaggtctggggaaggggcactgctgtcctgattgggacgatggaggcctggaggtgtctggatggtagaagtctttgaggcacagaaagctgccttagcagggaggtgtaagggttcctgggaggaaggtggagagcatgatcctgaggaacagggagtcttgcatcacggcaatggagggactctgattctaagggataaggatgcctgaggtttttccagagagctatggggttccatgggcaggctctgagcctgtgcccgccactaaccccactgaagcccgtcccttcaggctgatgctggtggaggaggagctgcgccgggaccaccccgccatggctgagccgctgccagaacccaagaagaggctgctcgacgctcaggtggaaattacaatgtcatttatcttctccgtgtcccatccccatccatcccactgtctttcgtgcactcactacaccagccacctagccccatcaccatctgtctctcatagtctgctgtttgtccactggctgctcctggcagccccctagtgaccccatcttcatcccatcgtctgtgcctttgtcactcctggcagcgtcagcccaactcctgtgccttcccatccagtcttcccactcctctctgcatctcaggaccttctctaccagaaccttggtctttctgcccctagaccccacctagttccaagaacccctgccccttctttgctcactcctattcaagccacgttgttcagcttcctctgcgctcttgggccagagggctagaagctgccgttttctggaatagagcacagggcagtatgatctgtagtttctccaggccctggccggtaccctgaaaacttggggacccatcacctctgttctcttggctccctaattttcctgtctccttggcagctcctgcatagcttcctcttcctgactcttcagatcttgaaggccttccatcctgtaacctccctttgccctcagtatttaagtccagcctccctctggcctccctcccactctggccctcagaccttcccagctgcctgctgcccagcctctcttctcacaagccagcttctaggacctcccttctgcacccttaccccttgctttcccaaaattctgctcattttcctacccatactcctctttgctctgactgctaggctccccccgcctgccatccccccaccaaggctcctgaccccatgaccccactctctcccactgcagctcctcatcaggtaattctcctggttccgctttggccacgggcggaggacacagggggaggtgactccggaccactgcaggttggtcgtgaagcccactccctccaacacctccggagcctctcccctctcactgctgccctccacacccagagaacctccacagactccagccctccgacacctgcacagatccatctcccaagacaccacccaaagagagcatttgctgctgcttcccagaactgtccaacaataccttagcaacaccaagagttgggccctagatgggcccagcacattcacaggtcacacccacttccctgcaaaacccaccccctcccagcctcctcctgactctaagccctcctcttcctctacctctccagtgtatgtctgtcaccccccatttcaccagagcgtccttaggggctgggggtgggtttgttaatggggtggaggcaatgatgggttggaggatcttggctataggggctgtgctgactgcagcaggtaggttgggtttccctcttccttccctaatcttggttctctaccctcctttccactcctcacctgattctctctcttcctcctccttatatctgtgaggcagaaggcatctgaagctcatattagcccccattgggtgggaattaggagtgggtagttaactcagggagacttgagataccctggaaaaaatgctattgagatgtcctgacattaggcagggtggatggaacaagaaggagcaagaaaggaacctcaggcagatgttaggacatggacttgatcatgtggcctgggagtttagaaatggggagagacatcctcctagatcagatcgtgggctcagtaggcatgttgattcccagggagaggtgccaggaacagcatggtaaagaatgtactcttcacagctcacatccccaggttgctgatgccactcactccccctctcctgccatcgagtggccttgccggacacatcaccctacctaaaaagccagtaaatgagaacctgtcagctatagccatcatttctgagatgcgattttctttgggattgagctgcagtgggcagtggctccttacactgtaattttaattctctgcctgcccagcctctctgtcaaagtagctggtgatctataaagatgctaaaaggcaccaggggactttgccatttaaaggactcctgcagtgaattcttttgtaaaatgaataatggcaccctaatttatccactttctaaatttgggtccatgggggtgtccagggcatgcttatgtgctgtcaccagcagacaaacagagggaatggaatctgggggttccttccctgctctcccgccatactcaggataccctaccataagtgatttcctctcactgacttgcagaaaatgtgtgagatacccagcaagctaagaaggcagttttgctgggtatctcatacccaaggctggggtttgggtgatctgagaggttagctccttgatcctaggatggaagggagagcttatatagaagcttttacttggaaggttttgtatcctaaggtcagacatagctatattaccaagcctaaatgccatgtggcccaggaaataatttggacatttgttctaaaccacttgtggtaggtattggtctctctgcaactcagccattaattagaaattagttttgagcctgaattttaaaaagccaagtgttgcccccagcccacacacacacacacggacatgtacagtacaaaccccagataattacaacagccaaagagagaaggaagtgaatttcccaaccagaagcgtagggaaattcagatggctttcttttctcccagcagaggaacagaaggcggagctaagggcaggaaccaggagttggtcaaggagctataggaggtgatgagagtagaaccaggggtaggagctggtctggtacccctcaccctctaattgggagcccagggagaaggactgaaaagaagatgggagtggaaaagaataaagccagtttctgcttcccagggatgcagagattggggcatgctgtgtctgcagaagctcctagtcatttccgccataattgtgagagagaggggcagccctcccacaagatttttcccttcccatatcacttccctgaatccccttcctttccccccagtacagttaaacctctctctaatttggaatgttatatttgagaagatggccactgtgaataagtgacaaacggaatgacagtgtctatttaatgaaatgcatgtcttcaaaatatatacagaactcgatgaacaaggctttttccactcctcagggagcatgcattaatgaatagataggattcaaaagtctgttttctggtatgggttaaatatcccctcctacagacatatttccaccactaatttgcttagtacaccttttcttcacagataaaggaaaatgcaagctcagtttttcttcagattatgaagaaattccaaatccacaggggtttggattaatgaggttttgctgtactgcctccccttattcctcaacatgaagttcccacctcggattggggatgggtgggagggggtttcaagaggaggagggtgggatgggcaaggaatatacacaggtgaagccagagaagggttaggttgggggtgcggtgggaacttgctgttttgatctggtttcctggtgtgacactctgggttaaaggcttgaaggcccctgttaggagtctaggggtgagattctcttctctctgatcccagaggacgttaacttctactgcaggtgagaaacaaaataggaggatggtggggactgtcctgggaggagggggtggtccatggcttgtggtgtgggctggctataggggaggccactgctaggggactggcatccaggcccccttgaagcgtctcaataagtccgcgctctcctttttggtgtcttgcaggagaggcagcttccccccttgggtccaacaaacccgcgtgtgacgctggccccaccgtggaatggcctggcccccccagccccaccacccccaccccggctgcagattacggagaacggcgagttccgaaacaccgcagaccactagcccacccagcatcagagaccttctcttcctttcctgtgcaccccaccctgtaacagcaccaaccaccaggattggacatcaccgaggaacagcgggattgcctccccgaatgcctccctgggaggcacactgattgcccacccccaccactgcaccatttccaggagggagagtggggaccctcagccgcccccttttccttcccattggggtgctgccctctctttgacccccagggacccttgccccaggacaccgcctaccccgtacagaccccttcactccggggtgctatccccatcctctgcctcatcgttcccctgagcactgggggacagaccctcacccccaccctgggggtgtggcacctccaaactttcaacttcagggtgatttttttagcagtaaccagagctgacaatctaactcccctccaccgccccattttggcctcccctgccccccttgttatggggaggggaccccggg

SEQ ID NO: 15837 - DNA, 33425 bp, Homo sapiens
atgagcaggtctcgagcctccatccatcgggggagcatccccgcgatgtcctatgcccccttcagaggtacgtggtggggggagggggagggccatatggggggcaacagggggaggggcagggggcgggggagagtcggggccgagggaagggagcggctgaaatggagggagaggggaggaccgggaaggcaggggtgggagcaaccgggaaggagggattggaggccagagggataggggtagataagggatggaggggccaggaaatgggccttgaaagggggctgaagggaaaatgatgaaggggaaagaaagcgccagaaaggggtgggaaggtagaaggattgggttggggaaaaagctgcagaaataatttgggggtgggagctgagtgatgaggaaaacatcaaggaaatagagggacagagtcttgggagaggggctaggaaggagaaatgaaaacataggggtgaaaagagaagccaagaagatgtggggggataatttggtgggggactcagagtatggtaaggggcggaaaaagagaggaggatggagggagagaaggggccagatggagagagagggaggcagtggggggtggggggatggagggtccagatggagggaagagagaagagagagggaacggtgggggaggggagaccagggcagggggagggccaaattatgtgtgcttgggggggtggcagtacaagtaagatgaaatgatgggagtaggggacaggttaggatcctgccccagactctgaccctcttaaaggctcttgaccagtaaaatgtaacctctggggtcttaatgctgtcttcacttcatcacttttacccccttcccccacccctccaatccttatttccattccccctccctcctctgctgtccatcacctatatctttccccccatatggtgtccgttccttatatgagtcccccttctgtccttcccctatatcagtcccctctctggtgttcattgcctctctcttatctcttttctatgtggtcgctcccttatatctctatcacttctttactagtccgtcttgaccccttctcatagcctccgcattaggtctgcctcctttgctctgacacatgtccagtcgagcccttcaggtgtattcccttgcccctgggcatttaccatcatttctgcctccttttctatctactcctattatttgtctcccagaccattccttgtcaccacaagtctgtgcctacccactttcccttaatacctcaactcttattatcatttctcttttcttgtctcctctacttattggggtgttggagatttggggtacaaagacacaggttttgatgattagaacaagggatccccatctcagcccttgagggatttctcatcctagtaaaaatttcccgtttctcagccatgttgctctgcctcttgcatctgcctcccagaatcattcttcaccaagtccagacagtatgtgtgtgtgtgtttctagagttgttcctaagttccctgctgccaggagaaagatgccctctgaagtctaacccgcctcccttggctgcagcctgaaccagccctttccccaaatgcttatgtgtatcaacagatttctcctctgggtataccaagtgtctaagtgcggtgggcatgttgcctgcaatgtctgtagtttcagaggctaggtattggtgatctctgtatctagagaacattagttagtctctgagatgggttgagatagagtttcaaagtatgtggtttctaaatggtggacattctgagggttcatcgctcactgtgatctggaggttgggtaaatttgagagacatatttatagacagaaaagggctgaatttgcaaaactctgctactcagtgcattctgttggaatgaagctcaaagaccagttctcctgcagtatactcatggttatcccataaaggtgacagagtttgatcttttttccatctaaaatctgataccttaagcctaatttctagctctttgctgtcgccaatgtgacatctctcttacttcaatagggcctgtgtggcattggggtttaaaggagaggcagtttgcagggagagcggcatggcaagaacaacagagctggggaaggaggaccctggtctcatctcagccataggcgacacttggtctactgttctctcttctcaaagttttgttcccatctccagctcttgtctttggaggcccctctgtgtcaccaggcctggatattccattctttccccctgacatctttcttcctcaagctcctcactgtgccttgagaaggctcctgacctatggagtggcttccatcctgtccactgagactaggtggggtgaggtggtgggggcagtgttgaatctctgggcactgaatgggagaagagataaatttggtctctacttgtccaaacaagggcatatttcccaccttctgccctggggcctccacagccagatgccgacaaaagccatcttctccttaccaccagaagaaccagaactttccctaaaggatgagcagggttgaactaggggaggagggcacagaggagggaagagttgggaggggaggccctctcatgtctctgactgtgaacaggtaagctccccgacttcttcttttctagatatttagccctcagaatctcatgatcccaatgttcctacacacacaccccatccttctttcccacagccatgtagctttcctcatactcttttatagaggggtggtgccaccttccaagtccttgtcttctgcagctatttggatgccttcctctacccagatatctgacaccaacttctctgtttttctcctgccaattttgcggcacctctaccttattttcctgaagtagatggagagctccttcatctttctctgcccccaaacgtgtaccttctctgtcatataattcccatccctgaacctctgcatttcttcccccaagtctccagagccttctgtgatgtgatcctctcctcttttcccctttgtataaatgcttgtcttgtgttcctttagagttgccaggtgtctcactttcaactgtgatctcctgaaggccggtagggtccccttctcactttgtggactctcttcttgccattttaggcctctgcttccaaatgcatagagcctcccttactgtttctgtgtgtctctgtcctccagatgtacggggaccctctatgcaccgaacccaatacgttcattccccgtatgatcgtcctggttggaaccctcggttctgcatcatctcggggaaccagctgctcatgctggatgaggatgaggtgagtgtggtgagaaggctgggaaaacgcatgtgggagaatggggagagtcctcattagtgaaggggagagagacacaaagaaggcagacaaagaagaaacatttgcaaatggcaggagggtggccattgagacttgggttggagtgtgacaagaggggtagtcattctctcatcttgggcagggagtctttgagggttatgagctgtgttggggaggagatgtggttctgaagatttcgggggtggggaggctcctgttttcacactgtccatattgtaggataggttagaatggggaaggggaactgaagggtttggagaaggggtgaagacatggaaggccctcccaaccaaagcaatcctcaggacccctctctgctttgcccactgagcaagactcccagtcctttctccatcagggggcagagtgcaagaagagaaattgcaggacgcagagaaaaggcaggggatagaggaggttttaggtagctggaggatactgggaaagaagactgaggtcagtggatcttggcatgatggggtgaagactgggagagtgattgagatcaaggtttagagagacactgagagggcttctgcaagggagtggttggacatcaggaaggaatataagggaggggaactgggagtatgtggagttatctaaaggagtacaagtggagtaggggcagggactagccagagtaaaggagatgaaacggacagaggcctcttatgggaggtggtggccaggtatggagatctgagagccagggaagtgtgggttctgatttgggagctgggtcagcaggagtgtccattggaggaaatagaggataaaaactggaatggtgccccacaagtgtgagtcagggaatgggggtgatttgggggacaagctttaaaaaatggtagggtagcctggaaaaccaaacgtggtgagagatggaccctgaaagttattgggaatggtgtgatgaggaagggttagaatttgagtcagggctaactagagtgtcaagggacctatgggggcaggtgagagtgtggagagatggctgggtagacagcttccaggccacagagtaaagtagaggtgttaaggagaggatatggtgactttgaaaggagaggtggcttggggagtctaagttttggacaccattgggagacatttgagtgactgtggtcaaacccctagatcaaggtttggagtctgtaggagaaatgggggaaactggaacccagagtggggactgttatagggatgaagagggaagacaatggattggggtaatgaaggaatgacagagatagggacagactgaagggaccagtggccagcaagttgaggggcaataggaatggccggtctggagcaggaagggcgtgtgtgtgggaggaggagtagatagaattgggaaaatgagcagcctgaacagacgcagggagttggaattggatgggtggtggaactggggctgggggatagtgaggggtctgttcctgtggctctttgtagaggtggaggagactgcaggggtggaggtgtatggaggtagggatggaggtggacagggggagctgggtgtgaagcttagggaaaggtgatggctgaggggaagaagggaactgagagatgctgggtcgggtgatggaaggagatgaaaggtgggggaaggtgaccaggccctctggcgggaggggaggttgggtcccagtctggccgcaagccgggccgtgggagggagacaagctgtggatcctgattataaatgcagcttctgctacccccgtgacaggctcggagggagagaagggggtaagggaggtgggaggttgggaggaaagcagggagaatggaggaactgaaggtcaagggaaaactggattcaggaagtagctaacttctgaggagttgcagaagagctgagtagggtttgggagaattctccggaaggtgtttcaagacaaatggagggagaaaagagggtgggacggcaaagaatgagagagagagactgggggagagaagggagagatccagtcaccaagtgtggaggggccggggcagaaaaagtgggcaggcttagggggaaaaggaggcccgcccttcctgggaggaggcggaggggggaagagggaggggaggggcggcgtgggccagggaggtctgacacacccccacctcccctagatacaccccctactgatccgggaccggaggagcgagtccagtcgcaacaaactgctgagacgcacagtctccgtgccggtggaggggcggccccacggcgagcatggtacggcggccgagcaggctctcatgacccggacaggcgcggggagagggctgaagatggaccgggctggcggggcgggggcgtcggggagcggcgggagctggccgggggcgggagaaggcggagacaaagtcttgcttcccgaggggagatggcgccctcctctggaaggtggagcgggacaggggctgtgggtgagaggcccctgtgggtcctcgctcggcttcgctccctttctcctctccagcagtgaagtttgactattttcctggtgcttgtaaaaatagtctccttagatctttagcttccagtccgtgtgttcctgcccctgcccctcccagcccctggtctgggatcttggaaagaatgacctagttcctgccctccccccagacctcttccccacccctatgctcctgattcttcttccggaccttcagtccttgaggtctccttttattaccccctgttttctcctctcatcagctgcttctattttctgcaattgtatcaccctttctctttcctccctgatttctcttattttctgtacccctcttgattaccccgtccctcccctctgctcccggcgaaagtccatcagactcccatctcatctcctttctgtctgtagagctatctgcgcggtctgtctctccaactctctccctctctccatctgtctcttcccctccctccccctttctgcccccccaaccccctctttagtcatttaaaaaaagatttttgtcttcctgagaagttcgcttaaaaggtttccatgggaacagtgaggggagatgaaggcagagaacagagatctgcagccaaggtgcagagagacgccctcagcccccggaaaccccctcgtcactgcccccttccacttcatttcccttcccggacctagcgatccaggttccccattcctccaacccccaggtgacccctttttcccaccagctccccctcccttcaggaattcaagctaccagtttctctcccttagagagccagtgacctgtccccatcctttggctccttccagccttctgataggtccaggccctactagccttgtgggccggtttggggaccttgggtgggtgggtgggtggtcagggatgtgtgtcattgtcatggaaaccccataccatcggggtgtgtgggtagcacatctctgtgaggcaaagtcaggtggtggtggagtgtatacagagaatgtgtgtgatgtctgtcacatctgtgtgtatatgtatatgtgtgtatgtcatgttcatgtctggggaagatgtgtgtgtttgtgtgcatgtgtgtacacctgcgtttccaggccagaatggtcacatgctcacagagcatgtttatcatgtgtcctgtggttggcagatctgcccacttattccccatctttctccttatcctgagtcctcagggtctaggggtctctggcgggggtctcccgtgtgttttgggtggggacaccgtgtgtgtttggagttgaggtggcatgtggaggttgctgtattggggttcagtaggggctgggaggggttccaggggcatatgtatttggggggagggcttagtgaaagttgatgggggtgaacgtttagggtcttcaggcagacatggaatgtgtaaagggcatggaggatgtgcagtggacataggggtcgttgggaccttggggacttggcaatgccaaggtgtttgctgaggctgtggactctccagcccgggagaggtcgccggacctttgaggggcattggaatcctgggctcctcctctgctgggtggagccgcgaaccctcgttctctccgcggttttgtgtgtgtgggggggtcctgctcaggaggggatggtgggtggcctggtttgttttgggggtccccttgcccccctcccccgtctctctcgcgctgtctccgggcgacagggctcgtgacagaggcggccacggcagcagcggtcgcctagcaacggcggcggggcccgggcaacggcggcagcggcgggagcggcggcggagggagccgttcccgcggccgtcaccgcgcggccgtcccggccgtcccgggccccgccgccgcccccaccgcgccgggcggcgcgagccgggccgtaccgccccctctccctccgcaccccgcccttcccccgcgcaggggcggggcccctcccccaccggggacacccctggcccccccggggggcggtgcgaggtaagggcggggccgggcggactaggagcgcgcgtagaggggggggcgccgcgcgcgtggggcgggggcgcgcgtgtgcgtgggcgcggggaggggggtggggaagccgcggtggcggcggcggcggcggcagctgctccctccgcatgttctcgctgcatcttccgagtggggggagttatggtaaccggagggggacagcggaggacgggagggtcggggaccggcctcgtgcggacagggtcttgagcacgcgggggcggccggtgtgtgtgggatcttggagcccctggtggaaggggcagcccgtgtgtccgcgtgtgtgttcgtgcccatgctcgtgtctcctgtgtgtcggtgccatgtgcacacgggggcccagttcctcgtgcacacatgtgcagccatccttgtgcaagtgtgtcctgtcttatcttgcctctgcctgtttcctgcctagggggctgttgggccagccacgggcttgtggggcagtccgcggccttgctggtccatgtcacctctgaccctgagcatgcatatccctggctggggctcacctcctgtcaggcttctgtgtgtgggaatgtgtggccctatgagcaggattttctgtgtccctggtggcaggtgtgtgtctttgcatgtgtgttccagcactggcctgagtatctgtgtcaatcccagcatgggtgtccagggcgtgtctggatgtgggtggtgtggctggggggagtaagtgtgtgaatgtgttccttggaattctactgtgtatgaaacacctttgggctgggcaggtgtaagccctgcttggtcagtaagtggggacagaaaagcttaaaaagggaagaaatggggtaaagaggaaaagtggggaggggataggagagaaggaatgagagaggcttgaagaagagagcagagagcagcaggccagggagaaagaatagctggagaatgggaatgtgggagaaagccaagccagacttagaagagagaacaggggataagagcttaagatggggaactggatagagatggtgggagaagaaggggtctgggagctggggaggcagtggggaggagagagtcaggccttctggtaaagtgatctctgaaagaagaaagggaagaagatgggagaaggcactggattcttgtaggccttgcaggatcaggcttggttttggatcagggaaggccactcaggcatacgggctggctcacagtgaggcctgtcatagcagggactgtcattagaggttcatatccccagcacagagctctgtctcccatttctctgctctgtgtccaaccctgttcttcgcccttctctggcaacctccctcctctggctccccttgagagctgccagctgggtgtggagaggaagaaaggccaaagggaaggttagggatttggagggcagggggagattctgtgggtgatggcaagattagagatgttggaggggcaggagtccaagcccttgctgtgtgtgtgtgagtgccattgtgtgtgtacacagggtgtgtacatgtgtgggtgtgtgcacaatgcctgtgttacgggtttgtgtaggtggctgttatgtgtgtgcatgcgtgtatacatcgtgcaggcatgggacatggagacccaggatcacagtttgtgcttttcaggtttgctgtgtgtgtgtgtacacgggtgtgtgttgttttctctgtacatgtcactgcatgcagcattaataacaggatgttctgtgtttctgtcactctgccccccctttcctctgtgtttctgctattcttttcctgcggcaacaaaagtgtttaataagcatatgtgtatgtggcctctgtgtacctgtgacttatgagtgagttcatggatcttagttcttggtaatatgtgtaaggttatattacttccaagaaccaagcaagccaattagcaaatttgttcttctgttaatgctttagttccaaagcggaattttaatgcatttaaagttagactttatgcctttattagatgagcttgcacatgaaaataatggctgagctcggttccctgaaatgagagtgaggcagccatacctgagaaatgcagaaaaaatgttactagggaagagatatcctgaaccattggatgcattgcttagtgtgtaccagaaggataattaacacatttgctcctggtttttctttactctggtggcaatctcggatgcctgtgttagagtgagagaagggctgggggaggaaagggggttgtcctgagacagagtggatgtggttgtacttttcacgtgaatgaaaggatgtttgtgcttctgagatatggggatacctttctgtggtcaggatcatggtgtactcaagcatgtatttcaggggttaaactggaattcccctgcatggggatatgtgtgtcttagggttataggtccatttctgtagtgtgctgtccacatgattgcccaagagacttgggccacaaagtccacaccagcagctctcatgtgggtcactgggttcaagtatgtactcccttgttgcagagctcacatatgtcaaagcatgtatcctgtggggtgtgtgggcctcagggtctcagaatgtggatccgtgctatgcccgtgctcacagttgtctgtatgtctcaaaagcacatagatccccagttatttttctgtattgtggttctcatatacacgtacctccatagctcagtatatgtttctgtactatacacctgttcctgagggagtgatagggttctcgtgtcatggggtccacatttttgtatgcaaacctcctaacacctgggttttacaggtaaagggaagctgaggactgattctagggcagtttgcaggcaatttgcaattctggaagcagacagtgaaaatataattgtggtcctcccttgttctgttctggaacctagagggttaacaggcagctcttccggtccacccccctccttccagcctgtagcttcttgttgccgtggagatggtggccccgccccgatgcagcacctgcccccccattggctgcagtggtgactgtggggctgaggggggagcccaggcctgggcagccattctggagctggagccggagcttggcatccccccacttacattctcttccagcccctcggcccctctaaattcccttgcagccgagcctcagcttcctttttcagcgcttgccatccctctaggctcttggcagactgagctgcatccgcattcacctcccctcctcctcctttccctatccttacttgggagtcccgagaacccccactgtccatccttcctgctccctgcccattcccctgcattctttgcttttcccctccccccaccaaccttctgagcccctgccactgcagtgcacgtggaaccggctccttctcccttccccccacctgccccttccttggattttctgtccccagcttctccccctgctactcttcacaggtctcttccaagacctccccctccagtccagggagggggtcatgggaggcagccctggccctccagacagacaggggttccaggaggtggggggcaggtggaagatgtgcccaccagggggaagaggaaagcctgcctatgggcaatgacctttaacccatctttccccccagctagccccttctggggtgggtgggcaccagggacctagcctccctggatctttggtgtccttcattactggggttttactgaccctctcagccatgctcccctgctgactgccagccccagtcatgggcctaaggcctcccaccccatccccctcagggggctcctgctcaggttccttgccccctccttcccgctgccagcctctccgccgtcgctgctcttcctgctgctttccggggggtaggtgaggccggagctgaggggcagagggaggtgggggcatgcactggggtcaggggtgggaacctgggttaacagcttcccttctggccccctccccaacttcccttctggccatttcctcccctccagaataccacttgggtcgctcgaggaggaagagtgtcccaggggggaagcagtacagcatggagggtgcccctgctgcgcccttccggccctcggtgagtggtgcctaccagatgtggctcagttgggccccctcccctccagccccaactggggccctaggagtctgagaaagagggcaggagggggagagagggagtgagagtgagaaaaagagtgtgtgtctgtgtgtgtctccccacctctttggtttcccccttcttggctctgcccccctgcttctgagaccagccctcccaccttctccaagctgtgtgtgtgtgtatatgtgtgtgtgtgtgtgcttgcactgtacccgtgggagcaaggaagacaaactggtattagggttcctatccccctttcctcgcctctggagacttcccttttccccatcccactttcatccaggggctctctaccagctgagggatgagtaggtagaactgaccctgccccaacccaccccatccccatttcccccccagcaaggcttcctgagccgacggctaaaaagctccatcaaacgaacgaagtcacaacccaaacttgaccggaccagcagctttcgccagatcctgcctcgcttccgaagtgctgaccatgaccggtacaggggctggagcatgtgggatgagattgatgtaatgtagggtctcctgtgtgagatgcagagggagggggttatctgtgtgcaaaggttgaaggattcaactcaagttggttgggggatgtcatggcacaggggacagaacagaaaagaactagaatagggatctgtgagcagcaggagaggggtagggtggcagagagaagacagacagacaggctggaaagggaatgaaggtgaagccaaggagggactcctcagggactcctcaggccaagaaggatgggctctagcccaggatcaaaggagctgtacaggaggagagtgaccctggaggaatgtttaaggaatgcagggaaggggttggtaggtgagtgagcaataggctgtaggtggaagggtgtcagggaaggtcaggaaatacaggggcagcaggttggagtggggctgggggtggctgaatgaatggatgatggctagggctcaaggacctcatcagtgagggaagagacagtatagagcatggcagagaaggggaggctgggacaggtgtgcagggtgacagaatgggaagcaacccatggactgaggcatgaagaagcagccagcggagaagtccagaaggcactgtccctgagaccaggctgaaggagacctccactgtttgcctttgttgcctgccatttggggttcctctctgggtttccccctcacccagtcactccccagggagaaccatgccctccctttcccccatgtctggccacccccaggattgggcaggtagggaggttgggataaagtgagtcacacctttccctgcccccctcccatgttgccagagctggatttggggccggcagggggtgagggcatggtattcctggccgcgggggcgggggggggggtccgggggccgggggagcgtcgcgctgacggcagccagagcctgcgatgacggggctgctataaataacttcttggaggctcccacacccaagctcccctcccgctttcccactgctctctactcttcatcccctgcccatctccataccgcttttgtattgctatcctacccctcattattccatgcccctagccccctttatcttctgccctcctgcagtgatttttttgcattccatcccctcttagccctcacctcggttctcccggccatctctccagttggccttcctcctcttctcctgtcctctgtcttgctgcacatacctttgtctccccctttcttcttcttgccctacctcctcttcttccctagtccgtgtattctgtcttttatcctctttgagctcttttctgcccacagctttctcctatttcttatgcttttccctcactctttcccctgcttctgctaaaacttgtcctcttatgctgtgttcattcattctttgaatcattaaatgtttatcaggcactagccgtgtgccaggcccaggctagacatatctcttctctgtgccttcacttctttacttccactttttcctttatactgaggctctggtttctggggttacctggaggtactacctagaagtgccccaggcccactttgttctctccttttttttttttcttttctgccatggtccatttctgggttgagatatttctagatgtccccagtcctcgcaatcccttaggtgtgagatggtgggagtttcttttttttcctttttttttttttaaatagaaatagggtctcactgtgttgcccagactggtcttgaactcctgggctcaagtgaccctcccacctcggcctttgaaatgttgggattacaggtgtgagccaccaggcccaggtggagcaggggagttccttaaaggattctgatttttctcacatccctcacgtccttcctgataggcagggtttctttctgtgtctgtttgggaagggtgttcagggggccttctctccaagtctccatcctggaacagactgatgatgcagggtacctatgtgtctaagaagagtaggggggccgggcgcggtggctcatgcctgtaatcccagcactttgggaggctgaatcacttgaggtcaggagtttgagaccagcctgaccaacagggtgaaaccccgtctcagctaaaaatacaaaaaaaaaaaagaaaaaaaaattagctgggtgtgctgaggcaggagagacgcttgagcccaggaggcagaagttgcagcaagccgagatcacaccactgtactccagcctgggcgacagagcaagactgtctcaaaaaaaaaaaaaaaaaaaaaaaaggaagagtgggaagccctgatcccttcctctcctgaacctcctgcctgccagggcccggctgatgcaaagctttaaggagtcacactctcatgagtccttgctgagtcctagcagtgcagctgaggcattggagctcaacttggatgaagattccattatcaagccagtgcacagctccatcctgggccaggagttctgttttgaggtactgggtctggtgggctggggagggccaaaggacaggggtgatggaaggtggggggcagagaggtctagagaaagtggcacaggtggggacatcaaggaaacagaaacttctgggactggaggaaagggtaggccagggaggaagagaaggtagcagagtctcctcccctctgtagccctttccctcaactccacactcctttctaggtaacaacttcatcaggaacaaaatgctttgcctgtcggtctgcggccgaaagagacaaatggattgagaatctgcagcgggcagtaaagcccaacaaggtattggggaataaaggggacacaacctgtgcagggcaaaggttgcaccaacacgggaagctgggggcctagggaggaaagtgagttaaaggaggagaggcttggggaaggagaggattgaggtacagtgtatctggacaagcagggggagacccccattattctgagtcccccatttcttttcgctttctgtactgctaccctgccttacgatctctttccctgccatagaagtcatagacttacagagttgatggggctctggaaattctttagtctagcttccctgcaggcaggaatgcttcactaataccccgcaggacacatcaaatacacttagccaagtttctgtaccttggtttcctctctaagacagagggaactggtggcaatgggttggattaaatgatctctaaggtccctttggcacataaattctatgagtctgttcttcccaaaacttcatgcttccagttctgtcagctattctctgtatcccagtttctagcaagcttacagtcctagtcacactcctctggggggaactcttgtgtcttgatgtccttaaagaactcaacccaagatgctgacatgatctgacctatgcagagtacaaacaccatgttccctttcaacacactgcaatatcacctgagccttaccattagcttgtgctcaattgtatccccccaggcccttactgattcttttttttttttttttgagacagagtctcactctgtcacccaggctggagtgcagtggcgtgatcttggctcactgcaacctccgcctcctgggtttaagcaattcctgtgcctcagcctccccagtagctgggattacaggcatgcaccaccacacccgactaatttttgtatttttagtagagacgaggtttcaccatgttggccaggctagtctcaaactcctgacctcaggttgtctgcctgcctcagcctcccaaagtgctaggattacaggcatgagccaccacatctggccaagctttacccattctatatgcaattcttttttcacaatttctgatagtctctgcaggactttccagttcccttcaaattctacattaatatttttggcttgttattccagcttttgaaatctttccaatactgtttgtgttgtctagtgtatgtctacgcttctacagtagcttcctggggctgctataacaaactgctacaaactgggtcacgtaaaacaacagaaatttattctctcacagttcaggaggctggaagtccaaaagcaaggtatcagcagggccacgctctctttgatgctgtagcagggaatccttccttgcctcttcctagcttccggaggttgccagcagtccttggcattcctgggcttataactgcatccgtctaatttctgcctccatcttcatgtagctggcttccttctgtgtgtctctgtatcctgtatctctgtgtctccaaatctccctctccatataaagacaccagtttttataaggtgggttaagggtccactctaattcagtatggcctcttttttttgagatggaatatcgctcttgtttcccaggcttggagtgcaatggcatgagctcagctcactgcaacctccgccttccaggttcaagtgattctcctgcctcagcctcctgagtagctgggattacaggcacgtgccactatgcccagctaatttgtttttgtatttttattagagacggggtttcactatgttggccaggctggctcgaactcctgacctcaggcaatccacccacctcggcctcccaaagtgctgggattacaggaatgagataccatggctggcctcttcttagtttgattacatttgcagggatcctgtttccaaataagatcacattcacaggttcagggtagacatgagttttggtgggatactattcaacccagtacaccgtctcaccttatgattgctgtctgtatcccactttcttactgtctctcctcttttggtgtctctctgtcccttccccctttaacatcatgcccaccccaccatgccaggacaacagccgccgggtagacaatgtgctaaagctgtggatcatagaggcccgggagctgccccccaagaagcggtactactgtgagctctgcctggatgacatgctgtatgcacgcaccacctccaagccccgctctgcctctggggacaccgtcttctggggcgagcacttcgagtttaacaacctgccggctgtccgtgccctgcggctgcatctgtaccgtgactcagacaaaaagcgcaagaaggacaaggcaggctatgtcggcctggtgactgtgccagtggccaccctggctgggcgccacttcacagagcagtggtaccctgtaaccctgccaacaggcagtgggggatctgggggcatgggttcgggagggggagggggctcggggggtggctcagggggcaagggcaaaggaggttgcccggctgtgcggctgaaagcacgttaccagacaatgagcatcttgcccatggagctatataaagagtttgcagagtatgtcaccaaccattatcggatgctgtgtgcagtcttggagcccgccctgaatgtcaaaggcaaggaggaggttgccagtgcactagttcacatcctgcagagtacaggcaaggccaaggtgagtgttgtgccctcagggaaaggtgacttgggaatgggcacttgcttgggggttagtgaggacagggcaaattcacgagattgggttgtgcagaggctgacacttggattttcctgggcctcaggacttcctttcagacatggccatgtctgaggtagaccggttcatggaacgggagcacctcatattccgcgagaacacgcttgccactaaagccatagaagagtatatgagactgattggtcagaaatacctcaaggatgccattggtatggcccacactcaggccctcttcttcccaaacctgccagatgtccaccccagaccccaagtccacccttccacagcttgatacttcctaacccagagtcctaggactccagcctccaacacctgattctgaaatttccccaaccctggccacccccttccctgcccttggaaagtgtgaccacaccctcttgtgcccccaccccccaggagaattcatccgtgctctgtatgaatctgaggaaaactgcgaggtagaccctatcaagtgcacagcatccagtttggcagagcaccaggccaacctgcgaatgtgctgtgagttggccctgtgcaaggtggtcaactcccactggtgagactgggaacgctgggctggggggccagggtcgggggaattatgtgttcatctgttcatctatctgtccatcctcaaagaggactgagcaccatttatgggcaaagcattgttctaggcgctatagagcaaacaggtgaaagaggcctggtccctgccctcagagggcctccaccagaatggggacaaattagaagaaaaaaaaaaaaagccacagagccataatggtgtgtaagtgctgagtaagggtccccccaacctctgtgtgacataaggtcagagagaaggcagagctttgagataagtggggaagaggtgcccccttgggtaggctttgaagactggtttaggttctgatatatggacatagttggcaagaaagacatttcagaagaaggctgtgagaaaggcacatgtgtgatggtgaaaaggcccaggagttttcaggggacattaaagtaggttagtagcaattacatcaggtttagtggagcatgtgcctcataatggggagtggcgggagagatgtctgggcaggaagattagctttagaaactggaaggcctcaaggagtctgaggtcattggtaggccttgggatgccattaaaggtgtcagaaatattgtgatttagaagattaatccataggctgggcacggtggctcacacctgtaataccagcactttgggaggctgaggcgggcagaccacctgaggtcaggagtttgagaccaggctgaccaacatggagaaaccctgtctctactaaaaatacaaaattagccagatgtggtggcacatgcctgtaatcccagctattcgggaggctaaggcaggagaatcacttgaatctgggaggtggaggttgtagtgagccgagatcacacgattgcactctagcctgggcaacaagagtgaaactccatctcaaaaaaaaaaaattaatccataagtagagtgtatgtagtagagtagagggatgtatgttgggggatgactggaatagagccagctgggggctcggaggcatgaaagtcagatcctgaatcagaacagtgacagaagttaggaaggagctactggaaggaccctctcgggaaaggatcagtaggaattgtcagcttattggaaaggagggagcatgtctgtggggagtcacggatgactcaagaggccatgaggctggtggttgggagaccggtggcctcattgacaaccaggaaagtcaggaggaggagccagttggaggtgtgggggcgatggtgagctctgctttacaccagccgagtttaaggtgtcagtgggacattgaagtggaactgggaggtgcggggagtgagctctgagccattccagggactggggatcatgcctggggcacctccatccccatttccctggaatccagaagagttggggggtccgagctccctgtacctcaagtgaccctccatctctctcccatctctgtctctccctggtgtctgtttttcttctcctcctctccttgtctctctcccacacccctccatctctctcccacgtgtctctcccctcaccttctctccccctccatttctctctccctaatctgtctgttccctctgccatggcccccttcttcaagcagcctcccatcttgctcctgcggtccctccttccctgtctctctcacccctgtttccacaccctcacctcctaccacccccctcagcatgttccctggaagctgagggtctctggggctcagtcccggtctctctctttctctctctctctctctgtctccccgacccttccccccagcgtgttcccgagggagctgaaggaggtgtttgcttcgtggcggctgcgctgcgcagagcgaggccgggaggacatcgcagacaggcttatcagcgcctcactcttcctgcgcttcctctgcccagcgattatgtcgcccagtctctttgggcttatgcaggagtacccagatgagcagacctcacgaaccctcaccctcattgccaaggtcatccagaacctggccaacttttccaagtgagggaagcttcaggagtgggcagggcagggagtggcagggcagggagtggcagggctgggggtcggcaagaagggtctcctgagtccccagagatcctgagatggggaggctatgataccttgtgtgtgtgtgtatgtgtgtgtatgtgtgtgtgtgtgtgtgtgtgtgtgtatgtgacctttatcttctgcattcttggctaggtttacctcaaaggaggactttctgggcttcatgaatgagtttctggagctggaatggggttccatgcagcagtttttgtatgagatctccaatctggacacgctaaccaacagcagtagctttgagggttacatcgacttgggccgagagctctccacactgcatgccctactctgggaggtgctgccccagctcagcaaggtcagcagatcccctctttgccctatccccagatggctccagaggttcctggagcctgagaaactaccctttgaagattttttttctccccttgtttctcgaggtgtcaccactactatcccaactcaggccccctccacctgcaccctcagaggccctcttagagctgggcactgagcccccaggtaacagcctcacccttccaggaagccctcctgaagctgggtccactgccccggctcctcaacgacatcagcacagctctgaggaaccccaacatccaaaggcagccaagccgccagagtgagcggccccggcctcagcctgtggtactgcgggggccatcggctgagatgcagggctacatgatgcgggacctcaacaggtgagcaccctgggacagccaggcctgtgccctaggagcccttctcctattctagatactcctcactgggccccacatgcatctctctagggcttgaaagaagggaggaaaaagcaccaagttctcaggggagacgataaggagacaggtacagtcagtggtaggctgagagccctttacagcctgagggagtgagagatttggagctctaggaatagggctgaggctccaccaactcacggcttagttgtaagcctagagcatccctgctgcaagctctgatttgctgtccctctgcctgcccatgctagtccccaggctgaggttcagccagcatgtcatgtcagccatgtgtcaaaatgttcaaacatctcagtaatagctagtgaataagcacttcccccagcccccgaccacaaccccacagacctccccatgatccagcacttagagcagtgacagcagaagcctagcagggcctgcagcctgctccagagtcccagcctccattctgataggtggtgcccgtgcttcatttgctgctcattattttgatgatggccctgctttttcctctgcccgtgtcttcctccatgacaccatacccatcccaccattcccgcctctcctttcatttgtccacatctctctccttctctgtctgtgctcgcccctctttccatctctctccagctccatcgaccttcagtccttcatggctcgaggcctcaacaggtgaggggctctcccctcccccgccctcctctcctctcctgtctgttccctctcccactccactggccttcgccctactcctctcctctcctcctccatggacctcatctcctccatatgtgcccagccctgcccccatcccttctcttgctgcccccatctcccctcctctaggcctcacccccttcccggaggggccctgtcctttccctttactcacctgtcccctcccatcctccctgcctgccctcttcagggctgccaccgctagctctcagcccttccctctgggtcccacttttcaccccaaggcctgtgccagaccacagcaaggttcaattgctaggagccctgaccttaccttctgcttgtgtgcccccttcccttctgacagctctatggacatggctcgcctcccctccccaaccaaggaaaagccacccccaccaccgcctggtggtggtaaagacctgttctatgtaagccgtccacccctggcccgttcctcaccagcatactgcacgagcagctcggacatcacagagccagagcagaagatgctgagtgtcaacaagagtgtgtccatgctggacttacagggtgatgggcctggtggccgcctcaacagcagcagtgtttcgaacctggcggccgtaggggacctgctgcactcaagccaggcctcgctgacagcagccttggggctacggcctgcgcctgccggacgcctctcccaggggagtggctcatccatcacggcggctggcatgcgcctcagccagatgggtgtcaccacagacggtgtccctgcccagcaactgcgaatccccctctccttccagaaccctctcttccacatggctgctgatgggccaggtcccccaggcggccatggagggggcggtggccatggcccaccttcctcccatcaccaccaccaccaccatcaccaccaccgaggtggagagccccctggggacacctttgccccattccatggctatagcaagagtgaggacctctcttccggggtccccaagccccctgctgcctccatccttcatagccacagctacagtgatgagtttggaccctctggcactgacttcacccgtcggcagctttcactccaggacaacctgcagcacatgctgtcccctccccagatcaccattggtccccagaggccagccccctcagggcctggaggtgggagcggtgggggcagcggtgggggtggcgggggccagccgcctccattgcagaggggcaagtctcagcagttgacagtcagcgcagcccagaaaccccggccatccagcgggaatctattgcagtccccagagccaagttatggccccgcccgtccacggcaacagagcctcagcaaggagggcagcattgggggcagcgggggcagcggtggcggagggggtggggggctgaagccctccatcaccaagcaggtaggtgaaggcaggaggaaggcgggctgggtcacaacagggagggaagaaggagatggggggtggggttgaaacagagtctgtggcctgaagttacaatcttcttgcctccttttggccattaaacaaatgtgtatagagggcctgctatgtgccatgtgctatgccaggcactaaggatacggcactgaaccctcttagcactctcattccagaggggattaatccataagtagaatgggggtgactggaatagggccagctgggggcttggaggcatgaagatcagatcctgaatcagaacaacaggagaaattctctggcattcaactcacatctctggcattcagaggtgataaaggctacagcagggcaataggactgggactgtcgtctcctttggctgtgctgttgccctctaaatgtaccctgctttttcccaccttttctttctctgttcgccctcactgtgccttgtcccagcattctcagacaccatccacattgaaccccacaatgccagcctctgagcggacagtggcctgggtctccaacatgcctcacctgtcggctgacatcgagagtgcccacatcgagcgggaagagtacaagctcaaggagtactcaaaatcgatggatgagagccggctggatagggtacgatgggctctaccagctccaagccccagtgtttccttttacccacaggggagatctctagtcacttccaagggaaacctccagggtcagttatggtggtaagaaaaggcaaagacctgatcacctcttgagaagccttccgtccatctggggagaccagatacacacagttgttaaaagtcactttcaactctattttgtaggttatatatatcatagactatctggggatcatctattttaggcttacctccatgttcttccccaggaggaacataagccctggctcctgtgactgcttaggaaaggaaatgttactttactggcagtaggagctaataaattggatggggatggagggggttgcagctatattacaagtgatgtctggcctacccagtcactgtcccatgggcataagtgacagtcagtgggcagggaatgcatgtggtaaagtagtatgtatcagtcatgtgtgaaaagaccatccagaccctcacttggtggaggctgagggcaaagggcaccaagagctctggggctaacacagataacttagcagaaagttacttgaggaagctgttgttcctagggcctgaggaagagggcggctgcaggattaggtcatatataaagaacatatgatcctaacacggggaagtggtctttgagcataggaaatgttgggactgactcagatgggcttgaccagcaaatttaatgagaattaaaccctaatattagccccaaggcagccaccgtaggaagttaattcacatctctcctctgcatgtagaagggttggtgatatatgtatgtatcctcttcagagaatgaggaaatagtcttttgaatcatttttttttctgtgcttcagatgaggaaaccttgttgagaaaggctgtagactagcactatccaatataactttctgcagtgatgaaatgttctgtaatctgtagtgttcacatgtgtctagttgtgattcaggaactgaatttttagatctatttaattttaattttgtaatttttttgagacagggtcttgctctgtcacccaggctggagtgcagtggtgcaaacatggctcgaggcaacctccgcctcctgggctcaagacatcctcccacctcagccccctgagtagctaggactacagggtcgtgctaccatgcctggctagttttttttcttttcttttttttttttttttttttttgtagagacggggttttgccatgttgcccaggctggtctagaacttgtgagctcaagtgatctacctgcctcagccttccaaagtgctgggattacaggtgttgagccactgtgcctggcctaaattttaaatagctacatgtgggctggtggctaccatattagacagcacagctgtagactctagagccaatagggcagataaaatgactcttctgagctcttccagctctggaattcctagattctcagcctagaattcacttgtagacctcctatccttggcaccttgacagagccaaggagagggtcacatggaggacagcacctgcctttcccccgtcaattgccttttcttcctatgtctccagcatgtgttctggggcctggcttagggctgaagagtcaccctatttttaatttctgagcacagttactcaaggtgtgtttgtgagtgtaggtttctgtgtgggtcttcatgaggggccatacatagacctcagggtgtgggagtctgtgaccttgctccattttgagggaacctcagcaccatggcagggtcttctcaaaagcaggtgtgtggatatgatccacaggcagggaaggggttggggaaggcagctggatgtccctcaacatgcagtggctgtgcttggcagacagggatggaggctgggtggtgggcttggggtggggcgcccctcatagtgcggggtcgtgtgcccggcgggcaggtgaaggagtacgaggaggagattcactcactgaaagagcggctgcacatgtccaaccggaagctggaagagtatgagcggaggctgctgtcccaggaagaacaaaccagcaaaatcctgatgcagtatcaggcccgactggagcagagtgagaagaggctaaggcagcagcaggcagagaaggattcccagatcaagagcatcattggcaggtgaggggcggcctggggagggggttgtgagggagagcctgaggctggagagagcaagtgggtgagctactccgctgactcccatccccaaactcaggagcccaccaggagagcccaccactctcctccccaggaagccacccactcactcatcaccagatggagagaaaccccaacctgcttagtgcattaaatatctctttaccaaaccctgacctctcttctgatagagtagcttcggaagcccttggaaaatgtacctgttcctgtccaaccatcactgcatttgcatttaccctaggccagagctccccactagttattctcaacttaacctgtgatgttcactccaaacctaagcagggctccctagccagagtaggccctgcccttcctgggtggaccctccctctctagccttggaaaggtgttctgttagaaagggtcttttagcctgtgtatgttttcagctgctccagcaagtcctgggctccaaagagggtatcctcagcaaagaggtcaattatcttcagagtggtggggtcggggtgggggggaccctgggcgcactccaaccagagccacctccattttgatccattctaaatgtattttatgtaagatttaattagaagaaaagggcttcttgaaatattttttgaaaaccactgctctaattgatatcctttatgataaatcacctcgaggatcttcacagtgaggtgacatgggggatgcagaagccaggtcctcagccatggaaggtctggggaaggggcactgctgtcctgattgggacgatggaggcctggaggtgtctggatggtagaagtctttgaggcacagaaagctgccttagcagggaggtgtaagggttcctgggaggaaggtggagagcatgatcctgaggaacagggagtcttgcatcacggcaatggagggactctgattctaagggataaggatgcctgaggtttttccagagagctatggggttccatgggcaggctctgagcctgtgcccgccactaaccccactgaagcccgtcccttcaggctgatgctggtggaggaggagctgcgccgggaccaccccgccatggctgagccgctgccagaacccaagaagaggctgctcgacgctcaggtggaaattacaatgtcatttatcttctccgtgtcccatccccatccatcccactgtctttcgtgcactcactacaccagccacctagccccatcaccatctgtctctcatagtctgctgtttgtccactggctgctcctggcagccccctagtgaccccatcttcatcccatcgtctgtgcctttgtcactcctggcagcgtcagcccaactcctgtgccttcccatccagtcttcccactcctctctgcatctcaggaccttctctaccagaaccttggtctttctgcccctagaccccacctagttccaagaacccctgccccttctttgctcactcctattcaagccacgttgttcagcttcctctgcgctcttgggccagagggctagaagctgccgttttctggaatagagcacagggcagtatgatctgtagtttctccaggccctggccggtaccctgaaaacttggggacccatcacctctgttctcttggctccctaattttcctgtctccttggcagctcctgcatagcttcctcttcctgactcttcagatcttgaaggccttccatcctgtaacctccctttgccctcagtatttaagtccagcctccctctggcctccctcccactctggccctcagaccttcccagctgcctgctgcccagcctctcttctcacaagccagcttctaggacctcccttctgcacccttaccccttgctttcccaaaattctgctcattttcctacccatactcctctttgctctgactgctaggctccccccgcctgccatccccccaccaaggctcctgaccccatgaccccactctctcccactgcagctcctcatcaggtaattctcctggttccgctttggccacgggcggaggacacagggggaggtgactccggaccactgcaggttggtcgtgaagcccactccctccaacacctccggagcctctcccctctcactgctgccctccacacccagagaacctccacagactccagccctccgacacctgcacagatccatctcccaagacaccacccaaagagagcatttgctgctgcttcccagaactgtccaacaataccttagcaacaccaagagttgggccctagatgggcccagcacattcacaggtcacacccacttccctgcaaaacccaccccctcccagcctcctcctgactctaagccctcctcttcctctacctctccagtgtatgtctgtcaccccccatttcaccagagcgtccttaggggctgggggtgggtttgttaatggggtggaggcaatgatgggttggaggatcttggctataggggctgtgctgactgcagcaggtaggttgggtttccctcttccttccctaatcttggttctctaccctcctttccactcctcacctgattctctctcttcctcctccttatatctgtgaggcagaaggcatctgaagctcatattagcccccattgggtgggaattaggagtgggtagttaactcagggagacttgagataccctggaaaaaatgctattgagatgtcctgacattaggcagggtggatggaacaagaaggagcaagaaaggaacctcaggcagatgttaggacatggacttgatcatgtggcctgggagtttagaaatggggagagacatcctcctagatcagatcgtgggctcagtaggcatgttgattcccagggagaggtgccaggaacagcatggtaaagaatgtactcttcacagctcacatccccaggttgctgatgccactcactccccctctcctgccatcgagtggccttgccggacacatcaccctacctaaaaagccagtaaatgagaacctgtcagctatagccatcatttctgagatgcgattttctttgggattgagctgcagtgggcagtggctccttacactgtaattttaattctctgcctgcccagcctctctgtcaaagtagctggtgatctataaagatgctaaaaggcaccaggggactttgccatttaaaggactcctgcagtgaattcttttgtaaaatgaataatggcaccctaatttatccactttctaaatttgggtccatgggggtgtccagggcatgcttatgtgctgtcaccagcagacaaacagagggaatggaatctgggggttccttccctgctctcccgccatactcaggataccctaccataagtgatttcctctcactgacttgcagaaaatgtgtgagatacccagcaagctaagaaggcagttttgctgggtatctcatacccaaggctggggtttgggtgatctgagaggttagctccttgatcctaggatggaagggagagcttatatagaagcttttacttggaaggttttgtatcctaaggtcagacatagctatattaccaagcctaaatgccatgtggcccaggaaataatttggacatttgttctaaaccacttgtggtaggtattggtctctctgcaactcagccattaattagaaattagttttgagcctgaattttaaaaagccaagtgttgcccccagcccacacacacacacacggacatgtacagtacaaaccccagataattacaacagccaaagagagaaggaagtgaatttcccaaccagaagcgtagggaaattcagatggctttcttttctcccagcagaggaacagaaggcggagctaagggcaggaaccaggagttggtcaaggagctataggaggtgatgagagtagaaccaggggtaggagctggtctggtacccctcaccctctaattgggagcccagggagaaggactgaaaagaagatgggagtggaaaagaataaagccagtttctgcttcccagggatgcagagattggggcatgctgtgtctgcagaagctcctagtcatttccgccataattgtgagagagaggggcagccctcccacaagatttttcccttcccatatcacttccctgaatccccttcctttccccccagtacagttaaacctctctctaatttggaatgttatatttgagaagatggccactgtgaataagtgacaaacggaatgacagtgtctatttaatgaaatgcatgtcttcaaaatatatacagaactcgatgaacaaggctttttccactcctcagggagcatgcattaatgaatagataggattcaaaagtctgttttctggtatgggttaaatatcccctcctacagacatatttccaccactaatttgcttagtacaccttttcttcacagataaaggaaaatgcaagctcagtttttcttcagattatgaagaaattccaaatccacaggggtttggattaatgaggttttgctgtactgcctccccttattcctcaacatgaagttcccacctcggattggggatgggtgggagggggtttcaagaggaggagggtgggatgggcaaggaatatacacaggtgaagccagagaagggttaggttgggggtgcggtgggaacttgctgttttgatctggtttcctggtgtgacactctgggttaaaggcttgaaggcccctgttaggagtctaggggtgagattctcttctctctgatcccagaggacgttaacttctactgcaggtgagaaacaaaataggaggatggtggggactgtcctgggaggagggggtggtccatggcttgtggtgtgggctggctataggggaggccactgctaggggactggcatccaggcccccttgaagcgtctcaataagtccgcgctctcctttttggtgtcttgcaggagaggcagcttccccccttgggtccaacaaacccgcgtgtgacgctggccccaccgtggaatggcctggcccccccagccccaccacccccaccccggctgcagattacggagaacggcgagttccgaaacaccgcagaccactagcccacccagcatcagagaccttctcttcctttcctgtgcaccccaccctgtaacagcaccaaccaccaggattggacatcaccgaggaacagcgggattgcctccccgaatgcctccctgggaggcacactgattgcccacccccaccactgcaccatttccaggagggagagtggggaccctcagccgcccccttttccttcccattggggtgctgccctctctttgacccccagggacccttgccccaggacaccgcctaccccgtacagaccccttcactccggggtgctatccccatcctctgcctcatcgttcccctgagcactgggggacagaccctcacccccaccctgggggtgtggcacctccaaactttcaacttcagggtgatttttttagcagtaaccagagctgacaatctaactcccctccaccgccccattttggcctcccctgccccccttgttatggggaggggaccccgggtgagggggccctattaccccttgatttctcaggagcgtctgggggggctcagcacgcacaaactccttctccttctaccactcttaaatttactccctccccacccagaacccagatggggtggagggggccaccggggcagggagggggcggcaaggggggaatgggagttgtctccccttctccccacacctgatctgctctcggctggtcccagagcggggtgagggggcttatgcccccccctcccccagtgtgttgggtggggtggaattgaggttagggtgaggggtcagggtttaggagggtgtgtatgttgggaggacaggctagttgatctgtcctactctgacacacagtcccctctgccccttccttctctcttcttggtctctactcccagggggaggggggaacttactctaggaaaagccatgtctctctcccccagggtggggggacctgtgttggaggaggggtgttggggggcccccttccatgactctgtcccctgggggaggtaggacagggctgggcttccctctcatcctccccctcccaatctccttccacctccctccctcccgccagctccacgatttttcggtgtttctctgtacatagttttctggcgggataggggaggtaggatggatggggtttggggtgggtaggccatgggaggggagaagcccctccttggcaccccctcttccctgactgctgtcccctacccagccttgcccccttcatccttttgcgtttggtattgagactctcctagactctactcctctttcttttgtatggacagttccccttcagtcccatccccctacacatacacccagccggggccaaatttatacttatataaaagttgtaaatatgtgaaattttatccctgtgccctttccccacctcaggccctacccctggaccctccccaaccttccttctctcttctttggctgttgtaattatctggggtttgtactgtacatatccggggtgtgtgtgtgtgggctgggggcaacccttctgtacagagcttcctggccccctccccccccgcccctctgcttccctccccacccaccacctcaagggtagggagttgctcttcctacctgttttattttgttttctcgttctccctccccaccccactcccagccttatctatcccccctcactgtccccttttctccactcccagccccatttcctttttttctggagtgtgtggtgaaacagaaaaaaacatgtttaataaacggagattgttctttta

SEQ ID NO: 15838 - DNA, 31588 bp, Homo sapiens
cccaggcctgatgagcaggtctcgagcctccatccatcgggggagcatccccgcgatgtcctatgcccccttcagaggtacgtggtggggggagggggagggccatatggggggcaacagggggaggggcagggggcgggggagagtcggggccgagggaagggagcggctgaaatggagggagaggggaggaccgggaaggcaggggtgggagcaaccgggaaggagggattggaggccagagggataggggtagataagggatggaggggccaggaaatgggccttgaaagggggctgaagggaaaatgatgaaggggaaagaaagcgccagaaaggggtgggaaggtagaaggattgggttggggaaaaagctgcagaaataatttgggggtgggagctgagtgatgaggaaaacatcaaggaaatagagggacagagtcttgggagaggggctaggaaggagaaatgaaaacataggggtgaaaagagaagccaagaagatgtggggggataatttggtgggggactcagagtatggtaaggggcggaaaaagagaggaggatggagggagagaaggggccagatggagagagagggaggcagtggggggtggggggatggagggtccagatggagggaagagagaagagagagggaacggtgggggaggggagaccagggcagggggagggccaaattatgtgtgcttgggggggtggcagtacaagtaagatgaaatgatgggagtaggggacaggttaggatcctgccccagactctgaccctcttaaaggctcttgaccagtaaaatgtaacctctggggtcttaatgctgtcttcacttcatcacttttacccccttcccccacccctccaatccttatttccattccccctccctcctctgctgtccatcacctatatctttccccccatatggtgtccgttccttatatgagtcccccttctgtccttcccctatatcagtcccctctctggtgttcattgcctctctcttatctcttttctatgtggtcgctcccttatatctctatcacttctttactagtccgtcttgaccccttctcatagcctccgcattaggtctgcctcctttgctctgacacatgtccagtcgagcccttcaggtgtattcccttgcccctgggcatttaccatcatttctgcctccttttctatctactcctattatttgtctcccagaccattccttgtcaccacaagtctgtgcctacccactttcccttaatacctcaactcttattatcatttctcttttcttgtctcctctacttattggggtgttggagatttggggtacaaagacacaggttttgatgattagaacaagggatccccatctcagcccttgagggatttctcatcctagtaaaaatttcccgtttctcagccatgttgctctgcctcttgcatctgcctcccagaatcattcttcaccaagtccagacagtatgtgtgtgtgtgtttctagagttgttcctaagttccctgctgccaggagaaagatgccctctgaagtctaacccgcctcccttggctgcagcctgaaccagccctttccccaaatgcttatgtgtatcaacagatttctcctctgggtataccaagtgtctaagtgcggtgggcatgttgcctgcaatgtctgtagtttcagaggctaggtattggtgatctctgtatctagagaacattagttagtctctgagatgggttgagatagagtttcaaagtatgtggtttctaaatggtggacattctgagggttcatcgctcactgtgatctggaggttgggtaaatttgagagacatatttatagacagaaaagggctgaatttgcaaaactctgctactcagtgcattctgttggaatgaagctcaaagaccagttctcctgcagtatactcatggttatcccataaaggtgacagagtttgatcttttttccatctaaaatctgataccttaagcctaatttctagctctttgctgtcgccaatgtgacatctctcttacttcaatagggcctgtgtggcattggggtttaaaggagaggcagtttgcagggagagcggcatggcaagaacaacagagctggggaaggaggaccctggtctcatctcagccataggcgacacttggtctactgttctctcttctcaaagttttgttcccatctccagctcttgtctttggaggcccctctgtgtcaccaggcctggatattccattctttccccctgacatctttcttcctcaagctcctcactgtgccttgagaaggctcctgacctatggagtggcttccatcctgtccactgagactaggtggggtgaggtggtgggggcagtgttgaatctctgggcactgaatgggagaagagataaatttggtctctacttgtccaaacaagggcatatttcccaccttctgccctggggcctccacagccagatgccgacaaaagccatcttctccttaccaccagaagaaccagaactttccctaaaggatgagcagggttgaactaggggaggagggcacagaggagggaagagttgggaggggaggccctctcatgtctctgactgtgaacaggtaagctccccgacttcttcttttctagatatttagccctcagaatctcatgatcccaatgttcctacacacacaccccatccttctttcccacagccatgtagctttcctcatactcttttatagaggggtggtgccaccttccaagtccttgtcttctgcagctatttggatgccttcctctacccagatatctgacaccaacttctctgtttttctcctgccaattttgcggcacctctaccttattttcctgaagtagatggagagctccttcatctttctctgcccccaaacgtgtaccttctctgtcatataattcccatccctgaacctctgcatttcttcccccaagtctccagagccttctgtgatgtgatcctctcctcttttcccctttgtataaatgcttgtcttgtgttcctttagagttgccaggtgtctcactttcaactgtgatctcctgaaggccggtagggtccccttctcactttgtggactctcttcttgccattttaggcctctgcttccaaatgcatagagcctcccttactgtttctgtgtgtctctgtcctccagatgtacggggaccctctatgcaccgaacccaatacgttcattccccgtatgatcgtcctggttggaaccctcggttctgcatcatctcggggaaccagctgctcatgctggatgaggatgaggtgagtgtggtgagaaggctgggaaaacgcatgtgggagaatggggagagtcctcattagtgaaggggagagagacacaaagaaggcagacaaagaagaaacatttgcaaatggcaggagggtggccattgagacttgggttggagtgtgacaagaggggtagtcattctctcatcttgggcagggagtctttgagggttatgagctgtgttggggaggagatgtggttctgaagatttcgggggtggggaggctcctgttttcacactgtccatattgtaggataggttagaatggggaaggggaactgaagggtttggagaaggggtgaagacatggaaggccctcccaaccaaagcaatcctcaggacccctctctgctttgcccactgagcaagactcccagtcctttctccatcagggggcagagtgcaagaagagaaattgcaggacgcagagaaaaggcaggggatagaggaggttttaggtagctggaggatactgggaaagaagactgaggtcagtggatcttggcatgatggggtgaagactgggagagtgattgagatcaaggtttagagagacactgagagggcttctgcaagggagtggttggacatcaggaaggaatataagggaggggaactgggagtatgtggagttatctaaaggagtacaagtggagtaggggcagggactagccagagtaaaggagatgaaacggacagaggcctcttatgggaggtggtggccaggtatggagatctgagagccagggaagtgtgggttctgatttgggagctgggtcagcaggagtgtccattggaggaaatagaggataaaaactggaatggtgccccacaagtgtgagtcagggaatgggggtgatttgggggacaagctttaaaaaatggtagggtagcctggaaaaccaaacgtggtgagagatggaccctgaaagttattgggaatggtgtgatgaggaagggttagaatttgagtcagggctaactagagtgtcaagggacctatgggggcaggtgagagtgtggagagatggctgggtagacagcttccaggccacagagtaaagtagaggtgttaaggagaggatatggtgactttgaaaggagaggtggcttggggagtctaagttttggacaccattgggagacatttgagtgactgtggtcaaacccctagatcaaggtttggagtctgtaggagaaatgggggaaactggaacccagagtggggactgttatagggatgaagagggaagacaatggattggggtaatgaaggaatgacagagatagggacagactgaagggaccagtggccagcaagttgaggggcaataggaatggccggtctggagcaggaagggcgtgtgtgtgggaggaggagtagatagaattgggaaaatgagcagcctgaacagacgcagggagttggaattggatgggtggtggaactggggctgggggatagtgaggggtctgttcctgtggctctttgtagaggtggaggagactgcaggggtggaggtgtatggaggtagggatggaggtggacagggggagctgggtgtgaagcttagggaaaggtgatggctgaggggaagaagggaactgagagatgctgggtcgggtgatggaaggagatgaaaggtgggggaaggtgaccaggccctctggcgggaggggaggttgggtcccagtctggccgcaagccgggccgtgggagggagacaagctgtggatcctgattataaatgcagcttctgctacccccgtgacaggctcggagggagagaagggggtaagggaggtgggaggttgggaggaaagcagggagaatggaggaactgaaggtcaagggaaaactggattcaggaagtagctaacttctgaggagttgcagaagagctgagtagggtttgggagaattctccggaaggtgtttcaagacaaatggagggagaaaagagggtgggacggcaaagaatgagagagagagactgggggagagaagggagagatccagtcaccaagtgtggaggggccggggcagaaaaagtgggcaggcttagggggaaaaggaggcccgcccttcctgggaggaggcggaggggggaagagggaggggaggggcggcgtgggccagggaggtctgacacacccccacctcccctagatacaccccctactgatccgggaccggaggagcgagtccagtcgcaacaaactgctgagacgcacagtctccgtgccggtggaggggcggccccacggcgagcatggtacggcggccgagcaggctctcatgacccggacaggcgcggggagagggctgaagatggaccgggctggcggggcgggggcgtcggggagcggcgggagctggccgggggcgggagaaggcggagacaaagtcttgcttcccgaggggagatggcgccctcctctggaaggtggagcgggacaggggctgtgggtgagaggcccctgtgggtcctcgctcggcttcgctccctttctcctctccagcagtgaagtttgactattttcctggtgcttgtaaaaatagtctccttagatctttagcttccagtccgtgtgttcctgcccctgcccctcccagcccctggtctgggatcttggaaagaatgacctagttcctgccctccccccagacctcttccccacccctatgctcctgattcttcttccggaccttcagtccttgaggtctccttttattaccccctgttttctcctctcatcagctgcttctattttctgcaattgtatcaccctttctctttcctccctgatttctcttattttctgtacccctcttgattaccccgtccctcccctctgctcccggcgaaagtccatcagactcccatctcatctcctttctgtctgtagagctatctgcgcggtctgtctctccaactctctccctctctccatctgtctcttcccctccctccccctttctgcccccccaaccccctctttagtcatttaaaaaaagatttttgtcttcctgagaagttcgcttaaaaggtttccatgggaacagtgaggggagatgaaggcagagaacagagatctgcagccaaggtgcagagagacgccctcagcccccggaaaccccctcgtcactgcccccttccacttcatttcccttcccggacctagcgatccaggttccccattcctccaacccccaggtgacccctttttcccaccagctccccctcccttcaggaattcaagctaccagtttctctcccttagagagccagtgacctgtccccatcctttggctccttccagccttctgataggtccaggccctactagccttgtgggccggtttggggaccttgggtgggtgggtgggtggtcagggatgtgtgtcattgtcatggaaaccccataccatcggggtgtgtgggtagcacatctctgtgaggcaaagtcaggtggtggtggagtgtatacagagaatgtgtgtgatgtctgtcacatctgtgtgtatatgtatatgtgtgtatgtcatgttcatgtctggggaagatgtgtgtgtttgtgtgcatgtgtgtacacctgcgtttccaggccagaatggtcacatgctcacagagcatgtttatcatgtgtcctgtggttggcagatctgcccacttattccccatctttctccttatcctgagtcctcagggtctaggggtctctggcgggggtctcccgtgtgttttgggtggggacaccgtgtgtgtttggagttgaggtggcatgtggaggttgctgtattggggttcagtaggggctgggaggggttccaggggcatatgtatttggggggagggcttagtgaaagttgatgggggtgaacgtttagggtcttcaggcagacatggaatgtgtaaagggcatggaggatgtgcagtggacataggggtcgttgggaccttggggacttggcaatgccaaggtgtttgctgaggctgtggactctccagcccgggagaggtcgccggacctttgaggggcattggaatcctgggctcctcctctgctgggtggagccgcgaaccctcgttctctccgcggttttgtgtgtgtgggggggtcctgctcaggaggggatggtgggtggcctggtttgttttgggggtccccttgcccccctcccccgtctctctcgcgctgtctccgggcgacagggctcgtgacagaggcggccacggcagcagcggtcgcctagcaacggcggcggggcccgggcaacggcggcagcggcgggagcggcggcggagggagccgttcccgcggccgtcaccgcgcggccgtcccggccgtcccgggccccgccgccgcccccaccgcgccgggcggcgcgagccgggccgtaccgccccctctccctccgcaccccgcccttcccccgcgcaggggcggggcccctcccccaccggggacacccctggcccccccggggggcggtgcgaggtaagggcggggccgggcggactaggagcgcgcgtagaggggggggcgccgcgcgcgtggggcgggggcgcgcgtgtgcgtgggcgcggggaggggggtggggaagccgcggtggcggcggcggcggcggcagctgctccctccgcatgttctcgctgcatcttccgagtggggggagttatggtaaccggagggggacagcggaggacgggagggtcggggaccggcctcgtgcggacagggtcttgagcacgcgggggcggccggtgtgtgtgggatcttggagcccctggtggaaggggcagcccgtgtgtccgcgtgtgtgttcgtgcccatgctcgtgtctcctgtgtgtcggtgccatgtgcacacgggggcccagttcctcgtgcacacatgtgcagccatccttgtgcaagtgtgtcctgtcttatcttgcctctgcctgtttcctgcctagggggctgttgggccagccacgggcttgtggggcagtccgcggccttgctggtccatgtcacctctgaccctgagcatgcatatccctggctggggctcacctcctgtcaggcttctgtgtgtgggaatgtgtggccctatgagcaggattttctgtgtccctggtggcaggtgtgtgtctttgcatgtgtgttccagcactggcctgagtatctgtgtcaatcccagcatgggtgtccagggcgtgtctggatgtgggtggtgtggctggggggagtaagtgtgtgaatgtgttccttggaattctactgtgtatgaaacacctttgggctgggcaggtgtaagccctgcttggtcagtaagtggggacagaaaagcttaaaaagggaagaaatggggtaaagaggaaaagtggggaggggataggagagaaggaatgagagaggcttgaagaagagagcagagagcagcaggccagggagaaagaatagctggagaatgggaatgtgggagaaagccaagccagacttagaagagagaacaggggataagagcttaagatggggaactggatagagatggtgggagaagaaggggtctgggagctggggaggcagtggggaggagagagtcaggccttctggtaaagtgatctctgaaagaagaaagggaagaagatgggagaaggcactggattcttgtaggccttgcaggatcaggcttggttttggatcagggaaggccactcaggcatacgggctggctcacagtgaggcctgtcatagcagggactgtcattagaggttcatatccccagcacagagctctgtctcccatttctctgctctgtgtccaaccctgttcttcgcccttctctggcaacctccctcctctggctccccttgagagctgccagctgggtgtggagaggaagaaaggccaaagggaaggttagggatttggagggcagggggagattctgtgggtgatggcaagattagagatgttggaggggcaggagtccaagcccttgctgtgtgtgtgtgagtgccattgtgtgtgtacacagggtgtgtacatgtgtgggtgtgtgcacaatgcctgtgttacgggtttgtgtaggtggctgttatgtgtgtgcatgcgtgtatacatcgtgcaggcatgggacatggagacccaggatcacagtttgtgcttttcaggtttgctgtgtgtgtgtgtacacgggtgtgtgttgttttctctgtacatgtcactgcatgcagcattaataacaggatgttctgtgtttctgtcactctgccccccctttcctctgtgtttctgctattcttttcctgcggcaacaaaagtgtttaataagcatatgtgtatgtggcctctgtgtacctgtgacttatgagtgagttcatggatcttagttcttggtaatatgtgtaaggttatattacttccaagaaccaagcaagccaattagcaaatttgttcttctgttaatgctttagttccaaagcggaattttaatgcatttaaagttagactttatgcctttattagatgagcttgcacatgaaaataatggctgagctcggttccctgaaatgagagtgaggcagccatacctgagaaatgcagaaaaaatgttactagggaagagatatcctgaaccattggatgcattgcttagtgtgtaccagaaggataattaacacatttgctcctggtttttctttactctggtggcaatctcggatgcctgtgttagagtgagagaagggctgggggaggaaagggggttgtcctgagacagagtggatgtggttgtacttttcacgtgaatgaaaggatgtttgtgcttctgagatatggggatacctttctgtggtcaggatcatggtgtactcaagcatgtatttcaggggttaaactggaattcccctgcatggggatatgtgtgtcttagggttataggtccatttctgtagtgtgctgtccacatgattgcccaagagacttgggccacaaagtccacaccagcagctctcatgtgggtcactgggttcaagtatgtactcccttgttgcagagctcacatatgtcaaagcatgtatcctgtggggtgtgtgggcctcagggtctcagaatgtggatccgtgctatgcccgtgctcacagttgtctgtatgtctcaaaagcacatagatccccagttatttttctgtattgtggttctcatatacacgtacctccatagctcagtatatgtttctgtactatacacctgttcctgagggagtgatagggttctcgtgtcatggggtccacatttttgtatgcaaacctcctaacacctgggttttacaggtaaagggaagctgaggactgattctagggcagtttgcaggcaatttgcaattctggaagcagacagtgaaaatataattgtggtcctcccttgttctgttctggaacctagagggttaacaggcagctcttccggtccacccccctccttccagcctgtagcttcttgttgccgtggagatggtggccccgccccgatgcagcacctgcccccccattggctgcagtggtgactgtggggctgaggggggagcccaggcctgggcagccattctggagctggagccggagcttggcatccccccacttacattctcttccagcccctcggcccctctaaattcccttgcagccgagcctcagcttcctttttcagcgcttgccatccctctaggctcttggcagactgagctgcatccgcattcacctcccctcctcctcctttccctatccttacttgggagtcccgagaacccccactgtccatccttcctgctccctgcccattcccctgcattctttgcttttcccctccccccaccaaccttctgagcccctgccactgcagtgcacgtggaaccggctccttctcccttccccccacctgccccttccttggattttctgtccccagcttctccccctgctactcttcacaggtctcttccaagacctccccctccagtccagggagggggtcatgggaggcagccctggccctccagacagacaggggttccaggaggtggggggcaggtggaagatgtgcccaccagggggaagaggaaagcctgcctatgggcaatgacctttaacccatctttccccccagctagccccttctggggtgggtgggcaccagggacctagcctccctggatctttggtgtccttcattactggggttttactgaccctctcagccatgctcccctgctgactgccagccccagtcatgggcctaaggcctcccaccccatccccctcagggggctcctgctcaggttccttgccccctccttcccgctgccagcctctccgccgtcgctgctcttcctgctgctttccggggggtaggtgaggccggagctgaggggcagagggaggtgggggcatgcactggggtcaggggtgggaacctgggttaacagcttcccttctggccccctccccaacttcccttctggccatttcctcccctccagaataccacttgggtcgctcgaggaggaagagtgtcccaggggggaagcagtacagcatggagggtgcccctgctgcgcccttccggccctcggtgagtggtgcctaccagatgtggctcagttgggccccctcccctccagccccaactggggccctaggagtctgagaaagagggcaggagggggagagagggagtgagagtgagaaaaagagtgtgtgtctgtgtgtgtctccccacctctttggtttcccccttcttggctctgcccccctgcttctgagaccagccctcccaccttctccaagctgtgtgtgtgtgtatatgtgtgtgtgtgtgtgcttgcactgtacccgtgggagcaaggaagacaaactggtattagggttcctatccccctttcctcgcctctggagacttcccttttccccatcccactttcatccaggggctctctaccagctgagggatgagtaggtagaactgaccctgccccaacccaccccatccccatttcccccccagcaaggcttcctgagccgacggctaaaaagctccatcaaacgaacgaagtcacaacccaaacttgaccggaccagcagctttcgccagatcctgcctcgcttccgaagtgctgaccatgaccggtacaggggctggagcatgtgggatgagattgatgtaatgtagggtctcctgtgtgagatgcagagggagggggttatctgtgtgcaaaggttgaaggattcaactcaagttggttgggggatgtcatggcacaggggacagaacagaaaagaactagaatagggatctgtgagcagcaggagaggggtagggtggcagagagaagacagacagacaggctggaaagggaatgaaggtgaagccaaggagggactcctcagggactcctcaggccaagaaggatgggctctagcccaggatcaaaggagctgtacaggaggagagtgaccctggaggaatgtttaaggaatgcagggaaggggttggtaggtgagtgagcaataggctgtaggtggaagggtgtcagggaaggtcaggaaatacaggggcagcaggttggagtggggctgggggtggctgaatgaatggatgatggctagggctcaaggacctcatcagtgagggaagagacagtatagagcatggcagagaaggggaggctgggacaggtgtgcagggtgacagaatgggaagcaacccatggactgaggcatgaagaagcagccagcggagaagtccagaaggcactgtccctgagaccaggctgaaggagacctccactgtttgcctttgttgcctgccatttggggttcctctctgggtttccccctcacccagtcactccccagggagaaccatgccctccctttcccccatgtctggccacccccaggattgggcaggtagggaggttgggataaagtgagtcacacctttccctgcccccctcccatgttgccagagctggatttggggccggcagggggtgagggcatggtattcctggccgcgggggcgggggggggggtccgggggccgggggagcgtcgcgctgacggcagccagagcctgcgatgacggggctgctataaataacttcttggaggctcccacacccaagctcccctcccgctttcccactgctctctactcttcatcccctgcccatctccataccgcttttgtattgctatcctacccctcattattccatgcccctagccccctttatcttctgccctcctgcagtgatttttttgcattccatcccctcttagccctcacctcggttctcccggccatctctccagttggccttcctcctcttctcctgtcctctgtcttgctgcacatacctttgtctccccctttcttcttcttgccctacctcctcttcttccctagtccgtgtattctgtcttttatcctctttgagctcttttctgcccacagctttctcctatttcttatgcttttccctcactctttcccctgcttctgctaaaacttgtcctcttatgctgtgttcattcattctttgaatcattaaatgtttatcaggcactagccgtgtgccaggcccaggctagacatatctcttctctgtgccttcacttctttacttccactttttcctttatactgaggctctggtttctggggttacctggaggtactacctagaagtgccccaggcccactttgttctctccttttttttttttcttttctgccatggtccatttctgggttgagatatttctagatgtccccagtcctcgcaatcccttaggtgtgagatggtgggagtttcttttttttcctttttttttttttaaatagaaatagggtctcactgtgttgcccagactggtcttgaactcctgggctcaagtgaccctcccacctcggcctttgaaatgttgggattacaggtgtgagccaccaggcccaggtggagcaggggagttccttaaaggattctgatttttctcacatccctcacgtccttcctgataggcagggtttctttctgtgtctgtttgggaagggtgttcagggggccttctctccaagtctccatcctggaacagactgatgatgcagggtacctatgtgtctaagaagagtaggggggccgggcgcggtggctcatgcctgtaatcccagcactttgggaggctgaatcacttgaggtcaggagtttgagaccagcctgaccaacagggtgaaaccccgtctcagctaaaaatacaaaaaaaaaaaagaaaaaaaaattagctgggtgtgctgaggcaggagagacgcttgagcccaggaggcagaagttgcagcaagccgagatcacaccactgtactccagcctgggcgacagagcaagactgtctcaaaaaaaaaaaaaaaaaaaaaaaaggaagagtgggaagccctgatcccttcctctcctgaacctcctgcctgccagggcccggctgatgcaaagctttaaggagtcacactctcatgagtccttgctgagtcctagcagtgcagctgaggcattggagctcaacttggatgaagattccattatcaagccagtgcacagctccatcctgggccaggagttctgttttgaggtactgggtctggtgggctggggagggccaaaggacaggggtgatggaaggtggggggcagagaggtctagagaaagtggcacaggtggggacatcaaggaaacagaaacttctgggactggaggaaagggtaggccagggaggaagagaaggtagcagagtctcctcccctctgtagccctttccctcaactccacactcctttctaggtaacaacttcatcaggaacaaaatgctttgcctgtcggtctgcggccgaaagagacaaatggattgagaatctgcagcgggcagtaaagcccaacaaggtattggggaataaaggggacacaacctgtgcagggcaaaggttgcaccaacacgggaagctgggggcctagggaggaaagtgagttaaaggaggagaggcttggggaaggagaggattgaggtacagtgtatctggacaagcagggggagacccccattattctgagtcccccatttcttttcgctttctgtactgctaccctgccttacgatctctttccctgccatagaagtcatagacttacagagttgatggggctctggaaattctttagtctagcttccctgcaggcaggaatgcttcactaataccccgcaggacacatcaaatacacttagccaagtttctgtaccttggtttcctctctaagacagagggaactggtggcaatgggttggattaaatgatctctaaggtccctttggcacataaattctatgagtctgttcttcccaaaacttcatgcttccagttctgtcagctattctctgtatcccagtttctagcaagcttacagtcctagtcacactcctctggggggaactcttgtgtcttgatgtccttaaagaactcaacccaagatgctgacatgatctgacctatgcagagtacaaacaccatgttccctttcaacacactgcaatatcacctgagccttaccattagcttgtgctcaattgtatccccccaggcccttactgattcttttttttttttttttgagacagagtctcactctgtcacccaggctggagtgcagtggcgtgatcttggctcactgcaacctccgcctcctgggtttaagcaattcctgtgcctcagcctccccagtagctgggattacaggcatgcaccaccacacccgactaatttttgtatttttagtagagacgaggtttcaccatgttggccaggctagtctcaaactcctgacctcaggttgtctgcctgcctcagcctcccaaagtgctaggattacaggcatgagccaccacatctggccaagctttacccattctatatgcaattcttttttcacaatttctgatagtctctgcaggactttccagttcccttcaaattctacattaatatttttggcttgttattccagcttttgaaatctttccaatactgtttgtgttgtctagtgtatgtctacgcttctacagtagcttcctggggctgctataacaaactgctacaaactgggtcacgtaaaacaacagaaatttattctctcacagttcaggaggctggaagtccaaaagcaaggtatcagcagggccacgctctctttgatgctgtagcagggaatccttccttgcctcttcctagcttccggaggttgccagcagtccttggcattcctgggcttataactgcatccgtctaatttctgcctccatcttcatgtagctggcttccttctgtgtgtctctgtatcctgtatctctgtgtctccaaatctccctctccatataaagacaccagtttttataaggtgggttaagggtccactctaattcagtatggcctcttttttttgagatggaatatcgctcttgtttcccaggcttggagtgcaatggcatgagctcagctcactgcaacctccgccttccaggttcaagtgattctcctgcctcagcctcctgagtagctgggattacaggcacgtgccactatgcccagctaatttgtttttgtatttttattagagacggggtttcactatgttggccaggctggctcgaactcctgacctcaggcaatccacccacctcggcctcccaaagtgctgggattacaggaatgagataccatggctggcctcttcttagtttgattacatttgcagggatcctgtttccaaataagatcacattcacaggttcagggtagacatgagttttggtgggatactattcaacccagtacaccgtctcaccttatgattgctgtctgtatcccactttcttactgtctctcctcttttggtgtctctctgtcccttccccctttaacatcatgcccaccccaccatgccaggacaacagccgccgggtagacaatgtgctaaagctgtggatcatagaggcccgggagctgccccccaagaagcggtactactgtgagctctgcctggatgacatgctgtatgcacgcaccacctccaagccccgctctgcctctggggacaccgtcttctggggcgagcacttcgagtttaacaacctgccggctgtccgtgccctgcggctgcatctgtaccgtgactcagacaaaaagcgcaagaaggacaaggcaggctatgtcggcctggtgactgtgccagtggccaccctggctgggcgccacttcacagagcagtggtaccctgtaaccctgccaacaggcagtgggggatctgggggcatgggttcgggagggggagggggctcggggggtggctcagggggcaagggcaaaggaggttgcccggctgtgcggctgaaagcacgttaccagacaatgagcatcttgcccatggagctatataaagagtttgcagagtatgtcaccaaccattatcggatgctgtgtgcagtcttggagcccgccctgaatgtcaaaggcaaggaggaggttgccagtgcactagttcacatcctgcagagtacaggcaaggccaaggtgagtgttgtgccctcagggaaaggtgacttgggaatgggcacttgcttgggggttagtgaggacagggcaaattcacgagattgggttgtgcagaggctgacacttggattttcctgggcctcaggacttcctttcagacatggccatgtctgaggtagaccggttcatggaacgggagcacctcatattccgcgagaacacgcttgccactaaagccatagaagagtatatgagactgattggtcagaaatacctcaaggatgccattggtatggcccacactcaggccctcttcttcccaaacctgccagatgtccaccccagaccccaagtccacccttccacagcttgatacttcctaacccagagtcctaggactccagcctccaacacctgattctgaaatttccccaaccctggccacccccttccctgcccttggaaagtgtgaccacaccctcttgtgcccccaccccccaggagaattcatccgtgctctgtatgaatctgaggaaaactgcgaggtagaccctatcaagtgcacagcatccagtttggcagagcaccaggccaacctgcgaatgtgctgtgagttggccctgtgcaaggtggtcaactcccactggtgagactgggaacgctgggctggggggccagggtcgggggaattatgtgttcatctgttcatctatctgtccatcctcaaagaggactgagcaccatttatgggcaaagcattgttctaggcgctatagagcaaacaggtgaaagaggcctggtccctgccctcagagggcctccaccagaatggggacaaattagaagaaaaaaaaaaaaagccacagagccataatggtgtgtaagtgctgagtaagggtccccccaacctctgtgtgacataaggtcagagagaaggcagagctttgagataagtggggaagaggtgcccccttgggtaggctttgaagactggtttaggttctgatatatggacatagttggcaagaaagacatttcagaagaaggctgtgagaaaggcacatgtgtgatggtgaaaaggcccaggagttttcaggggacattaaagtaggttagtagcaattacatcaggtttagtggagcatgtgcctcataatggggagtggcgggagagatgtctgggcaggaagattagctttagaaactggaaggcctcaaggagtctgaggtcattggtaggccttgggatgccattaaaggtgtcagaaatattgtgatttagaagattaatccataggctgggcacggtggctcacacctgtaataccagcactttgggaggctgaggcgggcagaccacctgaggtcaggagtttgagaccaggctgaccaacatggagaaaccctgtctctactaaaaatacaaaattagccagatgtggtggcacatgcctgtaatcccagctattcgggaggctaaggcaggagaatcacttgaatctgggaggtggaggttgtagtgagccgagatcacacgattgcactctagcctgggcaacaagagtgaaactccatctcaaaaaaaaaaaattaatccataagtagagtgtatgtagtagagtagagggatgtatgttgggggatgactggaatagagccagctgggggctcggaggcatgaaagtcagatcctgaatcagaacagtgacagaagttaggaaggagctactggaaggaccctctcgggaaaggatcagtaggaattgtcagcttattggaaaggagggagcatgtctgtggggagtcacggatgactcaagaggccatgaggctggtggttgggagaccggtggcctcattgacaaccaggaaagtcaggaggaggagccagttggaggtgtgggggcgatggtgagctctgctttacaccagccgagtttaaggtgtcagtgggacattgaagtggaactgggaggtgcggggagtgagctctgagccattccagggactggggatcatgcctggggcacctccatccccatttccctggaatccagaagagttggggggtccgagctccctgtacctcaagtgaccctccatctctctcccatctctgtctctccctggtgtctgtttttcttctcctcctctccttgtctctctcccacacccctccatctctctcccacgtgtctctcccctcaccttctctccccctccatttctctctccctaatctgtctgttccctctgccatggcccccttcttcaagcagcctcccatcttgctcctgcggtccctccttccctgtctctctcacccctgtttccacaccctcacctcctaccacccccctcagcatgttccctggaagctgagggtctctggggctcagtcccggtctctctctttctctctctctctctctgtctccccgacccttccccccagcgtgttcccgagggagctgaaggaggtgtttgcttcgtggcggctgcgctgcgcagagcgaggccgggaggacatcgcagacaggcttatcagcgcctcactcttcctgcgcttcctctgcccagcgattatgtcgcccagtctctttgggcttatgcaggagtacccagatgagcagacctcacgaaccctcaccctcattgccaaggtcatccagaacctggccaacttttccaagtgagggaagcttcaggagtgggcagggcagggagtggcagggcagggagtggcagggctgggggtcggcaagaagggtctcctgagtccccagagatcctgagatggggaggctatgataccttgtgtgtgtgtgtatgtgtgtgtatgtgtgtgtgtgtgtgtgtgtgtgtgtatgtgacctttatcttctgcattcttggctaggtttacctcaaaggaggactttctgggcttcatgaatgagtttctggagctggaatggggttccatgcagcagtttttgtatgagatctccaatctggacacgctaaccaacagcagtagctttgagggttacatcgacttgggccgagagctctccacactgcatgccctactctgggaggtgctgccccagctcagcaaggtcagcagatcccctctttgccctatccccagatggctccagaggttcctggagcctgagaaactaccctttgaagattttttttctccccttgtttctcgaggtgtcaccactactatcccaactcaggccccctccacctgcaccctcagaggccctcttagagctgggcactgagcccccaggtaacagcctcacccttccaggaagccctcctgaagctgggtccactgccccggctcctcaacgacatcagcacagctctgaggaaccccaacatccaaaggcagccaagccgccagagtgagcggccccggcctcagcctgtggtactgcgggggccatcggctgagatgcagggctacatgatgcgggacctcaacaggtgagcaccctgggacagccaggcctgtgccctaggagcccttctcctattctagatactcctcactgggccccacatgcatctctctagggcttgaaagaagggaggaaaaagcaccaagttctcaggggagacgataaggagacaggtacagtcagtggtaggctgagagccctttacagcctgagggagtgagagatttggagctctaggaatagggctgaggctccaccaactcacggcttagttgtaagcctagagcatccctgctgcaagctctgatttgctgtccctctgcctgcccatgctagtccccaggctgaggttcagccagcatgtcatgtcagccatgtgtcaaaatgttcaaacatctcagtaatagctagtgaataagcacttcccccagcccccgaccacaaccccacagacctccccatgatccagcacttagagcagtgacagcagaagcctagcagggcctgcagcctgctccagagtcccagcctccattctgataggtggtgcccgtgcttcatttgctgctcattattttgatgatggccctgctttttcctctgcccgtgtcttcctccatgacaccatacccatcccaccattcccgcctctcctttcatttgtccacatctctctccttctctgtctgtgctcgcccctctttccatctctctccagctccatcgaccttcagtccttcatggctcgaggcctcaacaggtgaggggctctcccctcccccgccctcctctcctctcctgtctgttccctctcccactccactggccttcgccctactcctctcctctcctcctccatggacctcatctcctccatatgtgcccagccctgcccccatcccttctcttgctgcccccatctcccctcctctaggcctcacccccttcccggaggggccctgtcctttccctttactcacctgtcccctcccatcctccctgcctgccctcttcagggctgccaccgctagctctcagcccttccctctgggtcccacttttcaccccaaggcctgtgccagaccacagcaaggttcaattgctaggagccctgaccttaccttctgcttgtgtgcccccttcccttctgacagctctatggacatggctcgcctcccctccccaaccaaggaaaagccacccccaccaccgcctggtggtggtaaagacctgttctatgtaagccgtccacccctggcccgttcctcaccagcatactgcacgagcagctcggacatcacagagccagagcagaagatgctgagtgtcaacaagagtgtgtccatgctggacttacagggtgatgggcctggtggccgcctcaacagcagcagtgtttcgaacctggcggccgtaggggacctgctgcactcaagccaggcctcgctgacagcagccttggggctacggcctgcgcctgccggacgcctctcccaggggagtggctcatccatcacggcggctggcatgcgcctcagccagatgggtgtcaccacagacggtgtccctgcccagcaactgcgaatccccctctccttccagaaccctctcttccacatggctgctgatgggccaggtcccccaggcggccatggagggggcggtggccatggcccaccttcctcccatcaccaccaccaccaccatcaccaccaccgaggtggagagccccctggggacacctttgccccattccatggctatagcaagagtgaggacctctcttccggggtccccaagccccctgctgcctccatccttcatagccacagctacagtgatgagtttggaccctctggcactgacttcacccgtcggcagctttcactccaggacaacctgcagcacatgctgtcccctccccagatcaccattggtccccagaggccagccccctcagggcctggaggtgggagcggtgggggcagcggtgggggtggcgggggccagccgcctccattgcagaggggcaagtctcagcagttgacagtcagcgcagcccagaaaccccggccatccagcgggaatctattgcagtccccagagccaagttatggccccgcccgtccacggcaacagagcctcagcaaggagggcagcattgggggcagcgggggcagcggtggcggagggggtggggggctgaagccctccatcaccaagcaggtaggtgaaggcaggaggaaggcgggctgggtcacaacagggagggaagaaggagatggggggtggggttgaaacagagtctgtggcctgaagttacaatcttcttgcctccttttggccattaaacaaatgtgtatagagggcctgctatgtgccatgtgctatgccaggcactaaggatacggcactgaaccctcttagcactctcattccagaggggattaatccataagtagaatgggggtgactggaatagggccagctgggggcttggaggcatgaagatcagatcctgaatcagaacaacaggagaaattctctggcattcaactcacatctctggcattcagaggtgataaaggctacagcagggcaataggactgggactgtcgtctcctttggctgtgctgttgccctctaaatgtaccctgctttttcccaccttttctttctctgttcgccctcactgtgccttgtcccagcattctcagacaccatccacattgaaccccacaatgccagcctctgagcggacagtggcctgggtctccaacatgcctcacctgtcggctgacatcgagagtgcccacatcgagcgggaagagtacaagctcaaggagtactcaaaatcgatggatgagagccggctggatagggtacgatgggctctaccagctccaagccccagtgtttccttttacccacaggggagatctctagtcacttccaagggaaacctccagggtcagttatggtggtaagaaaaggcaaagacctgatcacctcttgagaagccttccgtccatctggggagaccagatacacacagttgttaaaagtcactttcaactctattttgtaggttatatatatcatagactatctggggatcatctattttaggcttacctccatgttcttccccaggaggaacataagccctggctcctgtgactgcttaggaaaggaaatgttactttactggcagtaggagctaataaattggatggggatggagggggttgcagctatattacaagtgatgtctggcctacccagtcactgtcccatgggcataagtgacagtcagtgggcagggaatgcatgtggtaaagtagtatgtatcagtcatgtgtgaaaagaccatccagaccctcacttggtggaggctgagggcaaagggcaccaagagctctggggctaacacagataacttagcagaaagttacttgaggaagctgttgttcctagggcctgaggaagagggcggctgcaggattaggtcatatataaagaacatatgatcctaacacggggaagtggtctttgagcataggaaatgttgggactgactcagatgggcttgaccagcaaatttaatgagaattaaaccctaatattagccccaaggcagccaccgtaggaagttaattcacatctctcctctgcatgtagaagggttggtgatatatgtatgtatcctcttcagagaatgaggaaatagtcttttgaatcatttttttttctgtgcttcagatgaggaaaccttgttgagaaaggctgtagactagcactatccaatataactttctgcagtgatgaaatgttctgtaatctgtagtgttcacatgtgtctagttgtgattcaggaactgaatttttagatctatttaattttaattttgtaatttttttgagacagggtcttgctctgtcacccaggctggagtgcagtggtgcaaacatggctcgaggcaacctccgcctcctgggctcaagacatcctcccacctcagccccctgagtagctaggactacagggtcgtgctaccatgcctggctagttttttttcttttcttttttttttttttttttttttgtagagacggggttttgccatgttgcccaggctggtctagaacttgtgagctcaagtgatctacctgcctcagccttccaaagtgctgggattacaggtgttgagccactgtgcctggcctaaattttaaatagctacatgtgggctggtggctaccatattagacagcacagctgtagactctagagccaatagggcagataaaatgactcttctgagctcttccagctctggaattcctagattctcagcctagaattcacttgtagacctcctatccttggcaccttgacagagccaaggagagggtcacatggaggacagcacctgcctttcccccgtcaattgccttttcttcctatgtctccagcatgtgttctggggcctggcttagggctgaagagtcaccctatttttaatttctgagcacagttactcaaggtgtgtttgtgagtgtaggtttctgtgtgggtcttcatgaggggccatacatagacctcagggtgtgggagtctgtgaccttgctccattttgagggaacctcagcaccatggcagggtcttctcaaaagcaggtgtgtggatatgatccacaggcagggaaggggttggggaaggcagctggatgtccctcaacatgcagtggctgtgcttggcagacagggatggaggctgggtggtgggcttggggtggggcgcccctcatagtgcggggtcgtgtgcccggcgggcaggtgaaggagtacgaggaggagattcactcactgaaagagcggctgcacatgtccaaccggaagctggaagagtatgagcggaggctgctgtcccaggaagaacaaaccagcaaaatcctgatgcagtatcaggcccgactggagcagagtgagaagaggctaaggcagcagcaggcagagaaggattcccagatcaagagcatcattggcaggtgaggggcggcctggggagggggttgtgagggagagcctgaggctggagagagcaagtgggtgagctactccgctgactcccatccccaaactcaggagcccaccaggagagcccaccactctcctccccaggaagccacccactcactcatcaccagatggagagaaaccccaacctgcttagtgcattaaatatctctttaccaaaccctgacctctcttctgatagagtagcttcggaagcccttggaaaatgtacctgttcctgtccaaccatcactgcatttgcatttaccctaggccagagctccccactagttattctcaacttaacctgtgatgttcactccaaacctaagcagggctccctagccagagtaggccctgcccttcctgggtggaccctccctctctagccttggaaaggtgttctgttagaaagggtcttttagcctgtgtatgttttcagctgctccagcaagtcctgggctccaaagagggtatcctcagcaaagaggtcaattatcttcagagtggtggggtcggggtgggggggaccctgggcgcactccaaccagagccacctccattttgatccattctaaatgtattttatgtaagatttaattagaagaaaagggcttcttgaaatattttttgaaaaccactgctctaattgatatcctttatgataaatcacctcgaggatcttcacagtgaggtgacatgggggatgcagaagccaggtcctcagccatggaaggtctggggaaggggcactgctgtcctgattgggacgatggaggcctggaggtgtctggatggtagaagtctttgaggcacagaaagctgccttagcagggaggtgtaagggttcctgggaggaaggtggagagcatgatcctgaggaacagggagtcttgcatcacggcaatggagggactctgattctaagggataaggatgcctgaggtttttccagagagctatggggttccatgggcaggctctgagcctgtgcccgccactaaccccactgaagcccgtcccttcaggctgatgctggtggaggaggagctgcgccgggaccaccccgccatggctgagccgctgccagaacccaagaagaggctgctcgacgctcaggtggaaattacaatgtcatttatcttctccgtgtcccatccccatccatcccactgtctttcgtgcactcactacaccagccacctagccccatcaccatctgtctctcatagtctgctgtttgtccactggctgctcctggcagccccctagtgaccccatcttcatcccatcgtctgtgcctttgtcactcctggcagcgtcagcccaactcctgtgccttcccatccagtcttcccactcctctctgcatctcaggaccttctctaccagaaccttggtctttctgcccctagaccccacctagttccaagaacccctgccccttctttgctcactcctattcaagccacgttgttcagcttcctctgcgctcttgggccagagggctagaagctgccgttttctggaatagagcacagggcagtatgatctgtagtttctccaggccctggccggtaccctgaaaacttggggacccatcacctctgttctcttggctccctaattttcctgtctccttggcagctcctgcatagcttcctcttcctgactcttcagatcttgaaggccttccatcctgtaacctccctttgccctcagtatttaagtccagcctccctctggcctccctcccactctggccctcagaccttcccagctgcctgctgcccagcctctcttctcacaagccagcttctaggacctcccttctgcacccttaccccttgctttcccaaaattctgctcattttcctacccatactcctctttgctctgactgctaggctccccccgcctgccatccccccaccaaggctcctgaccccatgaccccactctctcccactgcagctcctcatcaggtaattctcctggttccgctttggccacgggcggaggacacagggggaggtgactccggaccactgcaggttggtcgtgaagcccactccctccaacacctccggagcctctcccctctcactgctgccctccacacccagagaacctccacagactccagccctccgacacctgcacagatccatctcccaagacaccacccaaagagagcatttgctgctgcttcccagaactgtccaacaataccttagcaacaccaagagttgggccctagatgggcccagcacattcacaggtcacacccacttccctgcaaaacccaccccctcccagcctcctcctgactctaagccctcctcttcctctacctctccagtgtatgtctgtcaccccccatttcaccagagcgtccttaggggctgggggtgggtttgttaatggggtggaggcaatgatgggttggaggatcttggctataggggctgtgctgactgcagcaggtaggttgggtttccctcttccttccctaatcttggttctctaccctcctttccactcctcacctgattctctctcttcctcctccttatatctgtgaggcagaaggcatctgaagctcatattagcccccattgggtgggaattaggagtgggtagttaactcagggagacttgagataccctggaaaaaatgctattgagatgtcctgacattaggcagggtggatggaacaagaaggagcaagaaaggaacctcaggcagatgttaggacatggacttgatcatgtggcctgggagtttagaaatggggagagacatcctcctagatcagatcgtgggctcagtaggcatgttgattcccagggagaggtgccaggaacagcatggtaaagaatgtactcttcacagctcacatccccaggttgctgatgccactcactccccctctcctgccatcgagtggccttgccggacacatcaccctacctaaaaagccagtaaatgagaacctgtcagctatagccatcatttctgagatgcgattttctttgggattgagctgcagtgggcagtggctccttacactgtaattttaattctctgcctgcccagcctctctgtcaaagtagctggtgatctataaagatgctaaaaggcaccaggggactttgccatttaaaggactcctgcagtgaattcttttgtaaaatgaataatggcaccctaatttatccactttctaaatttgggtccatgggggtgtccagggcatgcttatgtgctgtcaccagcagacaaacagagggaatggaatctgggggttccttccctgctctcccgccatactcaggataccctaccataagtgatttcctctcactgacttgcagaaaatgtgtgagatacccagcaagctaagaaggcagttttgctgggtatctcatacccaaggctggggtttgggtgatctgagaggttagctccttgatcctaggatggaagggagagcttatatagaagcttttacttggaaggttttgtatcctaaggtcagacatagctatattaccaagcctaaatgccatgtggcccaggaaataatttggacatttgttctaaaccacttgtggtaggtattggtctctctgcaactcagccattaattagaaattagttttgagcctgaattttaaaaagccaagtgttgcccccagcccacacacacacacacggacatgtacagtacaaaccccagataattacaacagccaaagagagaaggaagtgaatttcccaaccagaagcgtagggaaattcagatggctttcttttctcccagcagaggaacagaaggcggagctaagggcaggaaccaggagttggtcaaggagctataggaggtgatgagagtagaaccaggggtaggagctggtctggtacccctcaccctctaattgggagcccagggagaaggactgaaaagaagatgggagtggaaaagaataaagccagtttctgcttcccagggatgcagagattggggcatgctgtgtctgcagaagctcctagtcatttccgccataattgtgagagagaggggcagccctcccacaagatttttcccttcccatatcacttccctgaatccccttcctttccccccagtacagttaaacctctctctaatttggaatgttatatttgagaagatggccactgtgaataagtgacaaacggaatgacagtgtctatttaatgaaatgcatgtcttcaaaatatatacagaactcgatgaacaaggctttttccactcctcagggagcatgcattaatgaatagataggattcaaaagtctgttttctggtatgggttaaatatcccctcctacagacatatttccaccactaatttgcttagtacaccttttcttcacagataaaggaaaatgcaagctcagtttttcttcagattatgaagaaattccaaatccacaggggtttggattaatgaggttttgctgtactgcctccccttattcctcaacatgaagttcccacctcggattggggatgggtgggagggggtttcaagaggaggagggtgggatgggcaaggaatatacacaggtgaagccagagaagggttaggttgggggtgcggtgggaacttgctgttttgatctggtttcctggtgtgacactctgggttaaaggcttgaaggcccctgttaggagtctaggggtgagattctcttctctctgatcccagaggacgttaacttctactgcaggtgagaaacaaaataggaggatggtggggactgtcctgggaggagggggtggtccatggcttgtggtgtgggctggctataggggaggccactgctaggggactggcatccaggcccccttgaagcgtctcaataagtccgcgctctcctttttggtgtcttgcaggagaggcagcttccccccttgggtccaacaaacccgcgtgtgacgctggccccaccgtggaatggcctggcccccccagcccc

SEQ ID NO: 15839 - DNA, 33620 bp, Homo sapiens
tctcggctgccgctgctgccgttggctcttattctcctcctcctcctcctctctcctcctctctgcttctctctgctcctctctcctcctctctcctcctcctcctcctccacctcctcctccttctccccctctttctccccctctttctctcttctttctcccccgtccccccgccccctccccccaggcctgatgagcaggtctcgagcctccatccatcgggggagcatccccgcgatgtcctatgcccccttcagaggtacgtggtggggggagggggagggccatatggggggcaacagggggaggggcagggggcgggggagagtcggggccgagggaagggagcggctgaaatggagggagaggggaggaccgggaaggcaggggtgggagcaaccgggaaggagggattggaggccagagggataggggtagataagggatggaggggccaggaaatgggccttgaaagggggctgaagggaaaatgatgaaggggaaagaaagcgccagaaaggggtgggaaggtagaaggattgggttggggaaaaagctgcagaaataatttgggggtgggagctgagtgatgaggaaaacatcaaggaaatagagggacagagtcttgggagaggggctaggaaggagaaatgaaaacataggggtgaaaagagaagccaagaagatgtggggggataatttggtgggggactcagagtatggtaaggggcggaaaaagagaggaggatggagggagagaaggggccagatggagagagagggaggcagtggggggtggggggatggagggtccagatggagggaagagagaagagagagggaacggtgggggaggggagaccagggcagggggagggccaaattatgtgtgcttgggggggtggcagtacaagtaagatgaaatgatgggagtaggggacaggttaggatcctgccccagactctgaccctcttaaaggctcttgaccagtaaaatgtaacctctggggtcttaatgctgtcttcacttcatcacttttacccccttcccccacccctccaatccttatttccattccccctccctcctctgctgtccatcacctatatctttccccccatatggtgtccgttccttatatgagtcccccttctgtccttcccctatatcagtcccctctctggtgttcattgcctctctcttatctcttttctatgtggtcgctcccttatatctctatcacttctttactagtccgtcttgaccccttctcatagcctccgcattaggtctgcctcctttgctctgacacatgtccagtcgagcccttcaggtgtattcccttgcccctgggcatttaccatcatttctgcctccttttctatctactcctattatttgtctcccagaccattccttgtcaccacaagtctgtgcctacccactttcccttaatacctcaactcttattatcatttctcttttcttgtctcctctacttattggggtgttggagatttggggtacaaagacacaggttttgatgattagaacaagggatccccatctcagcccttgagggatttctcatcctagtaaaaatttcccgtttctcagccatgttgctctgcctcttgcatctgcctcccagaatcattcttcaccaagtccagacagtatgtgtgtgtgtgtttctagagttgttcctaagttccctgctgccaggagaaagatgccctctgaagtctaacccgcctcccttggctgcagcctgaaccagccctttccccaaatgcttatgtgtatcaacagatttctcctctgggtataccaagtgtctaagtgcggtgggcatgttgcctgcaatgtctgtagtttcagaggctaggtattggtgatctctgtatctagagaacattagttagtctctgagatgggttgagatagagtttcaaagtatgtggtttctaaatggtggacattctgagggttcatcgctcactgtgatctggaggttgggtaaatttgagagacatatttatagacagaaaagggctgaatttgcaaaactctgctactcagtgcattctgttggaatgaagctcaaagaccagttctcctgcagtatactcatggttatcccataaaggtgacagagtttgatcttttttccatctaaaatctgataccttaagcctaatttctagctctttgctgtcgccaatgtgacatctctcttacttcaatagggcctgtgtggcattggggtttaaaggagaggcagtttgcagggagagcggcatggcaagaacaacagagctggggaaggaggaccctggtctcatctcagccataggcgacacttggtctactgttctctcttctcaaagttttgttcccatctccagctcttgtctttggaggcccctctgtgtcaccaggcctggatattccattctttccccctgacatctttcttcctcaagctcctcactgtgccttgagaaggctcctgacctatggagtggcttccatcctgtccactgagactaggtggggtgaggtggtgggggcagtgttgaatctctgggcactgaatgggagaagagataaatttggtctctacttgtccaaacaagggcatatttcccaccttctgccctggggcctccacagccagatgccgacaaaagccatcttctccttaccaccagaagaaccagaactttccctaaaggatgagcagggttgaactaggggaggagggcacagaggagggaagagttgggaggggaggccctctcatgtctctgactgtgaacaggtaagctccccgacttcttcttttctagatatttagccctcagaatctcatgatcccaatgttcctacacacacaccccatccttctttcccacagccatgtagctttcctcatactcttttatagaggggtggtgccaccttccaagtccttgtcttctgcagctatttggatgccttcctctacccagatatctgacaccaacttctctgtttttctcctgccaattttgcggcacctctaccttattttcctgaagtagatggagagctccttcatctttctctgcccccaaacgtgtaccttctctgtcatataattcccatccctgaacctctgcatttcttcccccaagtctccagagccttctgtgatgtgatcctctcctcttttcccctttgtataaatgcttgtcttgtgttcctttagagttgccaggtgtctcactttcaactgtgatctcctgaaggccggtagggtccccttctcactttgtggactctcttcttgccattttaggcctctgcttccaaatgcatagagcctcccttactgtttctgtgtgtctctgtcctccagatgtacggggaccctctatgcaccgaacccaatacgttcattccccgtatgatcgtcctggttggaaccctcggttctgcatcatctcggggaaccagctgctcatgctggatgaggatgaggtgagtgtggtgagaaggctgggaaaacgcatgtgggagaatggggagagtcctcattagtgaaggggagagagacacaaagaaggcagacaaagaagaaacatttgcaaatggcaggagggtggccattgagacttgggttggagtgtgacaagaggggtagtcattctctcatcttgggcagggagtctttgagggttatgagctgtgttggggaggagatgtggttctgaagatttcgggggtggggaggctcctgttttcacactgtccatattgtaggataggttagaatggggaaggggaactgaagggtttggagaaggggtgaagacatggaaggccctcccaaccaaagcaatcctcaggacccctctctgctttgcccactgagcaagactcccagtcctttctccatcagggggcagagtgcaagaagagaaattgcaggacgcagagaaaaggcaggggatagaggaggttttaggtagctggaggatactgggaaagaagactgaggtcagtggatcttggcatgatggggtgaagactgggagagtgattgagatcaaggtttagagagacactgagagggcttctgcaagggagtggttggacatcaggaaggaatataagggaggggaactgggagtatgtggagttatctaaaggagtacaagtggagtaggggcagggactagccagagtaaaggagatgaaacggacagaggcctcttatgggaggtggtggccaggtatggagatctgagagccagggaagtgtgggttctgatttgggagctgggtcagcaggagtgtccattggaggaaatagaggataaaaactggaatggtgccccacaagtgtgagtcagggaatgggggtgatttgggggacaagctttaaaaaatggtagggtagcctggaaaaccaaacgtggtgagagatggaccctgaaagttattgggaatggtgtgatgaggaagggttagaatttgagtcagggctaactagagtgtcaagggacctatgggggcaggtgagagtgtggagagatggctgggtagacagcttccaggccacagagtaaagtagaggtgttaaggagaggatatggtgactttgaaaggagaggtggcttggggagtctaagttttggacaccattgggagacatttgagtgactgtggtcaaacccctagatcaaggtttggagtctgtaggagaaatgggggaaactggaacccagagtggggactgttatagggatgaagagggaagacaatggattggggtaatgaaggaatgacagagatagggacagactgaagggaccagtggccagcaagttgaggggcaataggaatggccggtctggagcaggaagggcgtgtgtgtgggaggaggagtagatagaattgggaaaatgagcagcctgaacagacgcagggagttggaattggatgggtggtggaactggggctgggggatagtgaggggtctgttcctgtggctctttgtagaggtggaggagactgcaggggtggaggtgtatggaggtagggatggaggtggacagggggagctgggtgtgaagcttagggaaaggtgatggctgaggggaagaagggaactgagagatgctgggtcgggtgatggaaggagatgaaaggtgggggaaggtgaccaggccctctggcgggaggggaggttgggtcccagtctggccgcaagccgggccgtgggagggagacaagctgtggatcctgattataaatgcagcttctgctacccccgtgacaggctcggagggagagaagggggtaagggaggtgggaggttgggaggaaagcagggagaatggaggaactgaaggtcaagggaaaactggattcaggaagtagctaacttctgaggagttgcagaagagctgagtagggtttgggagaattctccggaaggtgtttcaagacaaatggagggagaaaagagggtgggacggcaaagaatgagagagagagactgggggagagaagggagagatccagtcaccaagtgtggaggggccggggcagaaaaagtgggcaggcttagggggaaaaggaggcccgcccttcctgggaggaggcggaggggggaagagggaggggaggggcggcgtgggccagggaggtctgacacacccccacctcccctagatacaccccctactgatccgggaccggaggagcgagtccagtcgcaacaaactgctgagacgcacagtctccgtgccggtggaggggcggccccacggcgagcatggtacggcggccgagcaggctctcatgacccggacaggcgcggggagagggctgaagatggaccgggctggcggggcgggggcgtcggggagcggcgggagctggccgggggcgggagaaggcggagacaaagtcttgcttcccgaggggagatggcgccctcctctggaaggtggagcgggacaggggctgtgggtgagaggcccctgtgggtcctcgctcggcttcgctccctttctcctctccagcagtgaagtttgactattttcctggtgcttgtaaaaatagtctccttagatctttagcttccagtccgtgtgttcctgcccctgcccctcccagcccctggtctgggatcttggaaagaatgacctagttcctgccctccccccagacctcttccccacccctatgctcctgattcttcttccggaccttcagtccttgaggtctccttttattaccccctgttttctcctctcatcagctgcttctattttctgcaattgtatcaccctttctctttcctccctgatttctcttattttctgtacccctcttgattaccccgtccctcccctctgctcccggcgaaagtccatcagactcccatctcatctcctttctgtctgtagagctatctgcgcggtctgtctctccaactctctccctctctccatctgtctcttcccctccctccccctttctgcccccccaaccccctctttagtcatttaaaaaaagatttttgtcttcctgagaagttcgcttaaaaggtttccatgggaacagtgaggggagatgaaggcagagaacagagatctgcagccaaggtgcagagagacgccctcagcccccggaaaccccctcgtcactgcccccttccacttcatttcccttcccggacctagcgatccaggttccccattcctccaacccccaggtgacccctttttcccaccagctccccctcccttcaggaattcaagctaccagtttctctcccttagagagccagtgacctgtccccatcctttggctccttccagccttctgataggtccaggccctactagccttgtgggccggtttggggaccttgggtgggtgggtgggtggtcagggatgtgtgtcattgtcatggaaaccccataccatcggggtgtgtgggtagcacatctctgtgaggcaaagtcaggtggtggtggagtgtatacagagaatgtgtgtgatgtctgtcacatctgtgtgtatatgtatatgtgtgtatgtcatgttcatgtctggggaagatgtgtgtgtttgtgtgcatgtgtgtacacctgcgtttccaggccagaatggtcacatgctcacagagcatgtttatcatgtgtcctgtggttggcagatctgcccacttattccccatctttctccttatcctgagtcctcagggtctaggggtctctggcgggggtctcccgtgtgttttgggtggggacaccgtgtgtgtttggagttgaggtggcatgtggaggttgctgtattggggttcagtaggggctgggaggggttccaggggcatatgtatttggggggagggcttagtgaaagttgatgggggtgaacgtttagggtcttcaggcagacatggaatgtgtaaagggcatggaggatgtgcagtggacataggggtcgttgggaccttggggacttggcaatgccaaggtgtttgctgaggctgtggactctccagcccgggagaggtcgccggacctttgaggggcattggaatcctgggctcctcctctgctgggtggagccgcgaaccctcgttctctccgcggttttgtgtgtgtgggggggtcctgctcaggaggggatggtgggtggcctggtttgttttgggggtccccttgcccccctcccccgtctctctcgcgctgtctccgggcgacagggctcgtgacagaggcggccacggcagcagcggtcgcctagcaacggcggcggggcccgggcaacggcggcagcggcgggagcggcggcggagggagccgttcccgcggccgtcaccgcgcggccgtcccggccgtcccgggccccgccgccgcccccaccgcgccgggcggcgcgagccgggccgtaccgccccctctccctccgcaccccgcccttcccccgcgcaggggcggggcccctcccccaccggggacacccctggcccccccggggggcggtgcgaggtaagggcggggccgggcggactaggagcgcgcgtagaggggggggcgccgcgcgcgtggggcgggggcgcgcgtgtgcgtgggcgcggggaggggggtggggaagccgcggtggcggcggcggcggcggcagctgctccctccgcatgttctcgctgcatcttccgagtggggggagttatggtaaccggagggggacagcggaggacgggagggtcggggaccggcctcgtgcggacagggtcttgagcacgcgggggcggccggtgtgtgtgggatcttggagcccctggtggaaggggcagcccgtgtgtccgcgtgtgtgttcgtgcccatgctcgtgtctcctgtgtgtcggtgccatgtgcacacgggggcccagttcctcgtgcacacatgtgcagccatccttgtgcaagtgtgtcctgtcttatcttgcctctgcctgtttcctgcctagggggctgttgggccagccacgggcttgtggggcagtccgcggccttgctggtccatgtcacctctgaccctgagcatgcatatccctggctggggctcacctcctgtcaggcttctgtgtgtgggaatgtgtggccctatgagcaggattttctgtgtccctggtggcaggtgtgtgtctttgcatgtgtgttccagcactggcctgagtatctgtgtcaatcccagcatgggtgtccagggcgtgtctggatgtgggtggtgtggctggggggagtaagtgtgtgaatgtgttccttggaattctactgtgtatgaaacacctttgggctgggcaggtgtaagccctgcttggtcagtaagtggggacagaaaagcttaaaaagggaagaaatggggtaaagaggaaaagtggggaggggataggagagaaggaatgagagaggcttgaagaagagagcagagagcagcaggccagggagaaagaatagctggagaatgggaatgtgggagaaagccaagccagacttagaagagagaacaggggataagagcttaagatggggaactggatagagatggtgggagaagaaggggtctgggagctggggaggcagtggggaggagagagtcaggccttctggtaaagtgatctctgaaagaagaaagggaagaagatgggagaaggcactggattcttgtaggccttgcaggatcaggcttggttttggatcagggaaggccactcaggcatacgggctggctcacagtgaggcctgtcatagcagggactgtcattagaggttcatatccccagcacagagctctgtctcccatttctctgctctgtgtccaaccctgttcttcgcccttctctggcaacctccctcctctggctccccttgagagctgccagctgggtgtggagaggaagaaaggccaaagggaaggttagggatttggagggcagggggagattctgtgggtgatggcaagattagagatgttggaggggcaggagtccaagcccttgctgtgtgtgtgtgagtgccattgtgtgtgtacacagggtgtgtacatgtgtgggtgtgtgcacaatgcctgtgttacgggtttgtgtaggtggctgttatgtgtgtgcatgcgtgtatacatcgtgcaggcatgggacatggagacccaggatcacagtttgtgcttttcaggtttgctgtgtgtgtgtgtacacgggtgtgtgttgttttctctgtacatgtcactgcatgcagcattaataacaggatgttctgtgtttctgtcactctgccccccctttcctctgtgtttctgctattcttttcctgcggcaacaaaagtgtttaataagcatatgtgtatgtggcctctgtgtacctgtgacttatgagtgagttcatggatcttagttcttggtaatatgtgtaaggttatattacttccaagaaccaagcaagccaattagcaaatttgttcttctgttaatgctttagttccaaagcggaattttaatgcatttaaagttagactttatgcctttattagatgagcttgcacatgaaaataatggctgagctcggttccctgaaatgagagtgaggcagccatacctgagaaatgcagaaaaaatgttactagggaagagatatcctgaaccattggatgcattgcttagtgtgtaccagaaggataattaacacatttgctcctggtttttctttactctggtggcaatctcggatgcctgtgttagagtgagagaagggctgggggaggaaagggggttgtcctgagacagagtggatgtggttgtacttttcacgtgaatgaaaggatgtttgtgcttctgagatatggggatacctttctgtggtcaggatcatggtgtactcaagcatgtatttcaggggttaaactggaattcccctgcatggggatatgtgtgtcttagggttataggtccatttctgtagtgtgctgtccacatgattgcccaagagacttgggccacaaagtccacaccagcagctctcatgtgggtcactgggttcaagtatgtactcccttgttgcagagctcacatatgtcaaagcatgtatcctgtggggtgtgtgggcctcagggtctcagaatgtggatccgtgctatgcccgtgctcacagttgtctgtatgtctcaaaagcacatagatccccagttatttttctgtattgtggttctcatatacacgtacctccatagctcagtatatgtttctgtactatacacctgttcctgagggagtgatagggttctcgtgtcatggggtccacatttttgtatgcaaacctcctaacacctgggttttacaggtaaagggaagctgaggactgattctagggcagtttgcaggcaatttgcaattctggaagcagacagtgaaaatataattgtggtcctcccttgttctgttctggaacctagagggttaacaggcagctcttccggtccacccccctccttccagcctgtagcttcttgttgccgtggagatggtggccccgccccgatgcagcacctgcccccccattggctgcagtggtgactgtggggctgaggggggagcccaggcctgggcagccattctggagctggagccggagcttggcatccccccacttacattctcttccagcccctcggcccctctaaattcccttgcagccgagcctcagcttcctttttcagcgcttgccatccctctaggctcttggcagactgagctgcatccgcattcacctcccctcctcctcctttccctatccttacttgggagtcccgagaacccccactgtccatccttcctgctccctgcccattcccctgcattctttgcttttcccctccccccaccaaccttctgagcccctgccactgcagtgcacgtggaaccggctccttctcccttccccccacctgccccttccttggattttctgtccccagcttctccccctgctactcttcacaggtctcttccaagacctccccctccagtccagggagggggtcatgggaggcagccctggccctccagacagacaggggttccaggaggtggggggcaggtggaagatgtgcccaccagggggaagaggaaagcctgcctatgggcaatgacctttaacccatctttccccccagctagccccttctggggtgggtgggcaccagggacctagcctccctggatctttggtgtccttcattactggggttttactgaccctctcagccatgctcccctgctgactgccagccccagtcatgggcctaaggcctcccaccccatccccctcagggggctcctgctcaggttccttgccccctccttcccgctgccagcctctccgccgtcgctgctcttcctgctgctttccggggggtaggtgaggccggagctgaggggcagagggaggtgggggcatgcactggggtcaggggtgggaacctgggttaacagcttcccttctggccccctccccaacttcccttctggccatttcctcccctccagaataccacttgggtcgctcgaggaggaagagtgtcccaggggggaagcagtacagcatggagggtgcccctgctgcgcccttccggccctcggtgagtggtgcctaccagatgtggctcagttgggccccctcccctccagccccaactggggccctaggagtctgagaaagagggcaggagggggagagagggagtgagagtgagaaaaagagtgtgtgtctgtgtgtgtctccccacctctttggtttcccccttcttggctctgcccccctgcttctgagaccagccctcccaccttctccaagctgtgtgtgtgtgtatatgtgtgtgtgtgtgtgcttgcactgtacccgtgggagcaaggaagacaaactggtattagggttcctatccccctttcctcgcctctggagacttcccttttccccatcccactttcatccaggggctctctaccagctgagggatgagtaggtagaactgaccctgccccaacccaccccatccccatttcccccccagcaaggcttcctgagccgacggctaaaaagctccatcaaacgaacgaagtcacaacccaaacttgaccggaccagcagctttcgccagatcctgcctcgcttccgaagtgctgaccatgaccggtacaggggctggagcatgtgggatgagattgatgtaatgtagggtctcctgtgtgagatgcagagggagggggttatctgtgtgcaaaggttgaaggattcaactcaagttggttgggggatgtcatggcacaggggacagaacagaaaagaactagaatagggatctgtgagcagcaggagaggggtagggtggcagagagaagacagacagacaggctggaaagggaatgaaggtgaagccaaggagggactcctcagggactcctcaggccaagaaggatgggctctagcccaggatcaaaggagctgtacaggaggagagtgaccctggaggaatgtttaaggaatgcagggaaggggttggtaggtgagtgagcaataggctgtaggtggaagggtgtcagggaaggtcaggaaatacaggggcagcaggttggagtggggctgggggtggctgaatgaatggatgatggctagggctcaaggacctcatcagtgagggaagagacagtatagagcatggcagagaaggggaggctgggacaggtgtgcagggtgacagaatgggaagcaacccatggactgaggcatgaagaagcagccagcggagaagtccagaaggcactgtccctgagaccaggctgaaggagacctccactgtttgcctttgttgcctgccatttggggttcctctctgggtttccccctcacccagtcactccccagggagaaccatgccctccctttcccccatgtctggccacccccaggattgggcaggtagggaggttgggataaagtgagtcacacctttccctgcccccctcccatgttgccagagctggatttggggccggcagggggtgagggcatggtattcctggccgcgggggcgggggggggggtccgggggccgggggagcgtcgcgctgacggcagccagagcctgcgatgacggggctgctataaataacttcttggaggctcccacacccaagctcccctcccgctttcccactgctctctactcttcatcccctgcccatctccataccgcttttgtattgctatcctacccctcattattccatgcccctagccccctttatcttctgccctcctgcagtgatttttttgcattccatcccctcttagccctcacctcggttctcccggccatctctccagttggccttcctcctcttctcctgtcctctgtcttgctgcacatacctttgtctccccctttcttcttcttgccctacctcctcttcttccctagtccgtgtattctgtcttttatcctctttgagctcttttctgcccacagctttctcctatttcttatgcttttccctcactctttcccctgcttctgctaaaacttgtcctcttatgctgtgttcattcattctttgaatcattaaatgtttatcaggcactagccgtgtgccaggcccaggctagacatatctcttctctgtgccttcacttctttacttccactttttcctttatactgaggctctggtttctggggttacctggaggtactacctagaagtgccccaggcccactttgttctctccttttttttttttcttttctgccatggtccatttctgggttgagatatttctagatgtccccagtcctcgcaatcccttaggtgtgagatggtgggagtttcttttttttcctttttttttttttaaatagaaatagggtctcactgtgttgcccagactggtcttgaactcctgggctcaagtgaccctcccacctcggcctttgaaatgttgggattacaggtgtgagccaccaggcccaggtggagcaggggagttccttaaaggattctgatttttctcacatccctcacgtccttcctgataggcagggtttctttctgtgtctgtttgggaagggtgttcagggggccttctctccaagtctccatcctggaacagactgatgatgcagggtacctatgtgtctaagaagagtaggggggccgggcgcggtggctcatgcctgtaatcccagcactttgggaggctgaatcacttgaggtcaggagtttgagaccagcctgaccaacagggtgaaaccccgtctcagctaaaaatacaaaaaaaaaaaagaaaaaaaaattagctgggtgtgctgaggcaggagagacgcttgagcccaggaggcagaagttgcagcaagccgagatcacaccactgtactccagcctgggcgacagagcaagactgtctcaaaaaaaaaaaaaaaaaaaaaaaaggaagagtgggaagccctgatcccttcctctcctgaacctcctgcctgccagggcccggctgatgcaaagctttaaggagtcacactctcatgagtccttgctgagtcctagcagtgcagctgaggcattggagctcaacttggatgaagattccattatcaagccagtgcacagctccatcctgggccaggagttctgttttgaggtactgggtctggtgggctggggagggccaaaggacaggggtgatggaaggtggggggcagagaggtctagagaaagtggcacaggtggggacatcaaggaaacagaaacttctgggactggaggaaagggtaggccagggaggaagagaaggtagcagagtctcctcccctctgtagccctttccctcaactccacactcctttctaggtaacaacttcatcaggaacaaaatgctttgcctgtcggtctgcggccgaaagagacaaatggattgagaatctgcagcgggcagtaaagcccaacaaggtattggggaataaaggggacacaacctgtgcagggcaaaggttgcaccaacacgggaagctgggggcctagggaggaaagtgagttaaaggaggagaggcttggggaaggagaggattgaggtacagtgtatctggacaagcagggggagacccccattattctgagtcccccatttcttttcgctttctgtactgctaccctgccttacgatctctttccctgccatagaagtcatagacttacagagttgatggggctctggaaattctttagtctagcttccctgcaggcaggaatgcttcactaataccccgcaggacacatcaaatacacttagccaagtttctgtaccttggtttcctctctaagacagagggaactggtggcaatgggttggattaaatgatctctaaggtccctttggcacataaattctatgagtctgttcttcccaaaacttcatgcttccagttctgtcagctattctctgtatcccagtttctagcaagcttacagtcctagtcacactcctctggggggaactcttgtgtcttgatgtccttaaagaactcaacccaagatgctgacatgatctgacctatgcagagtacaaacaccatgttccctttcaacacactgcaatatcacctgagccttaccattagcttgtgctcaattgtatccccccaggcccttactgattcttttttttttttttttgagacagagtctcactctgtcacccaggctggagtgcagtggcgtgatcttggctcactgcaacctccgcctcctgggtttaagcaattcctgtgcctcagcctccccagtagctgggattacaggcatgcaccaccacacccgactaatttttgtatttttagtagagacgaggtttcaccatgttggccaggctagtctcaaactcctgacctcaggttgtctgcctgcctcagcctcccaaagtgctaggattacaggcatgagccaccacatctggccaagctttacccattctatatgcaattcttttttcacaatttctgatagtctctgcaggactttccagttcccttcaaattctacattaatatttttggcttgttattccagcttttgaaatctttccaatactgtttgtgttgtctagtgtatgtctacgcttctacagtagcttcctggggctgctataacaaactgctacaaactgggtcacgtaaaacaacagaaatttattctctcacagttcaggaggctggaagtccaaaagcaaggtatcagcagggccacgctctctttgatgctgtagcagggaatccttccttgcctcttcctagcttccggaggttgccagcagtccttggcattcctgggcttataactgcatccgtctaatttctgcctccatcttcatgtagctggcttccttctgtgtgtctctgtatcctgtatctctgtgtctccaaatctccctctccatataaagacaccagtttttataaggtgggttaagggtccactctaattcagtatggcctcttttttttgagatggaatatcgctcttgtttcccaggcttggagtgcaatggcatgagctcagctcactgcaacctccgccttccaggttcaagtgattctcctgcctcagcctcctgagtagctgggattacaggcacgtgccactatgcccagctaatttgtttttgtatttttattagagacggggtttcactatgttggccaggctggctcgaactcctgacctcaggcaatccacccacctcggcctcccaaagtgctgggattacaggaatgagataccatggctggcctcttcttagtttgattacatttgcagggatcctgtttccaaataagatcacattcacaggttcagggtagacatgagttttggtgggatactattcaacccagtacaccgtctcaccttatgattgctgtctgtatcccactttcttactgtctctcctcttttggtgtctctctgtcccttccccctttaacatcatgcccaccccaccatgccaggacaacagccgccgggtagacaatgtgctaaagctgtggatcatagaggcccgggagctgccccccaagaagcggtactactgtgagctctgcctggatgacatgctgtatgcacgcaccacctccaagccccgctctgcctctggggacaccgtcttctggggcgagcacttcgagtttaacaacctgccggctgtccgtgccctgcggctgcatctgtaccgtgactcagacaaaaagcgcaagaaggacaaggcaggctatgtcggcctggtgactgtgccagtggccaccctggctgggcgccacttcacagagcagtggtaccctgtaaccctgccaacaggcagtgggggatctgggggcatgggttcgggagggggagggggctcggggggtggctcagggggcaagggcaaaggaggttgcccggctgtgcggctgaaagcacgttaccagacaatgagcatcttgcccatggagctatataaagagtttgcagagtatgtcaccaaccattatcggatgctgtgtgcagtcttggagcccgccctgaatgtcaaaggcaaggaggaggttgccagtgcactagttcacatcctgcagagtacaggcaaggccaaggtgagtgttgtgccctcagggaaaggtgacttgggaatgggcacttgcttgggggttagtgaggacagggcaaattcacgagattgggttgtgcagaggctgacacttggattttcctgggcctcaggacttcctttcagacatggccatgtctgaggtagaccggttcatggaacgggagcacctcatattccgcgagaacacgcttgccactaaagccatagaagagtatatgagactgattggtcagaaatacctcaaggatgccattggtatggcccacactcaggccctcttcttcccaaacctgccagatgtccaccccagaccccaagtccacccttccacagcttgatacttcctaacccagagtcctaggactccagcctccaacacctgattctgaaatttccccaaccctggccacccccttccctgcccttggaaagtgtgaccacaccctcttgtgcccccaccccccaggagaattcatccgtgctctgtatgaatctgaggaaaactgcgaggtagaccctatcaagtgcacagcatccagtttggcagagcaccaggccaacctgcgaatgtgctgtgagttggccctgtgcaaggtggtcaactcccactggtgagactgggaacgctgggctggggggccagggtcgggggaattatgtgttcatctgttcatctatctgtccatcctcaaagaggactgagcaccatttatgggcaaagcattgttctaggcgctatagagcaaacaggtgaaagaggcctggtccctgccctcagagggcctccaccagaatggggacaaattagaagaaaaaaaaaaaaagccacagagccataatggtgtgtaagtgctgagtaagggtccccccaacctctgtgtgacataaggtcagagagaaggcagagctttgagataagtggggaagaggtgcccccttgggtaggctttgaagactggtttaggttctgatatatggacatagttggcaagaaagacatttcagaagaaggctgtgagaaaggcacatgtgtgatggtgaaaaggcccaggagttttcaggggacattaaagtaggttagtagcaattacatcaggtttagtggagcatgtgcctcataatggggagtggcgggagagatgtctgggcaggaagattagctttagaaactggaaggcctcaaggagtctgaggtcattggtaggccttgggatgccattaaaggtgtcagaaatattgtgatttagaagattaatccataggctgggcacggtggctcacacctgtaataccagcactttgggaggctgaggcgggcagaccacctgaggtcaggagtttgagaccaggctgaccaacatggagaaaccctgtctctactaaaaatacaaaattagccagatgtggtggcacatgcctgtaatcccagctattcgggaggctaaggcaggagaatcacttgaatctgggaggtggaggttgtagtgagccgagatcacacgattgcactctagcctgggcaacaagagtgaaactccatctcaaaaaaaaaaaattaatccataagtagagtgtatgtagtagagtagagggatgtatgttgggggatgactggaatagagccagctgggggctcggaggcatgaaagtcagatcctgaatcagaacagtgacagaagttaggaaggagctactggaaggaccctctcgggaaaggatcagtaggaattgtcagcttattggaaaggagggagcatgtctgtggggagtcacggatgactcaagaggccatgaggctggtggttgggagaccggtggcctcattgacaaccaggaaagtcaggaggaggagccagttggaggtgtgggggcgatggtgagctctgctttacaccagccgagtttaaggtgtcagtgggacattgaagtggaactgggaggtgcggggagtgagctctgagccattccagggactggggatcatgcctggggcacctccatccccatttccctggaatccagaagagttggggggtccgagctccctgtacctcaagtgaccctccatctctctcccatctctgtctctccctggtgtctgtttttcttctcctcctctccttgtctctctcccacacccctccatctctctcccacgtgtctctcccctcaccttctctccccctccatttctctctccctaatctgtctgttccctctgccatggcccccttcttcaagcagcctcccatcttgctcctgcggtccctccttccctgtctctctcacccctgtttccacaccctcacctcctaccacccccctcagcatgttccctggaagctgagggtctctggggctcagtcccggtctctctctttctctctctctctctctgtctccccgacccttccccccagcgtgttcccgagggagctgaaggaggtgtttgcttcgtggcggctgcgctgcgcagagcgaggccgggaggacatcgcagacaggcttatcagcgcctcactcttcctgcgcttcctctgcccagcgattatgtcgcccagtctctttgggcttatgcaggagtacccagatgagcagacctcacgaaccctcaccctcattgccaaggtcatccagaacctggccaacttttccaagtgagggaagcttcaggagtgggcagggcagggagtggcagggcagggagtggcagggctgggggtcggcaagaagggtctcctgagtccccagagatcctgagatggggaggctatgataccttgtgtgtgtgtgtatgtgtgtgtatgtgtgtgtgtgtgtgtgtgtgtgtgtatgtgacctttatcttctgcattcttggctaggtttacctcaaaggaggactttctgggcttcatgaatgagtttctggagctggaatggggttccatgcagcagtttttgtatgagatctccaatctggacacgctaaccaacagcagtagctttgagggttacatcgacttgggccgagagctctccacactgcatgccctactctgggaggtgctgccccagctcagcaaggtcagcagatcccctctttgccctatccccagatggctccagaggttcctggagcctgagaaactaccctttgaagattttttttctccccttgtttctcgaggtgtcaccactactatcccaactcaggccccctccacctgcaccctcagaggccctcttagagctgggcactgagcccccaggtaacagcctcacccttccaggaagccctcctgaagctgggtccactgccccggctcctcaacgacatcagcacagctctgaggaaccccaacatccaaaggcagccaagccgccagagtgagcggccccggcctcagcctgtggtactgcgggggccatcggctgagatgcagggctacatgatgcgggacctcaacaggtgagcaccctgggacagccaggcctgtgccctaggagcccttctcctattctagatactcctcactgggccccacatgcatctctctagggcttgaaagaagggaggaaaaagcaccaagttctcaggggagacgataaggagacaggtacagtcagtggtaggctgagagccctttacagcctgagggagtgagagatttggagctctaggaatagggctgaggctccaccaactcacggcttagttgtaagcctagagcatccctgctgcaagctctgatttgctgtccctctgcctgcccatgctagtccccaggctgaggttcagccagcatgtcatgtcagccatgtgtcaaaatgttcaaacatctcagtaatagctagtgaataagcacttcccccagcccccgaccacaaccccacagacctccccatgatccagcacttagagcagtgacagcagaagcctagcagggcctgcagcctgctccagagtcccagcctccattctgataggtggtgcccgtgcttcatttgctgctcattattttgatgatggccctgctttttcctctgcccgtgtcttcctccatgacaccatacccatcccaccattcccgcctctcctttcatttgtccacatctctctccttctctgtctgtgctcgcccctctttccatctctctccagctccatcgaccttcagtccttcatggctcgaggcctcaacaggtgaggggctctcccctcccccgccctcctctcctctcctgtctgttccctctcccactccactggccttcgccctactcctctcctctcctcctccatggacctcatctcctccatatgtgcccagccctgcccccatcccttctcttgctgcccccatctcccctcctctaggcctcacccccttcccggaggggccctgtcctttccctttactcacctgtcccctcccatcctccctgcctgccctcttcagggctgccaccgctagctctcagcccttccctctgggtcccacttttcaccccaaggcctgtgccagaccacagcaaggttcaattgctaggagccctgaccttaccttctgcttgtgtgcccccttcccttctgacagctctatggacatggctcgcctcccctccccaaccaaggaaaagccacccccaccaccgcctggtggtggtaaagacctgttctatgtaagccgtccacccctggcccgttcctcaccagcatactgcacgagcagctcggacatcacagagccagagcagaagatgctgagtgtcaacaagagtgtgtccatgctggacttacagggtgatgggcctggtggccgcctcaacagcagcagtgtttcgaacctggcggccgtaggggacctgctgcactcaagccaggcctcgctgacagcagccttggggctacggcctgcgcctgccggacgcctctcccaggggagtggctcatccatcacggcggctggcatgcgcctcagccagatgggtgtcaccacagacggtgtccctgcccagcaactgcgaatccccctctccttccagaaccctctcttccacatggctgctgatgggccaggtcccccaggcggccatggagggggcggtggccatggcccaccttcctcccatcaccaccaccaccaccatcaccaccaccgaggtggagagccccctggggacacctttgccccattccatggctatagcaagagtgaggacctctcttccggggtccccaagccccctgctgcctccatccttcatagccacagctacagtgatgagtttggaccctctggcactgacttcacccgtcggcagctttcactccaggacaacctgcagcacatgctgtcccctccccagatcaccattggtccccagaggccagccccctcagggcctggaggtgggagcggtgggggcagcggtgggggtggcgggggccagccgcctccattgcagaggggcaagtctcagcagttgacagtcagcgcagcccagaaaccccggccatccagcgggaatctattgcagtccccagagccaagttatggccccgcccgtccacggcaacagagcctcagcaaggagggcagcattgggggcagcgggggcagcggtggcggagggggtggggggctgaagccctccatcaccaagcaggtaggtgaaggcaggaggaaggcgggctgggtcacaacagggagggaagaaggagatggggggtggggttgaaacagagtctgtggcctgaagttacaatcttcttgcctccttttggccattaaacaaatgtgtatagagggcctgctatgtgccatgtgctatgccaggcactaaggatacggcactgaaccctcttagcactctcattccagaggggattaatccataagtagaatgggggtgactggaatagggccagctgggggcttggaggcatgaagatcagatcctgaatcagaacaacaggagaaattctctggcattcaactcacatctctggcattcagaggtgataaaggctacagcagggcaataggactgggactgtcgtctcctttggctgtgctgttgccctctaaatgtaccctgctttttcccaccttttctttctctgttcgccctcactgtgccttgtcccagcattctcagacaccatccacattgaaccccacaatgccagcctctgagcggacagtggcctgggtctccaacatgcctcacctgtcggctgacatcgagagtgcccacatcgagcgggaagagtacaagctcaaggagtactcaaaatcgatggatgagagccggctggatagggtacgatgggctctaccagctccaagccccagtgtttccttttacccacaggggagatctctagtcacttccaagggaaacctccagggtcagttatggtggtaagaaaaggcaaagacctgatcacctcttgagaagccttccgtccatctggggagaccagatacacacagttgttaaaagtcactttcaactctattttgtaggttatatatatcatagactatctggggatcatctattttaggcttacctccatgttcttccccaggaggaacataagccctggctcctgtgactgcttaggaaaggaaatgttactttactggcagtaggagctaataaattggatggggatggagggggttgcagctatattacaagtgatgtctggcctacccagtcactgtcccatgggcataagtgacagtcagtgggcagggaatgcatgtggtaaagtagtatgtatcagtcatgtgtgaaaagaccatccagaccctcacttggtggaggctgagggcaaagggcaccaagagctctggggctaacacagataacttagcagaaagttacttgaggaagctgttgttcctagggcctgaggaagagggcggctgcaggattaggtcatatataaagaacatatgatcctaacacggggaagtggtctttgagcataggaaatgttgggactgactcagatgggcttgaccagcaaatttaatgagaattaaaccctaatattagccccaaggcagccaccgtaggaagttaattcacatctctcctctgcatgtagaagggttggtgatatatgtatgtatcctcttcagagaatgaggaaatagtcttttgaatcatttttttttctgtgcttcagatgaggaaaccttgttgagaaaggctgtagactagcactatccaatataactttctgcagtgatgaaatgttctgtaatctgtagtgttcacatgtgtctagttgtgattcaggaactgaatttttagatctatttaattttaattttgtaatttttttgagacagggtcttgctctgtcacccaggctggagtgcagtggtgcaaacatggctcgaggcaacctccgcctcctgggctcaagacatcctcccacctcagccccctgagtagctaggactacagggtcgtgctaccatgcctggctagttttttttcttttcttttttttttttttttttttttgtagagacggggttttgccatgttgcccaggctggtctagaacttgtgagctcaagtgatctacctgcctcagccttccaaagtgctgggattacaggtgttgagccactgtgcctggcctaaattttaaatagctacatgtgggctggtggctaccatattagacagcacagctgtagactctagagccaatagggcagataaaatgactcttctgagctcttccagctctggaattcctagattctcagcctagaattcacttgtagacctcctatccttggcaccttgacagagccaaggagagggtcacatggaggacagcacctgcctttcccccgtcaattgccttttcttcctatgtctccagcatgtgttctggggcctggcttagggctgaagagtcaccctatttttaatttctgagcacagttactcaaggtgtgtttgtgagtgtaggtttctgtgtgggtcttcatgaggggccatacatagacctcagggtgtgggagtctgtgaccttgctccattttgagggaacctcagcaccatggcagggtcttctcaaaagcaggtgtgtggatatgatccacaggcagggaaggggttggggaaggcagctggatgtccctcaacatgcagtggctgtgcttggcagacagggatggaggctgggtggtgggcttggggtggggcgcccctcatagtgcggggtcgtgtgcccggcgggcaggtgaaggagtacgaggaggagattcactcactgaaagagcggctgcacatgtccaaccggaagctggaagagtatgagcggaggctgctgtcccaggaagaacaaaccagcaaaatcctgatgcagtatcaggcccgactggagcagagtgagaagaggctaaggcagcagcaggcagagaaggattcccagatcaagagcatcattggcaggtgaggggcggcctggggagggggttgtgagggagagcctgaggctggagagagcaagtgggtgagctactccgctgactcccatccccaaactcaggagcccaccaggagagcccaccactctcctccccaggaagccacccactcactcatcaccagatggagagaaaccccaacctgcttagtgcattaaatatctctttaccaaaccctgacctctcttctgatagagtagcttcggaagcccttggaaaatgtacctgttcctgtccaaccatcactgcatttgcatttaccctaggccagagctccccactagttattctcaacttaacctgtgatgttcactccaaacctaagcagggctccctagccagagtaggccctgcccttcctgggtggaccctccctctctagccttggaaaggtgttctgttagaaagggtcttttagcctgtgtatgttttcagctgctccagcaagtcctgggctccaaagagggtatcctcagcaaagaggtcaattatcttcagagtggtggggtcggggtgggggggaccctgggcgcactccaaccagagccacctccattttgatccattctaaatgtattttatgtaagatttaattagaagaaaagggcttcttgaaatattttttgaaaaccactgctctaattgatatcctttatgataaatcacctcgaggatcttcacagtgaggtgacatgggggatgcagaagccaggtcctcagccatggaaggtctggggaaggggcactgctgtcctgattgggacgatggaggcctggaggtgtctggatggtagaagtctttgaggcacagaaagctgccttagcagggaggtgtaagggttcctgggaggaaggtggagagcatgatcctgaggaacagggagtcttgcatcacggcaatggagggactctgattctaagggataaggatgcctgaggtttttccagagagctatggggttccatgggcaggctctgagcctgtgcccgccactaaccccactgaagcccgtcccttcaggctgatgctggtggaggaggagctgcgccgggaccaccccgccatggctgagccgctgccagaacccaagaagaggctgctcgacgctcaggtggaaattacaatgtcatttatcttctccgtgtcccatccccatccatcccactgtctttcgtgcactcactacaccagccacctagccccatcaccatctgtctctcatagtctgctgtttgtccactggctgctcctggcagccccctagtgaccccatcttcatcccatcgtctgtgcctttgtcactcctggcagcgtcagcccaactcctgtgccttcccatccagtcttcccactcctctctgcatctcaggaccttctctaccagaaccttggtctttctgcccctagaccccacctagttccaagaacccctgccccttctttgctcactcctattcaagccacgttgttcagcttcctctgcgctcttgggccagagggctagaagctgccgttttctggaatagagcacagggcagtatgatctgtagtttctccaggccctggccggtaccctgaaaacttggggacccatcacctctgttctcttggctccctaattttcctgtctccttggcagctcctgcatagcttcctcttcctgactcttcagatcttgaaggccttccatcctgtaacctccctttgccctcagtatttaagtccagcctccctctggcctccctcccactctggccctcagaccttcccagctgcctgctgcccagcctctcttctcacaagccagcttctaggacctcccttctgcacccttaccccttgctttcccaaaattctgctcattttcctacccatactcctctttgctctgactgctaggctccccccgcctgccatccccccaccaaggctcctgaccccatgaccccactctctcccactgcagctcctcatcaggtaattctcctggttccgctttggccacgggcggaggacacagggggaggtgactccggaccactgcaggttggtcgtgaagcccactccctccaacacctccggagcctctcccctctcactgctgccctccacacccagagaacctccacagactccagccctccgacacctgcacagatccatctcccaagacaccacccaaagagagcatttgctgctgcttcccagaactgtccaacaataccttagcaacaccaagagttgggccctagatgggcccagcacattcacaggtcacacccacttccctgcaaaacccaccccctcccagcctcctcctgactctaagccctcctcttcctctacctctccagtgtatgtctgtcaccccccatttcaccagagcgtccttaggggctgggggtgggtttgttaatggggtggaggcaatgatgggttggaggatcttggctataggggctgtgctgactgcagcaggtaggttgggtttccctcttccttccctaatcttggttctctaccctcctttccactcctcacctgattctctctcttcctcctccttatatctgtgaggcagaaggcatctgaagctcatattagcccccattgggtgggaattaggagtgggtagttaactcagggagacttgagataccctggaaaaaatgctattgagatgtcctgacattaggcagggtggatggaacaagaaggagcaagaaaggaacctcaggcagatgttaggacatggacttgatcatgtggcctgggagtttagaaatggggagagacatcctcctagatcagatcgtgggctcagtaggcatgttgattcccagggagaggtgccaggaacagcatggtaaagaatgtactcttcacagctcacatccccaggttgctgatgccactcactccccctctcctgccatcgagtggccttgccggacacatcaccctacctaaaaagccagtaaatgagaacctgtcagctatagccatcatttctgagatgcgattttctttgggattgagctgcagtgggcagtggctccttacactgtaattttaattctctgcctgcccagcctctctgtcaaagtagctggtgatctataaagatgctaaaaggcaccaggggactttgccatttaaaggactcctgcagtgaattcttttgtaaaatgaataatggcaccctaatttatccactttctaaatttgggtccatgggggtgtccagggcatgcttatgtgctgtcaccagcagacaaacagagggaatggaatctgggggttccttccctgctctcccgccatactcaggataccctaccataagtgatttcctctcactgacttgcagaaaatgtgtgagatacccagcaagctaagaaggcagttttgctgggtatctcatacccaaggctggggtttgggtgatctgagaggttagctccttgatcctaggatggaagggagagcttatatagaagcttttacttggaaggttttgtatcctaaggtcagacatagctatattaccaagcctaaatgccatgtggcccaggaaataatttggacatttgttctaaaccacttgtggtaggtattggtctctctgcaactcagccattaattagaaattagttttgagcctgaattttaaaaagccaagtgttgcccccagcccacacacacacacacggacatgtacagtacaaaccccagataattacaacagccaaagagagaaggaagtgaatttcccaaccagaagcgtagggaaattcagatggctttcttttctcccagcagaggaacagaaggcggagctaagggcaggaaccaggagttggtcaaggagctataggaggtgatgagagtagaaccaggggtaggagctggtctggtacccctcaccctctaattgggagcccagggagaaggactgaaaagaagatgggagtggaaaagaataaagccagtttctgcttcccagggatgcagagattggggcatgctgtgtctgcagaagctcctagtcatttccgccataattgtgagagagaggggcagccctcccacaagatttttcccttcccatatcacttccctgaatccccttcctttccccccagtacagttaaacctctctctaatttggaatgttatatttgagaagatggccactgtgaataagtgacaaacggaatgacagtgtctatttaatgaaatgcatgtcttcaaaatatatacagaactcgatgaacaaggctttttccactcctcagggagcatgcattaatgaatagataggattcaaaagtctgttttctggtatgggttaaatatcccctcctacagacatatttccaccactaatttgcttagtacaccttttcttcacagataaaggaaaatgcaagctcagtttttcttcagattatgaagaaattccaaatccacaggggtttggattaatgaggttttgctgtactgcctccccttattcctcaacatgaagttcccacctcggattggggatgggtgggagggggtttcaagaggaggagggtgggatgggcaaggaatatacacaggtgaagccagagaagggttaggttgggggtgcggtgggaacttgctgttttgatctggtttcctggtgtgacactctgggttaaaggcttgaaggcccctgttaggagtctaggggtgagattctcttctctctgatcccagaggacgttaacttctactgcaggtgagaaacaaaataggaggatggtggggactgtcctgggaggagggggtggtccatggcttgtggtgtgggctggctataggggaggccactgctaggggactggcatccaggcccccttgaagcgtctcaataagtccgcgctctcctttttggtgtcttgcaggagaggcagcttccccccttgggtccaacaaacccgcgtgtgacgctggccccaccgtggaatggcctggcccccccagccccaccacccccaccccggctgcagattacggagaacggcgagttccgaaacaccgcagaccactagcccacccagcatcagagaccttctcttcctttcctgtgcaccccaccctgtaacagcaccaaccaccaggattggacatcaccgaggaacagcgggattgcctccccgaatgcctccctgggaggcacactgattgcccacccccaccactgcaccatttccaggagggagagtggggaccctcagccgcccccttttccttcccattggggtgctgccctctctttgacccccagggacccttgccccaggacaccgcctaccccgtacagaccccttcactccggggtgctatccccatcctctgcctcatcgttcccctgagcactgggggacagaccctcacccccaccctgggggtgtggcacctccaaactttcaacttcagggtgatttttttagcagtaaccagagctgacaatctaactcccctccaccgccccattttggcctcccctgccccccttgttatggggaggggaccccgggtgagggggccctattaccccttgatttctcaggagcgtctgggggggctcagcacgcacaaactccttctccttctaccactcttaaatttactccctccccacccagaacccagatggggtggagggggccaccggggcagggagggggcggcaaggggggaatgggagttgtctccccttctccccacacctgatctgctctcggctggtcccagagcggggtgagggggcttatgcccccccctcccccagtgtgttgggtggggtggaattgaggttagggtgaggggtcagggtttaggagggtgtgtatgttgggaggacaggctagttgatctgtcctactctgacacacagtcccctctgccccttccttctctcttcttggtctctactcccagggggaggggggaacttactctaggaaaagccatgtctctctcccccagggtggggggacctgtgttggaggaggggtgttggggggcccccttccatgactctgtcccctgggggaggtaggacagggctgggcttccctctcatcctccccctcccaatctccttccacctccctccctcccgccagctccacgatttttcggtgtttctctgtacatagttttctggcgggataggggaggtaggatggatggggtttggggtgggtaggccatgggaggggagaagcccctccttggcaccccctcttccctgactgctgtcccctacccagccttgcccccttcatccttttgcgtttggtattgagactctcctagactctactcctctttcttttgtatggacagttccccttcagtcccatccccctacacatacacccagccggggccaaatttatacttatataaaagttgtaaatatgtgaaattttatccctgtgccctttccccacctcaggccctacccctggaccctccccaaccttccttctctcttctttggctgttgtaattatctggggtttgtactgtacatatccggggtgtgtgtgtgtgggctgggggcaacccttctgtacagagcttcctggccccctccccccccgcccctctgcttccctccccacccaccacctcaagggtagggagttgctcttcctacctgttttattttgttttctcgttctccctccccaccccactcccagccttatctatcccccctcactgtccccttttctccactcccagccccatttcctttttttctggagtgtgtggtgaaacagaaaaaaacatgtttaataaacggagattgttctttta

SEQ ID NO: 15840 - DNA, 31662 bp, Homo sapiens
ctctttctccccctctttctctcttctttctcccccgtccccccgccccctccccccaggcctgatgagcaggtctcgagcctccatccatcgggggagcatccccgcgatgtcctatgcccccttcagaggtacgtggtggggggagggggagggccatatggggggcaacagggggaggggcagggggcgggggagagtcggggccgagggaagggagcggctgaaatggagggagaggggaggaccgggaaggcaggggtgggagcaaccgggaaggagggattggaggccagagggataggggtagataagggatggaggggccaggaaatgggccttgaaagggggctgaagggaaaatgatgaaggggaaagaaagcgccagaaaggggtgggaaggtagaaggattgggttggggaaaaagctgcagaaataatttgggggtgggagctgagtgatgaggaaaacatcaaggaaatagagggacagagtcttgggagaggggctaggaaggagaaatgaaaacataggggtgaaaagagaagccaagaagatgtggggggataatttggtgggggactcagagtatggtaaggggcggaaaaagagaggaggatggagggagagaaggggccagatggagagagagggaggcagtggggggtggggggatggagggtccagatggagggaagagagaagagagagggaacggtgggggaggggagaccagggcagggggagggccaaattatgtgtgcttgggggggtggcagtacaagtaagatgaaatgatgggagtaggggacaggttaggatcctgccccagactctgaccctcttaaaggctcttgaccagtaaaatgtaacctctggggtcttaatgctgtcttcacttcatcacttttacccccttcccccacccctccaatccttatttccattccccctccctcctctgctgtccatcacctatatctttccccccatatggtgtccgttccttatatgagtcccccttctgtccttcccctatatcagtcccctctctggtgttcattgcctctctcttatctcttttctatgtggtcgctcccttatatctctatcacttctttactagtccgtcttgaccccttctcatagcctccgcattaggtctgcctcctttgctctgacacatgtccagtcgagcccttcaggtgtattcccttgcccctgggcatttaccatcatttctgcctccttttctatctactcctattatttgtctcccagaccattccttgtcaccacaagtctgtgcctacccactttcccttaatacctcaactcttattatcatttctcttttcttgtctcctctacttattggggtgttggagatttggggtacaaagacacaggttttgatgattagaacaagggatccccatctcagcccttgagggatttctcatcctagtaaaaatttcccgtttctcagccatgttgctctgcctcttgcatctgcctcccagaatcattcttcaccaagtccagacagtatgtgtgtgtgtgtttctagagttgttcctaagttccctgctgccaggagaaagatgccctctgaagtctaacccgcctcccttggctgcagcctgaaccagccctttccccaaatgcttatgtgtatcaacagatttctcctctgggtataccaagtgtctaagtgcggtgggcatgttgcctgcaatgtctgtagtttcagaggctaggtattggtgatctctgtatctagagaacattagttagtctctgagatgggttgagatagagtttcaaagtatgtggtttctaaatggtggacattctgagggttcatcgctcactgtgatctggaggttgggtaaatttgagagacatatttatagacagaaaagggctgaatttgcaaaactctgctactcagtgcattctgttggaatgaagctcaaagaccagttctcctgcagtatactcatggttatcccataaaggtgacagagtttgatcttttttccatctaaaatctgataccttaagcctaatttctagctctttgctgtcgccaatgtgacatctctcttacttcaatagggcctgtgtggcattggggtttaaaggagaggcagtttgcagggagagcggcatggcaagaacaacagagctggggaaggaggaccctggtctcatctcagccataggcgacacttggtctactgttctctcttctcaaagttttgttcccatctccagctcttgtctttggaggcccctctgtgtcaccaggcctggatattccattctttccccctgacatctttcttcctcaagctcctcactgtgccttgagaaggctcctgacctatggagtggcttccatcctgtccactgagactaggtggggtgaggtggtgggggcagtgttgaatctctgggcactgaatgggagaagagataaatttggtctctacttgtccaaacaagggcatatttcccaccttctgccctggggcctccacagccagatgccgacaaaagccatcttctccttaccaccagaagaaccagaactttccctaaaggatgagcagggttgaactaggggaggagggcacagaggagggaagagttgggaggggaggccctctcatgtctctgactgtgaacaggtaagctccccgacttcttcttttctagatatttagccctcagaatctcatgatcccaatgttcctacacacacaccccatccttctttcccacagccatgtagctttcctcatactcttttatagaggggtggtgccaccttccaagtccttgtcttctgcagctatttggatgccttcctctacccagatatctgacaccaacttctctgtttttctcctgccaattttgcggcacctctaccttattttcctgaagtagatggagagctccttcatctttctctgcccccaaacgtgtaccttctctgtcatataattcccatccctgaacctctgcatttcttcccccaagtctccagagccttctgtgatgtgatcctctcctcttttcccctttgtataaatgcttgtcttgtgttcctttagagttgccaggtgtctcactttcaactgtgatctcctgaaggccggtagggtccccttctcactttgtggactctcttcttgccattttaggcctctgcttccaaatgcatagagcctcccttactgtttctgtgtgtctctgtcctccagatgtacggggaccctctatgcaccgaacccaatacgttcattccccgtatgatcgtcctggttggaaccctcggttctgcatcatctcggggaaccagctgctcatgctggatgaggatgaggtgagtgtggtgagaaggctgggaaaacgcatgtgggagaatggggagagtcctcattagtgaaggggagagagacacaaagaaggcagacaaagaagaaacatttgcaaatggcaggagggtggccattgagacttgggttggagtgtgacaagaggggtagtcattctctcatcttgggcagggagtctttgagggttatgagctgtgttggggaggagatgtggttctgaagatttcgggggtggggaggctcctgttttcacactgtccatattgtaggataggttagaatggggaaggggaactgaagggtttggagaaggggtgaagacatggaaggccctcccaaccaaagcaatcctcaggacccctctctgctttgcccactgagcaagactcccagtcctttctccatcagggggcagagtgcaagaagagaaattgcaggacgcagagaaaaggcaggggatagaggaggttttaggtagctggaggatactgggaaagaagactgaggtcagtggatcttggcatgatggggtgaagactgggagagtgattgagatcaaggtttagagagacactgagagggcttctgcaagggagtggttggacatcaggaaggaatataagggaggggaactgggagtatgtggagttatctaaaggagtacaagtggagtaggggcagggactagccagagtaaaggagatgaaacggacagaggcctcttatgggaggtggtggccaggtatggagatctgagagccagggaagtgtgggttctgatttgggagctgggtcagcaggagtgtccattggaggaaatagaggataaaaactggaatggtgccccacaagtgtgagtcagggaatgggggtgatttgggggacaagctttaaaaaatggtagggtagcctggaaaaccaaacgtggtgagagatggaccctgaaagttattgggaatggtgtgatgaggaagggttagaatttgagtcagggctaactagagtgtcaagggacctatgggggcaggtgagagtgtggagagatggctgggtagacagcttccaggccacagagtaaagtagaggtgttaaggagaggatatggtgactttgaaaggagaggtggcttggggagtctaagttttggacaccattgggagacatttgagtgactgtggtcaaacccctagatcaaggtttggagtctgtaggagaaatgggggaaactggaacccagagtggggactgttatagggatgaagagggaagacaatggattggggtaatgaaggaatgacagagatagggacagactgaagggaccagtggccagcaagttgaggggcaataggaatggccggtctggagcaggaagggcgtgtgtgtgggaggaggagtagatagaattgggaaaatgagcagcctgaacagacgcagggagttggaattggatgggtggtggaactggggctgggggatagtgaggggtctgttcctgtggctctttgtagaggtggaggagactgcaggggtggaggtgtatggaggtagggatggaggtggacagggggagctgggtgtgaagcttagggaaaggtgatggctgaggggaagaagggaactgagagatgctgggtcgggtgatggaaggagatgaaaggtgggggaaggtgaccaggccctctggcgggaggggaggttgggtcccagtctggccgcaagccgggccgtgggagggagacaagctgtggatcctgattataaatgcagcttctgctacccccgtgacaggctcggagggagagaagggggtaagggaggtgggaggttgggaggaaagcagggagaatggaggaactgaaggtcaagggaaaactggattcaggaagtagctaacttctgaggagttgcagaagagctgagtagggtttgggagaattctccggaaggtgtttcaagacaaatggagggagaaaagagggtgggacggcaaagaatgagagagagagactgggggagagaagggagagatccagtcaccaagtgtggaggggccggggcagaaaaagtgggcaggcttagggggaaaaggaggcccgcccttcctgggaggaggcggaggggggaagagggaggggaggggcggcgtgggccagggaggtctgacacacccccacctcccctagatacaccccctactgatccgggaccggaggagcgagtccagtcgcaacaaactgctgagacgcacagtctccgtgccggtggaggggcggccccacggcgagcatggtacggcggccgagcaggctctcatgacccggacaggcgcggggagagggctgaagatggaccgggctggcggggcgggggcgtcggggagcggcgggagctggccgggggcgggagaaggcggagacaaagtcttgcttcccgaggggagatggcgccctcctctggaaggtggagcgggacaggggctgtgggtgagaggcccctgtgggtcctcgctcggcttcgctccctttctcctctccagcagtgaagtttgactattttcctggtgcttgtaaaaatagtctccttagatctttagcttccagtccgtgtgttcctgcccctgcccctcccagcccctggtctgggatcttggaaagaatgacctagttcctgccctccccccagacctcttccccacccctatgctcctgattcttcttccggaccttcagtccttgaggtctccttttattaccccctgttttctcctctcatcagctgcttctattttctgcaattgtatcaccctttctctttcctccctgatttctcttattttctgtacccctcttgattaccccgtccctcccctctgctcccggcgaaagtccatcagactcccatctcatctcctttctgtctgtagagctatctgcgcggtctgtctctccaactctctccctctctccatctgtctcttcccctccctccccctttctgcccccccaaccccctctttagtcatttaaaaaaagatttttgtcttcctgagaagttcgcttaaaaggtttccatgggaacagtgaggggagatgaaggcagagaacagagatctgcagccaaggtgcagagagacgccctcagcccccggaaaccccctcgtcactgcccccttccacttcatttcccttcccggacctagcgatccaggttccccattcctccaacccccaggtgacccctttttcccaccagctccccctcccttcaggaattcaagctaccagtttctctcccttagagagccagtgacctgtccccatcctttggctccttccagccttctgataggtccaggccctactagccttgtgggccggtttggggaccttgggtgggtgggtgggtggtcagggatgtgtgtcattgtcatggaaaccccataccatcggggtgtgtgggtagcacatctctgtgaggcaaagtcaggtggtggtggagtgtatacagagaatgtgtgtgatgtctgtcacatctgtgtgtatatgtatatgtgtgtatgtcatgttcatgtctggggaagatgtgtgtgtttgtgtgcatgtgtgtacacctgcgtttccaggccagaatggtcacatgctcacagagcatgtttatcatgtgtcctgtggttggcagatctgcccacttattccccatctttctccttatcctgagtcctcagggtctaggggtctctggcgggggtctcccgtgtgttttgggtggggacaccgtgtgtgtttggagttgaggtggcatgtggaggttgctgtattggggttcagtaggggctgggaggggttccaggggcatatgtatttggggggagggcttagtgaaagttgatgggggtgaacgtttagggtcttcaggcagacatggaatgtgtaaagggcatggaggatgtgcagtggacataggggtcgttgggaccttggggacttggcaatgccaaggtgtttgctgaggctgtggactctccagcccgggagaggtcgccggacctttgaggggcattggaatcctgggctcctcctctgctgggtggagccgcgaaccctcgttctctccgcggttttgtgtgtgtgggggggtcctgctcaggaggggatggtgggtggcctggtttgttttgggggtccccttgcccccctcccccgtctctctcgcgctgtctccgggcgacagggctcgtgacagaggcggccacggcagcagcggtcgcctagcaacggcggcggggcccgggcaacggcggcagcggcgggagcggcggcggagggagccgttcccgcggccgtcaccgcgcggccgtcccggccgtcccgggccccgccgccgcccccaccgcgccgggcggcgcgagccgggccgtaccgccccctctccctccgcaccccgcccttcccccgcgcaggggcggggcccctcccccaccggggacacccctggcccccccggggggcggtgcgaggtaagggcggggccgggcggactaggagcgcgcgtagaggggggggcgccgcgcgcgtggggcgggggcgcgcgtgtgcgtgggcgcggggaggggggtggggaagccgcggtggcggcggcggcggcggcagctgctccctccgcatgttctcgctgcatcttccgagtggggggagttatggtaaccggagggggacagcggaggacgggagggtcggggaccggcctcgtgcggacagggtcttgagcacgcgggggcggccggtgtgtgtgggatcttggagcccctggtggaaggggcagcccgtgtgtccgcgtgtgtgttcgtgcccatgctcgtgtctcctgtgtgtcggtgccatgtgcacacgggggcccagttcctcgtgcacacatgtgcagccatccttgtgcaagtgtgtcctgtcttatcttgcctctgcctgtttcctgcctagggggctgttgggccagccacgggcttgtggggcagtccgcggccttgctggtccatgtcacctctgaccctgagcatgcatatccctggctggggctcacctcctgtcaggcttctgtgtgtgggaatgtgtggccctatgagcaggattttctgtgtccctggtggcaggtgtgtgtctttgcatgtgtgttccagcactggcctgagtatctgtgtcaatcccagcatgggtgtccagggcgtgtctggatgtgggtggtgtggctggggggagtaagtgtgtgaatgtgttccttggaattctactgtgtatgaaacacctttgggctgggcaggtgtaagccctgcttggtcagtaagtggggacagaaaagcttaaaaagggaagaaatggggtaaagaggaaaagtggggaggggataggagagaaggaatgagagaggcttgaagaagagagcagagagcagcaggccagggagaaagaatagctggagaatgggaatgtgggagaaagccaagccagacttagaagagagaacaggggataagagcttaagatggggaactggatagagatggtgggagaagaaggggtctgggagctggggaggcagtggggaggagagagtcaggccttctggtaaagtgatctctgaaagaagaaagggaagaagatgggagaaggcactggattcttgtaggccttgcaggatcaggcttggttttggatcagggaaggccactcaggcatacgggctggctcacagtgaggcctgtcatagcagggactgtcattagaggttcatatccccagcacagagctctgtctcccatttctctgctctgtgtccaaccctgttcttcgcccttctctggcaacctccctcctctggctccccttgagagctgccagctgggtgtggagaggaagaaaggccaaagggaaggttagggatttggagggcagggggagattctgtgggtgatggcaagattagagatgttggaggggcaggagtccaagcccttgctgtgtgtgtgtgagtgccattgtgtgtgtacacagggtgtgtacatgtgtgggtgtgtgcacaatgcctgtgttacgggtttgtgtaggtggctgttatgtgtgtgcatgcgtgtatacatcgtgcaggcatgggacatggagacccaggatcacagtttgtgcttttcaggtttgctgtgtgtgtgtgtacacgggtgtgtgttgttttctctgtacatgtcactgcatgcagcattaataacaggatgttctgtgtttctgtcactctgccccccctttcctctgtgtttctgctattcttttcctgcggcaacaaaagtgtttaataagcatatgtgtatgtggcctctgtgtacctgtgacttatgagtgagttcatggatcttagttcttggtaatatgtgtaaggttatattacttccaagaaccaagcaagccaattagcaaatttgttcttctgttaatgctttagttccaaagcggaattttaatgcatttaaagttagactttatgcctttattagatgagcttgcacatgaaaataatggctgagctcggttccctgaaatgagagtgaggcagccatacctgagaaatgcagaaaaaatgttactagggaagagatatcctgaaccattggatgcattgcttagtgtgtaccagaaggataattaacacatttgctcctggtttttctttactctggtggcaatctcggatgcctgtgttagagtgagagaagggctgggggaggaaagggggttgtcctgagacagagtggatgtggttgtacttttcacgtgaatgaaaggatgtttgtgcttctgagatatggggatacctttctgtggtcaggatcatggtgtactcaagcatgtatttcaggggttaaactggaattcccctgcatggggatatgtgtgtcttagggttataggtccatttctgtagtgtgctgtccacatgattgcccaagagacttgggccacaaagtccacaccagcagctctcatgtgggtcactgggttcaagtatgtactcccttgttgcagagctcacatatgtcaaagcatgtatcctgtggggtgtgtgggcctcagggtctcagaatgtggatccgtgctatgcccgtgctcacagttgtctgtatgtctcaaaagcacatagatccccagttatttttctgtattgtggttctcatatacacgtacctccatagctcagtatatgtttctgtactatacacctgttcctgagggagtgatagggttctcgtgtcatggggtccacatttttgtatgcaaacctcctaacacctgggttttacaggtaaagggaagctgaggactgattctagggcagtttgcaggcaatttgcaattctggaagcagacagtgaaaatataattgtggtcctcccttgttctgttctggaacctagagggttaacaggcagctcttccggtccacccccctccttccagcctgtagcttcttgttgccgtggagatggtggccccgccccgatgcagcacctgcccccccattggctgcagtggtgactgtggggctgaggggggagcccaggcctgggcagccattctggagctggagccggagcttggcatccccccacttacattctcttccagcccctcggcccctctaaattcccttgcagccgagcctcagcttcctttttcagcgcttgccatccctctaggctcttggcagactgagctgcatccgcattcacctcccctcctcctcctttccctatccttacttgggagtcccgagaacccccactgtccatccttcctgctccctgcccattcccctgcattctttgcttttcccctccccccaccaaccttctgagcccctgccactgcagtgcacgtggaaccggctccttctcccttccccccacctgccccttccttggattttctgtccccagcttctccccctgctactcttcacaggtctcttccaagacctccccctccagtccagggagggggtcatgggaggcagccctggccctccagacagacaggggttccaggaggtggggggcaggtggaagatgtgcccaccagggggaagaggaaagcctgcctatgggcaatgacctttaacccatctttccccccagctagccccttctggggtgggtgggcaccagggacctagcctccctggatctttggtgtccttcattactggggttttactgaccctctcagccatgctcccctgctgactgccagccccagtcatgggcctaaggcctcccaccccatccccctcagggggctcctgctcaggttccttgccccctccttcccgctgccagcctctccgccgtcgctgctcttcctgctgctttccggggggtaggtgaggccggagctgaggggcagagggaggtgggggcatgcactggggtcaggggtgggaacctgggttaacagcttcccttctggccccctccccaacttcccttctggccatttcctcccctccagaataccacttgggtcgctcgaggaggaagagtgtcccaggggggaagcagtacagcatggagggtgcccctgctgcgcccttccggccctcggtgagtggtgcctaccagatgtggctcagttgggccccctcccctccagccccaactggggccctaggagtctgagaaagagggcaggagggggagagagggagtgagagtgagaaaaagagtgtgtgtctgtgtgtgtctccccacctctttggtttcccccttcttggctctgcccccctgcttctgagaccagccctcccaccttctccaagctgtgtgtgtgtgtatatgtgtgtgtgtgtgtgcttgcactgtacccgtgggagcaaggaagacaaactggtattagggttcctatccccctttcctcgcctctggagacttcccttttccccatcccactttcatccaggggctctctaccagctgagggatgagtaggtagaactgaccctgccccaacccaccccatccccatttcccccccagcaaggcttcctgagccgacggctaaaaagctccatcaaacgaacgaagtcacaacccaaacttgaccggaccagcagctttcgccagatcctgcctcgcttccgaagtgctgaccatgaccggtacaggggctggagcatgtgggatgagattgatgtaatgtagggtctcctgtgtgagatgcagagggagggggttatctgtgtgcaaaggttgaaggattcaactcaagttggttgggggatgtcatggcacaggggacagaacagaaaagaactagaatagggatctgtgagcagcaggagaggggtagggtggcagagagaagacagacagacaggctggaaagggaatgaaggtgaagccaaggagggactcctcagggactcctcaggccaagaaggatgggctctagcccaggatcaaaggagctgtacaggaggagagtgaccctggaggaatgtttaaggaatgcagggaaggggttggtaggtgagtgagcaataggctgtaggtggaagggtgtcagggaaggtcaggaaatacaggggcagcaggttggagtggggctgggggtggctgaatgaatggatgatggctagggctcaaggacctcatcagtgagggaagagacagtatagagcatggcagagaaggggaggctgggacaggtgtgcagggtgacagaatgggaagcaacccatggactgaggcatgaagaagcagccagcggagaagtccagaaggcactgtccctgagaccaggctgaaggagacctccactgtttgcctttgttgcctgccatttggggttcctctctgggtttccccctcacccagtcactccccagggagaaccatgccctccctttcccccatgtctggccacccccaggattgggcaggtagggaggttgggataaagtgagtcacacctttccctgcccccctcccatgttgccagagctggatttggggccggcagggggtgagggcatggtattcctggccgcgggggcgggggggggggtccgggggccgggggagcgtcgcgctgacggcagccagagcctgcgatgacggggctgctataaataacttcttggaggctcccacacccaagctcccctcccgctttcccactgctctctactcttcatcccctgcccatctccataccgcttttgtattgctatcctacccctcattattccatgcccctagccccctttatcttctgccctcctgcagtgatttttttgcattccatcccctcttagccctcacctcggttctcccggccatctctccagttggccttcctcctcttctcctgtcctctgtcttgctgcacatacctttgtctccccctttcttcttcttgccctacctcctcttcttccctagtccgtgtattctgtcttttatcctctttgagctcttttctgcccacagctttctcctatttcttatgcttttccctcactctttcccctgcttctgctaaaacttgtcctcttatgctgtgttcattcattctttgaatcattaaatgtttatcaggcactagccgtgtgccaggcccaggctagacatatctcttctctgtgccttcacttctttacttccactttttcctttatactgaggctctggtttctggggttacctggaggtactacctagaagtgccccaggcccactttgttctctccttttttttttttcttttctgccatggtccatttctgggttgagatatttctagatgtccccagtcctcgcaatcccttaggtgtgagatggtgggagtttcttttttttcctttttttttttttaaatagaaatagggtctcactgtgttgcccagactggtcttgaactcctgggctcaagtgaccctcccacctcggcctttgaaatgttgggattacaggtgtgagccaccaggcccaggtggagcaggggagttccttaaaggattctgatttttctcacatccctcacgtccttcctgataggcagggtttctttctgtgtctgtttgggaagggtgttcagggggccttctctccaagtctccatcctggaacagactgatgatgcagggtacctatgtgtctaagaagagtaggggggccgggcgcggtggctcatgcctgtaatcccagcactttgggaggctgaatcacttgaggtcaggagtttgagaccagcctgaccaacagggtgaaaccccgtctcagctaaaaatacaaaaaaaaaaaagaaaaaaaaattagctgggtgtgctgaggcaggagagacgcttgagcccaggaggcagaagttgcagcaagccgagatcacaccactgtactccagcctgggcgacagagcaagactgtctcaaaaaaaaaaaaaaaaaaaaaaaaggaagagtgggaagccctgatcccttcctctcctgaacctcctgcctgccagggcccggctgatgcaaagctttaaggagtcacactctcatgagtccttgctgagtcctagcagtgcagctgaggcattggagctcaacttggatgaagattccattatcaagccagtgcacagctccatcctgggccaggagttctgttttgaggtactgggtctggtgggctggggagggccaaaggacaggggtgatggaaggtggggggcagagaggtctagagaaagtggcacaggtggggacatcaaggaaacagaaacttctgggactggaggaaagggtaggccagggaggaagagaaggtagcagagtctcctcccctctgtagccctttccctcaactccacactcctttctaggtaacaacttcatcaggaacaaaatgctttgcctgtcggtctgcggccgaaagagacaaatggattgagaatctgcagcgggcagtaaagcccaacaaggtattggggaataaaggggacacaacctgtgcagggcaaaggttgcaccaacacgggaagctgggggcctagggaggaaagtgagttaaaggaggagaggcttggggaaggagaggattgaggtacagtgtatctggacaagcagggggagacccccattattctgagtcccccatttcttttcgctttctgtactgctaccctgccttacgatctctttccctgccatagaagtcatagacttacagagttgatggggctctggaaattctttagtctagcttccctgcaggcaggaatgcttcactaataccccgcaggacacatcaaatacacttagccaagtttctgtaccttggtttcctctctaagacagagggaactggtggcaatgggttggattaaatgatctctaaggtccctttggcacataaattctatgagtctgttcttcccaaaacttcatgcttccagttctgtcagctattctctgtatcccagtttctagcaagcttacagtcctagtcacactcctctggggggaactcttgtgtcttgatgtccttaaagaactcaacccaagatgctgacatgatctgacctatgcagagtacaaacaccatgttccctttcaacacactgcaatatcacctgagccttaccattagcttgtgctcaattgtatccccccaggcccttactgattcttttttttttttttttgagacagagtctcactctgtcacccaggctggagtgcagtggcgtgatcttggctcactgcaacctccgcctcctgggtttaagcaattcctgtgcctcagcctccccagtagctgggattacaggcatgcaccaccacacccgactaatttttgtatttttagtagagacgaggtttcaccatgttggccaggctagtctcaaactcctgacctcaggttgtctgcctgcctcagcctcccaaagtgctaggattacaggcatgagccaccacatctggccaagctttacccattctatatgcaattcttttttcacaatttctgatagtctctgcaggactttccagttcccttcaaattctacattaatatttttggcttgttattccagcttttgaaatctttccaatactgtttgtgttgtctagtgtatgtctacgcttctacagtagcttcctggggctgctataacaaactgctacaaactgggtcacgtaaaacaacagaaatttattctctcacagttcaggaggctggaagtccaaaagcaaggtatcagcagggccacgctctctttgatgctgtagcagggaatccttccttgcctcttcctagcttccggaggttgccagcagtccttggcattcctgggcttataactgcatccgtctaatttctgcctccatcttcatgtagctggcttccttctgtgtgtctctgtatcctgtatctctgtgtctccaaatctccctctccatataaagacaccagtttttataaggtgggttaagggtccactctaattcagtatggcctcttttttttgagatggaatatcgctcttgtttcccaggcttggagtgcaatggcatgagctcagctcactgcaacctccgccttccaggttcaagtgattctcctgcctcagcctcctgagtagctgggattacaggcacgtgccactatgcccagctaatttgtttttgtatttttattagagacggggtttcactatgttggccaggctggctcgaactcctgacctcaggcaatccacccacctcggcctcccaaagtgctgggattacaggaatgagataccatggctggcctcttcttagtttgattacatttgcagggatcctgtttccaaataagatcacattcacaggttcagggtagacatgagttttggtgggatactattcaacccagtacaccgtctcaccttatgattgctgtctgtatcccactttcttactgtctctcctcttttggtgtctctctgtcccttccccctttaacatcatgcccaccccaccatgccaggacaacagccgccgggtagacaatgtgctaaagctgtggatcatagaggcccgggagctgccccccaagaagcggtactactgtgagctctgcctggatgacatgctgtatgcacgcaccacctccaagccccgctctgcctctggggacaccgtcttctggggcgagcacttcgagtttaacaacctgccggctgtccgtgccctgcggctgcatctgtaccgtgactcagacaaaaagcgcaagaaggacaaggcaggctatgtcggcctggtgactgtgccagtggccaccctggctgggcgccacttcacagagcagtggtaccctgtaaccctgccaacaggcagtgggggatctgggggcatgggttcgggagggggagggggctcggggggtggctcagggggcaagggcaaaggaggttgcccggctgtgcggctgaaagcacgttaccagacaatgagcatcttgcccatggagctatataaagagtttgcagagtatgtcaccaaccattatcggatgctgtgtgcagtcttggagcccgccctgaatgtcaaaggcaaggaggaggttgccagtgcactagttcacatcctgcagagtacaggcaaggccaaggtgagtgttgtgccctcagggaaaggtgacttgggaatgggcacttgcttgggggttagtgaggacagggcaaattcacgagattgggttgtgcagaggctgacacttggattttcctgggcctcaggacttcctttcagacatggccatgtctgaggtagaccggttcatggaacgggagcacctcatattccgcgagaacacgcttgccactaaagccatagaagagtatatgagactgattggtcagaaatacctcaaggatgccattggtatggcccacactcaggccctcttcttcccaaacctgccagatgtccaccccagaccccaagtccacccttccacagcttgatacttcctaacccagagtcctaggactccagcctccaacacctgattctgaaatttccccaaccctggccacccccttccctgcccttggaaagtgtgaccacaccctcttgtgcccccaccccccaggagaattcatccgtgctctgtatgaatctgaggaaaactgcgaggtagaccctatcaagtgcacagcatccagtttggcagagcaccaggccaacctgcgaatgtgctgtgagttggccctgtgcaaggtggtcaactcccactggtgagactgggaacgctgggctggggggccagggtcgggggaattatgtgttcatctgttcatctatctgtccatcctcaaagaggactgagcaccatttatgggcaaagcattgttctaggcgctatagagcaaacaggtgaaagaggcctggtccctgccctcagagggcctccaccagaatggggacaaattagaagaaaaaaaaaaaaagccacagagccataatggtgtgtaagtgctgagtaagggtccccccaacctctgtgtgacataaggtcagagagaaggcagagctttgagataagtggggaagaggtgcccccttgggtaggctttgaagactggtttaggttctgatatatggacatagttggcaagaaagacatttcagaagaaggctgtgagaaaggcacatgtgtgatggtgaaaaggcccaggagttttcaggggacattaaagtaggttagtagcaattacatcaggtttagtggagcatgtgcctcataatggggagtggcgggagagatgtctgggcaggaagattagctttagaaactggaaggcctcaaggagtctgaggtcattggtaggccttgggatgccattaaaggtgtcagaaatattgtgatttagaagattaatccataggctgggcacggtggctcacacctgtaataccagcactttgggaggctgaggcgggcagaccacctgaggtcaggagtttgagaccaggctgaccaacatggagaaaccctgtctctactaaaaatacaaaattagccagatgtggtggcacatgcctgtaatcccagctattcgggaggctaaggcaggagaatcacttgaatctgggaggtggaggttgtagtgagccgagatcacacgattgcactctagcctgggcaacaagagtgaaactccatctcaaaaaaaaaaaattaatccataagtagagtgtatgtagtagagtagagggatgtatgttgggggatgactggaatagagccagctgggggctcggaggcatgaaagtcagatcctgaatcagaacagtgacagaagttaggaaggagctactggaaggaccctctcgggaaaggatcagtaggaattgtcagcttattggaaaggagggagcatgtctgtggggagtcacggatgactcaagaggccatgaggctggtggttgggagaccggtggcctcattgacaaccaggaaagtcaggaggaggagccagttggaggtgtgggggcgatggtgagctctgctttacaccagccgagtttaaggtgtcagtgggacattgaagtggaactgggaggtgcggggagtgagctctgagccattccagggactggggatcatgcctggggcacctccatccccatttccctggaatccagaagagttggggggtccgagctccctgtacctcaagtgaccctccatctctctcccatctctgtctctccctggtgtctgtttttcttctcctcctctccttgtctctctcccacacccctccatctctctcccacgtgtctctcccctcaccttctctccccctccatttctctctccctaatctgtctgttccctctgccatggcccccttcttcaagcagcctcccatcttgctcctgcggtccctccttccctgtctctctcacccctgtttccacaccctcacctcctaccacccccctcagcatgttccctggaagctgagggtctctggggctcagtcccggtctctctctttctctctctctctctctgtctccccgacccttccccccagcgtgttcccgagggagctgaaggaggtgtttgcttcgtggcggctgcgctgcgcagagcgaggccgggaggacatcgcagacaggcttatcagcgcctcactcttcctgcgcttcctctgcccagcgattatgtcgcccagtctctttgggcttatgcaggagtacccagatgagcagacctcacgaaccctcaccctcattgccaaggtcatccagaacctggccaacttttccaagtgagggaagcttcaggagtgggcagggcagggagtggcagggcagggagtggcagggctgggggtcggcaagaagggtctcctgagtccccagagatcctgagatggggaggctatgataccttgtgtgtgtgtgtatgtgtgtgtatgtgtgtgtgtgtgtgtgtgtgtgtgtatgtgacctttatcttctgcattcttggctaggtttacctcaaaggaggactttctgggcttcatgaatgagtttctggagctggaatggggttccatgcagcagtttttgtatgagatctccaatctggacacgctaaccaacagcagtagctttgagggttacatcgacttgggccgagagctctccacactgcatgccctactctgggaggtgctgccccagctcagcaaggtcagcagatcccctctttgccctatccccagatggctccagaggttcctggagcctgagaaactaccctttgaagattttttttctccccttgtttctcgaggtgtcaccactactatcccaactcaggccccctccacctgcaccctcagaggccctcttagagctgggcactgagcccccaggtaacagcctcacccttccaggaagccctcctgaagctgggtccactgccccggctcctcaacgacatcagcacagctctgaggaaccccaacatccaaaggcagccaagccgccagagtgagcggccccggcctcagcctgtggtactgcgggggccatcggctgagatgcagggctacatgatgcgggacctcaacaggtgagcaccctgggacagccaggcctgtgccctaggagcccttctcctattctagatactcctcactgggccccacatgcatctctctagggcttgaaagaagggaggaaaaagcaccaagttctcaggggagacgataaggagacaggtacagtcagtggtaggctgagagccctttacagcctgagggagtgagagatttggagctctaggaatagggctgaggctccaccaactcacggcttagttgtaagcctagagcatccctgctgcaagctctgatttgctgtccctctgcctgcccatgctagtccccaggctgaggttcagccagcatgtcatgtcagccatgtgtcaaaatgttcaaacatctcagtaatagctagtgaataagcacttcccccagcccccgaccacaaccccacagacctccccatgatccagcacttagagcagtgacagcagaagcctagcagggcctgcagcctgctccagagtcccagcctccattctgataggtggtgcccgtgcttcatttgctgctcattattttgatgatggccctgctttttcctctgcccgtgtcttcctccatgacaccatacccatcccaccattcccgcctctcctttcatttgtccacatctctctccttctctgtctgtgctcgcccctctttccatctctctccagctccatcgaccttcagtccttcatggctcgaggcctcaacaggtgaggggctctcccctcccccgccctcctctcctctcctgtctgttccctctcccactccactggccttcgccctactcctctcctctcctcctccatggacctcatctcctccatatgtgcccagccctgcccccatcccttctcttgctgcccccatctcccctcctctaggcctcacccccttcccggaggggccctgtcctttccctttactcacctgtcccctcccatcctccctgcctgccctcttcagggctgccaccgctagctctcagcccttccctctgggtcccacttttcaccccaaggcctgtgccagaccacagcaaggttcaattgctaggagccctgaccttaccttctgcttgtgtgcccccttcccttctgacagctctatggacatggctcgcctcccctccccaaccaaggaaaagccacccccaccaccgcctggtggtggtaaagacctgttctatgtaagccgtccacccctggcccgttcctcaccagcatactgcacgagcagctcggacatcacagagccagagcagaagatgctgagtgtcaacaagagtgtgtccatgctggacttacagggtgatgggcctggtggccgcctcaacagcagcagtgtttcgaacctggcggccgtaggggacctgctgcactcaagccaggcctcgctgacagcagccttggggctacggcctgcgcctgccggacgcctctcccaggggagtggctcatccatcacggcggctggcatgcgcctcagccagatgggtgtcaccacagacggtgtccctgcccagcaactgcgaatccccctctccttccagaaccctctcttccacatggctgctgatgggccaggtcccccaggcggccatggagggggcggtggccatggcccaccttcctcccatcaccaccaccaccaccatcaccaccaccgaggtggagagccccctggggacacctttgccccattccatggctatagcaagagtgaggacctctcttccggggtccccaagccccctgctgcctccatccttcatagccacagctacagtgatgagtttggaccctctggcactgacttcacccgtcggcagctttcactccaggacaacctgcagcacatgctgtcccctccccagatcaccattggtccccagaggccagccccctcagggcctggaggtgggagcggtgggggcagcggtgggggtggcgggggccagccgcctccattgcagaggggcaagtctcagcagttgacagtcagcgcagcccagaaaccccggccatccagcgggaatctattgcagtccccagagccaagttatggccccgcccgtccacggcaacagagcctcagcaaggagggcagcattgggggcagcgggggcagcggtggcggagggggtggggggctgaagccctccatcaccaagcaggtaggtgaaggcaggaggaaggcgggctgggtcacaacagggagggaagaaggagatggggggtggggttgaaacagagtctgtggcctgaagttacaatcttcttgcctccttttggccattaaacaaatgtgtatagagggcctgctatgtgccatgtgctatgccaggcactaaggatacggcactgaaccctcttagcactctcattccagaggggattaatccataagtagaatgggggtgactggaatagggccagctgggggcttggaggcatgaagatcagatcctgaatcagaacaacaggagaaattctctggcattcaactcacatctctggcattcagaggtgataaaggctacagcagggcaataggactgggactgtcgtctcctttggctgtgctgttgccctctaaatgtaccctgctttttcccaccttttctttctctgttcgccctcactgtgccttgtcccagcattctcagacaccatccacattgaaccccacaatgccagcctctgagcggacagtggcctgggtctccaacatgcctcacctgtcggctgacatcgagagtgcccacatcgagcgggaagagtacaagctcaaggagtactcaaaatcgatggatgagagccggctggatagggtacgatgggctctaccagctccaagccccagtgtttccttttacccacaggggagatctctagtcacttccaagggaaacctccagggtcagttatggtggtaagaaaaggcaaagacctgatcacctcttgagaagccttccgtccatctggggagaccagatacacacagttgttaaaagtcactttcaactctattttgtaggttatatatatcatagactatctggggatcatctattttaggcttacctccatgttcttccccaggaggaacataagccctggctcctgtgactgcttaggaaaggaaatgttactttactggcagtaggagctaataaattggatggggatggagggggttgcagctatattacaagtgatgtctggcctacccagtcactgtcccatgggcataagtgacagtcagtgggcagggaatgcatgtggtaaagtagtatgtatcagtcatgtgtgaaaagaccatccagaccctcacttggtggaggctgagggcaaagggcaccaagagctctggggctaacacagataacttagcagaaagttacttgaggaagctgttgttcctagggcctgaggaagagggcggctgcaggattaggtcatatataaagaacatatgatcctaacacggggaagtggtctttgagcataggaaatgttgggactgactcagatgggcttgaccagcaaatttaatgagaattaaaccctaatattagccccaaggcagccaccgtaggaagttaattcacatctctcctctgcatgtagaagggttggtgatatatgtatgtatcctcttcagagaatgaggaaatagtcttttgaatcatttttttttctgtgcttcagatgaggaaaccttgttgagaaaggctgtagactagcactatccaatataactttctgcagtgatgaaatgttctgtaatctgtagtgttcacatgtgtctagttgtgattcaggaactgaatttttagatctatttaattttaattttgtaatttttttgagacagggtcttgctctgtcacccaggctggagtgcagtggtgcaaacatggctcgaggcaacctccgcctcctgggctcaagacatcctcccacctcagccccctgagtagctaggactacagggtcgtgctaccatgcctggctagttttttttcttttcttttttttttttttttttttttgtagagacggggttttgccatgttgcccaggctggtctagaacttgtgagctcaagtgatctacctgcctcagccttccaaagtgctgggattacaggtgttgagccactgtgcctggcctaaattttaaatagctacatgtgggctggtggctaccatattagacagcacagctgtagactctagagccaatagggcagataaaatgactcttctgagctcttccagctctggaattcctagattctcagcctagaattcacttgtagacctcctatccttggcaccttgacagagccaaggagagggtcacatggaggacagcacctgcctttcccccgtcaattgccttttcttcctatgtctccagcatgtgttctggggcctggcttagggctgaagagtcaccctatttttaatttctgagcacagttactcaaggtgtgtttgtgagtgtaggtttctgtgtgggtcttcatgaggggccatacatagacctcagggtgtgggagtctgtgaccttgctccattttgagggaacctcagcaccatggcagggtcttctcaaaagcaggtgtgtggatatgatccacaggcagggaaggggttggggaaggcagctggatgtccctcaacatgcagtggctgtgcttggcagacagggatggaggctgggtggtgggcttggggtggggcgcccctcatagtgcggggtcgtgtgcccggcgggcaggtgaaggagtacgaggaggagattcactcactgaaagagcggctgcacatgtccaaccggaagctggaagagtatgagcggaggctgctgtcccaggaagaacaaaccagcaaaatcctgatgcagtatcaggcccgactggagcagagtgagaagaggctaaggcagcagcaggcagagaaggattcccagatcaagagcatcattggcaggtgaggggcggcctggggagggggttgtgagggagagcctgaggctggagagagcaagtgggtgagctactccgctgactcccatccccaaactcaggagcccaccaggagagcccaccactctcctccccaggaagccacccactcactcatcaccagatggagagaaaccccaacctgcttagtgcattaaatatctctttaccaaaccctgacctctcttctgatagagtagcttcggaagcccttggaaaatgtacctgttcctgtccaaccatcactgcatttgcatttaccctaggccagagctccccactagttattctcaacttaacctgtgatgttcactccaaacctaagcagggctccctagccagagtaggccctgcccttcctgggtggaccctccctctctagccttggaaaggtgttctgttagaaagggtcttttagcctgtgtatgttttcagctgctccagcaagtcctgggctccaaagagggtatcctcagcaaagaggtcaattatcttcagagtggtggggtcggggtgggggggaccctgggcgcactccaaccagagccacctccattttgatccattctaaatgtattttatgtaagatttaattagaagaaaagggcttcttgaaatattttttgaaaaccactgctctaattgatatcctttatgataaatcacctcgaggatcttcacagtgaggtgacatgggggatgcagaagccaggtcctcagccatggaaggtctggggaaggggcactgctgtcctgattgggacgatggaggcctggaggtgtctggatggtagaagtctttgaggcacagaaagctgccttagcagggaggtgtaagggttcctgggaggaaggtggagagcatgatcctgaggaacagggagtcttgcatcacggcaatggagggactctgattctaagggataaggatgcctgaggtttttccagagagctatggggttccatgggcaggctctgagcctgtgcccgccactaaccccactgaagcccgtcccttcaggctgatgctggtggaggaggagctgcgccgggaccaccccgccatggctgagccgctgccagaacccaagaagaggctgctcgacgctcaggtggaaattacaatgtcatttatcttctccgtgtcccatccccatccatcccactgtctttcgtgcactcactacaccagccacctagccccatcaccatctgtctctcatagtctgctgtttgtccactggctgctcctggcagccccctagtgaccccatcttcatcccatcgtctgtgcctttgtcactcctggcagcgtcagcccaactcctgtgccttcccatccagtcttcccactcctctctgcatctcaggaccttctctaccagaaccttggtctttctgcccctagaccccacctagttccaagaacccctgccccttctttgctcactcctattcaagccacgttgttcagcttcctctgcgctcttgggccagagggctagaagctgccgttttctggaatagagcacagggcagtatgatctgtagtttctccaggccctggccggtaccctgaaaacttggggacccatcacctctgttctcttggctccctaattttcctgtctccttggcagctcctgcatagcttcctcttcctgactcttcagatcttgaaggccttccatcctgtaacctccctttgccctcagtatttaagtccagcctccctctggcctccctcccactctggccctcagaccttcccagctgcctgctgcccagcctctcttctcacaagccagcttctaggacctcccttctgcacccttaccccttgctttcccaaaattctgctcattttcctacccatactcctctttgctctgactgctaggctccccccgcctgccatccccccaccaaggctcctgaccccatgaccccactctctcccactgcagctcctcatcaggtaattctcctggttccgctttggccacgggcggaggacacagggggaggtgactccggaccactgcaggttggtcgtgaagcccactccctccaacacctccggagcctctcccctctcactgctgccctccacacccagagaacctccacagactccagccctccgacacctgcacagatccatctcccaagacaccacccaaagagagcatttgctgctgcttcccagaactgtccaacaataccttagcaacaccaagagttgggccctagatgggcccagcacattcacaggtcacacccacttccctgcaaaacccaccccctcccagcctcctcctgactctaagccctcctcttcctctacctctccagtgtatgtctgtcaccccccatttcaccagagcgtccttaggggctgggggtgggtttgttaatggggtggaggcaatgatgggttggaggatcttggctataggggctgtgctgactgcagcaggtaggttgggtttccctcttccttccctaatcttggttctctaccctcctttccactcctcacctgattctctctcttcctcctccttatatctgtgaggcagaaggcatctgaagctcatattagcccccattgggtgggaattaggagtgggtagttaactcagggagacttgagataccctggaaaaaatgctattgagatgtcctgacattaggcagggtggatggaacaagaaggagcaagaaaggaacctcaggcagatgttaggacatggacttgatcatgtggcctgggagtttagaaatggggagagacatcctcctagatcagatcgtgggctcagtaggcatgttgattcccagggagaggtgccaggaacagcatggtaaagaatgtactcttcacagctcacatccccaggttgctgatgccactcactccccctctcctgccatcgagtggccttgccggacacatcaccctacctaaaaagccagtaaatgagaacctgtcagctatagccatcatttctgagatgcgattttctttgggattgagctgcagtgggcagtggctccttacactgtaattttaattctctgcctgcccagcctctctgtcaaagtagctggtgatctataaagatgctaaaaggcaccaggggactttgccatttaaaggactcctgcagtgaattcttttgtaaaatgaataatggcaccctaatttatccactttctaaatttgggtccatgggggtgtccagggcatgcttatgtgctgtcaccagcagacaaacagagggaatggaatctgggggttccttccctgctctcccgccatactcaggataccctaccataagtgatttcctctcactgacttgcagaaaatgtgtgagatacccagcaagctaagaaggcagttttgctgggtatctcatacccaaggctggggtttgggtgatctgagaggttagctccttgatcctaggatggaagggagagcttatatagaagcttttacttggaaggttttgtatcctaaggtcagacatagctatattaccaagcctaaatgccatgtggcccaggaaataatttggacatttgttctaaaccacttgtggtaggtattggtctctctgcaactcagccattaattagaaattagttttgagcctgaattttaaaaagccaagtgttgcccccagcccacacacacacacacggacatgtacagtacaaaccccagataattacaacagccaaagagagaaggaagtgaatttcccaaccagaagcgtagggaaattcagatggctttcttttctcccagcagaggaacagaaggcggagctaagggcaggaaccaggagttggtcaaggagctataggaggtgatgagagtagaaccaggggtaggagctggtctggtacccctcaccctctaattgggagcccagggagaaggactgaaaagaagatgggagtggaaaagaataaagccagtttctgcttcccagggatgcagagattggggcatgctgtgtctgcagaagctcctagtcatttccgccataattgtgagagagaggggcagccctcccacaagatttttcccttcccatatcacttccctgaatccccttcctttccccccagtacagttaaacctctctctaatttggaatgttatatttgagaagatggccactgtgaataagtgacaaacggaatgacagtgtctatttaatgaaatgcatgtcttcaaaatatatacagaactcgatgaacaaggctttttccactcctcagggagcatgcattaatgaatagataggattcaaaagtctgttttctggtatgggttaaatatcccctcctacagacatatttccaccactaatttgcttagtacaccttttcttcacagataaaggaaaatgcaagctcagtttttcttcagattatgaagaaattccaaatccacaggggtttggattaatgaggttttgctgtactgcctccccttattcctcaacatgaagttcccacctcggattggggatgggtgggagggggtttcaagaggaggagggtgggatgggcaaggaatatacacaggtgaagccagagaagggttaggttgggggtgcggtgggaacttgctgttttgatctggtttcctggtgtgacactctgggttaaaggcttgaaggcccctgttaggagtctaggggtgagattctcttctctctgatcccagaggacgttaacttctactgcaggtgagaaacaaaataggaggatggtggggactgtcctgggaggagggggtggtccatggcttgtggtgtgggctggctataggggaggccactgctaggggactggcatccaggcccccttgaagcgtctcaataagtccgcgctctcctttttggtgtcttgcaggagaggcagcttccccccttgggtccaacaaacccgcgtgtgacgctggccccaccgtggaatggcctggcccccccagccccaccacccccaccccggctgc

SEQ ID NO: 15841 - DNA, 33625 bp, Homo sapiens
ctctctctcggctgccgctgctgccgttggctcttattctcctcctcctcctcctctctcctcctctctgcttctctctgctcctctctcctcctctctcctcctcctcctcctccacctcctcctccttctccccctctttctccccctctttctctcttctttctcccccgtccccccgccccctccccccaggcctgatgagcaggtctcgagcctccatccatcgggggagcatccccgcgatgtcctatgcccccttcagaggtacgtggtggggggagggggagggccatatggggggcaacagggggaggggcagggggcgggggagagtcggggccgagggaagggagcggctgaaatggagggagaggggaggaccgggaaggcaggggtgggagcaaccgggaaggagggattggaggccagagggataggggtagataagggatggaggggccaggaaatgggccttgaaagggggctgaagggaaaatgatgaaggggaaagaaagcgccagaaaggggtgggaaggtagaaggattgggttggggaaaaagctgcagaaataatttgggggtgggagctgagtgatgaggaaaacatcaaggaaatagagggacagagtcttgggagaggggctaggaaggagaaatgaaaacataggggtgaaaagagaagccaagaagatgtggggggataatttggtgggggactcagagtatggtaaggggcggaaaaagagaggaggatggagggagagaaggggccagatggagagagagggaggcagtggggggtggggggatggagggtccagatggagggaagagagaagagagagggaacggtgggggaggggagaccagggcagggggagggccaaattatgtgtgcttgggggggtggcagtacaagtaagatgaaatgatgggagtaggggacaggttaggatcctgccccagactctgaccctcttaaaggctcttgaccagtaaaatgtaacctctggggtcttaatgctgtcttcacttcatcacttttacccccttcccccacccctccaatccttatttccattccccctccctcctctgctgtccatcacctatatctttccccccatatggtgtccgttccttatatgagtcccccttctgtccttcccctatatcagtcccctctctggtgttcattgcctctctcttatctcttttctatgtggtcgctcccttatatctctatcacttctttactagtccgtcttgaccccttctcatagcctccgcattaggtctgcctcctttgctctgacacatgtccagtcgagcccttcaggtgtattcccttgcccctgggcatttaccatcatttctgcctccttttctatctactcctattatttgtctcccagaccattccttgtcaccacaagtctgtgcctacccactttcccttaatacctcaactcttattatcatttctcttttcttgtctcctctacttattggggtgttggagatttggggtacaaagacacaggttttgatgattagaacaagggatccccatctcagcccttgagggatttctcatcctagtaaaaatttcccgtttctcagccatgttgctctgcctcttgcatctgcctcccagaatcattcttcaccaagtccagacagtatgtgtgtgtgtgtttctagagttgttcctaagttccctgctgccaggagaaagatgccctctgaagtctaacccgcctcccttggctgcagcctgaaccagccctttccccaaatgcttatgtgtatcaacagatttctcctctgggtataccaagtgtctaagtgcggtgggcatgttgcctgcaatgtctgtagtttcagaggctaggtattggtgatctctgtatctagagaacattagttagtctctgagatgggttgagatagagtttcaaagtatgtggtttctaaatggtggacattctgagggttcatcgctcactgtgatctggaggttgggtaaatttgagagacatatttatagacagaaaagggctgaatttgcaaaactctgctactcagtgcattctgttggaatgaagctcaaagaccagttctcctgcagtatactcatggttatcccataaaggtgacagagtttgatcttttttccatctaaaatctgataccttaagcctaatttctagctctttgctgtcgccaatgtgacatctctcttacttcaatagggcctgtgtggcattggggtttaaaggagaggcagtttgcagggagagcggcatggcaagaacaacagagctggggaaggaggaccctggtctcatctcagccataggcgacacttggtctactgttctctcttctcaaagttttgttcccatctccagctcttgtctttggaggcccctctgtgtcaccaggcctggatattccattctttccccctgacatctttcttcctcaagctcctcactgtgccttgagaaggctcctgacctatggagtggcttccatcctgtccactgagactaggtggggtgaggtggtgggggcagtgttgaatctctgggcactgaatgggagaagagataaatttggtctctacttgtccaaacaagggcatatttcccaccttctgccctggggcctccacagccagatgccgacaaaagccatcttctccttaccaccagaagaaccagaactttccctaaaggatgagcagggttgaactaggggaggagggcacagaggagggaagagttgggaggggaggccctctcatgtctctgactgtgaacaggtaagctccccgacttcttcttttctagatatttagccctcagaatctcatgatcccaatgttcctacacacacaccccatccttctttcccacagccatgtagctttcctcatactcttttatagaggggtggtgccaccttccaagtccttgtcttctgcagctatttggatgccttcctctacccagatatctgacaccaacttctctgtttttctcctgccaattttgcggcacctctaccttattttcctgaagtagatggagagctccttcatctttctctgcccccaaacgtgtaccttctctgtcatataattcccatccctgaacctctgcatttcttcccccaagtctccagagccttctgtgatgtgatcctctcctcttttcccctttgtataaatgcttgtcttgtgttcctttagagttgccaggtgtctcactttcaactgtgatctcctgaaggccggtagggtccccttctcactttgtggactctcttcttgccattttaggcctctgcttccaaatgcatagagcctcccttactgtttctgtgtgtctctgtcctccagatgtacggggaccctctatgcaccgaacccaatacgttcattccccgtatgatcgtcctggttggaaccctcggttctgcatcatctcggggaaccagctgctcatgctggatgaggatgaggtgagtgtggtgagaaggctgggaaaacgcatgtgggagaatggggagagtcctcattagtgaaggggagagagacacaaagaaggcagacaaagaagaaacatttgcaaatggcaggagggtggccattgagacttgggttggagtgtgacaagaggggtagtcattctctcatcttgggcagggagtctttgagggttatgagctgtgttggggaggagatgtggttctgaagatttcgggggtggggaggctcctgttttcacactgtccatattgtaggataggttagaatggggaaggggaactgaagggtttggagaaggggtgaagacatggaaggccctcccaaccaaagcaatcctcaggacccctctctgctttgcccactgagcaagactcccagtcctttctccatcagggggcagagtgcaagaagagaaattgcaggacgcagagaaaaggcaggggatagaggaggttttaggtagctggaggatactgggaaagaagactgaggtcagtggatcttggcatgatggggtgaagactgggagagtgattgagatcaaggtttagagagacactgagagggcttctgcaagggagtggttggacatcaggaaggaatataagggaggggaactgggagtatgtggagttatctaaaggagtacaagtggagtaggggcagggactagccagagtaaaggagatgaaacggacagaggcctcttatgggaggtggtggccaggtatggagatctgagagccagggaagtgtgggttctgatttgggagctgggtcagcaggagtgtccattggaggaaatagaggataaaaactggaatggtgccccacaagtgtgagtcagggaatgggggtgatttgggggacaagctttaaaaaatggtagggtagcctggaaaaccaaacgtggtgagagatggaccctgaaagttattgggaatggtgtgatgaggaagggttagaatttgagtcagggctaactagagtgtcaagggacctatgggggcaggtgagagtgtggagagatggctgggtagacagcttccaggccacagagtaaagtagaggtgttaaggagaggatatggtgactttgaaaggagaggtggcttggggagtctaagttttggacaccattgggagacatttgagtgactgtggtcaaacccctagatcaaggtttggagtctgtaggagaaatgggggaaactggaacccagagtggggactgttatagggatgaagagggaagacaatggattggggtaatgaaggaatgacagagatagggacagactgaagggaccagtggccagcaagttgaggggcaataggaatggccggtctggagcaggaagggcgtgtgtgtgggaggaggagtagatagaattgggaaaatgagcagcctgaacagacgcagggagttggaattggatgggtggtggaactggggctgggggatagtgaggggtctgttcctgtggctctttgtagaggtggaggagactgcaggggtggaggtgtatggaggtagggatggaggtggacagggggagctgggtgtgaagcttagggaaaggtgatggctgaggggaagaagggaactgagagatgctgggtcgggtgatggaaggagatgaaaggtgggggaaggtgaccaggccctctggcgggaggggaggttgggtcccagtctggccgcaagccgggccgtgggagggagacaagctgtggatcctgattataaatgcagcttctgctacccccgtgacaggctcggagggagagaagggggtaagggaggtgggaggttgggaggaaagcagggagaatggaggaactgaaggtcaagggaaaactggattcaggaagtagctaacttctgaggagttgcagaagagctgagtagggtttgggagaattctccggaaggtgtttcaagacaaatggagggagaaaagagggtgggacggcaaagaatgagagagagagactgggggagagaagggagagatccagtcaccaagtgtggaggggccggggcagaaaaagtgggcaggcttagggggaaaaggaggcccgcccttcctgggaggaggcggaggggggaagagggaggggaggggcggcgtgggccagggaggtctgacacacccccacctcccctagatacaccccctactgatccgggaccggaggagcgagtccagtcgcaacaaactgctgagacgcacagtctccgtgccggtggaggggcggccccacggcgagcatggtacggcggccgagcaggctctcatgacccggacaggcgcggggagagggctgaagatggaccgggctggcggggcgggggcgtcggggagcggcgggagctggccgggggcgggagaaggcggagacaaagtcttgcttcccgaggggagatggcgccctcctctggaaggtggagcgggacaggggctgtgggtgagaggcccctgtgggtcctcgctcggcttcgctccctttctcctctccagcagtgaagtttgactattttcctggtgcttgtaaaaatagtctccttagatctttagcttccagtccgtgtgttcctgcccctgcccctcccagcccctggtctgggatcttggaaagaatgacctagttcctgccctccccccagacctcttccccacccctatgctcctgattcttcttccggaccttcagtccttgaggtctccttttattaccccctgttttctcctctcatcagctgcttctattttctgcaattgtatcaccctttctctttcctccctgatttctcttattttctgtacccctcttgattaccccgtccctcccctctgctcccggcgaaagtccatcagactcccatctcatctcctttctgtctgtagagctatctgcgcggtctgtctctccaactctctccctctctccatctgtctcttcccctccctccccctttctgcccccccaaccccctctttagtcatttaaaaaaagatttttgtcttcctgagaagttcgcttaaaaggtttccatgggaacagtgaggggagatgaaggcagagaacagagatctgcagccaaggtgcagagagacgccctcagcccccggaaaccccctcgtcactgcccccttccacttcatttcccttcccggacctagcgatccaggttccccattcctccaacccccaggtgacccctttttcccaccagctccccctcccttcaggaattcaagctaccagtttctctcccttagagagccagtgacctgtccccatcctttggctccttccagccttctgataggtccaggccctactagccttgtgggccggtttggggaccttgggtgggtgggtgggtggtcagggatgtgtgtcattgtcatggaaaccccataccatcggggtgtgtgggtagcacatctctgtgaggcaaagtcaggtggtggtggagtgtatacagagaatgtgtgtgatgtctgtcacatctgtgtgtatatgtatatgtgtgtatgtcatgttcatgtctggggaagatgtgtgtgtttgtgtgcatgtgtgtacacctgcgtttccaggccagaatggtcacatgctcacagagcatgtttatcatgtgtcctgtggttggcagatctgcccacttattccccatctttctccttatcctgagtcctcagggtctaggggtctctggcgggggtctcccgtgtgttttgggtggggacaccgtgtgtgtttggagttgaggtggcatgtggaggttgctgtattggggttcagtaggggctgggaggggttccaggggcatatgtatttggggggagggcttagtgaaagttgatgggggtgaacgtttagggtcttcaggcagacatggaatgtgtaaagggcatggaggatgtgcagtggacataggggtcgttgggaccttggggacttggcaatgccaaggtgtttgctgaggctgtggactctccagcccgggagaggtcgccggacctttgaggggcattggaatcctgggctcctcctctgctgggtggagccgcgaaccctcgttctctccgcggttttgtgtgtgtgggggggtcctgctcaggaggggatggtgggtggcctggtttgttttgggggtccccttgcccccctcccccgtctctctcgcgctgtctccgggcgacagggctcgtgacagaggcggccacggcagcagcggtcgcctagcaacggcggcggggcccgggcaacggcggcagcggcgggagcggcggcggagggagccgttcccgcggccgtcaccgcgcggccgtcccggccgtcccgggccccgccgccgcccccaccgcgccgggcggcgcgagccgggccgtaccgccccctctccctccgcaccccgcccttcccccgcgcaggggcggggcccctcccccaccggggacacccctggcccccccggggggcggtgcgaggtaagggcggggccgggcggactaggagcgcgcgtagaggggggggcgccgcgcgcgtggggcgggggcgcgcgtgtgcgtgggcgcggggaggggggtggggaagccgcggtggcggcggcggcggcggcagctgctccctccgcatgttctcgctgcatcttccgagtggggggagttatggtaaccggagggggacagcggaggacgggagggtcggggaccggcctcgtgcggacagggtcttgagcacgcgggggcggccggtgtgtgtgggatcttggagcccctggtggaaggggcagcccgtgtgtccgcgtgtgtgttcgtgcccatgctcgtgtctcctgtgtgtcggtgccatgtgcacacgggggcccagttcctcgtgcacacatgtgcagccatccttgtgcaagtgtgtcctgtcttatcttgcctctgcctgtttcctgcctagggggctgttgggccagccacgggcttgtggggcagtccgcggccttgctggtccatgtcacctctgaccctgagcatgcatatccctggctggggctcacctcctgtcaggcttctgtgtgtgggaatgtgtggccctatgagcaggattttctgtgtccctggtggcaggtgtgtgtctttgcatgtgtgttccagcactggcctgagtatctgtgtcaatcccagcatgggtgtccagggcgtgtctggatgtgggtggtgtggctggggggagtaagtgtgtgaatgtgttccttggaattctactgtgtatgaaacacctttgggctgggcaggtgtaagccctgcttggtcagtaagtggggacagaaaagcttaaaaagggaagaaatggggtaaagaggaaaagtggggaggggataggagagaaggaatgagagaggcttgaagaagagagcagagagcagcaggccagggagaaagaatagctggagaatgggaatgtgggagaaagccaagccagacttagaagagagaacaggggataagagcttaagatggggaactggatagagatggtgggagaagaaggggtctgggagctggggaggcagtggggaggagagagtcaggccttctggtaaagtgatctctgaaagaagaaagggaagaagatgggagaaggcactggattcttgtaggccttgcaggatcaggcttggttttggatcagggaaggccactcaggcatacgggctggctcacagtgaggcctgtcatagcagggactgtcattagaggttcatatccccagcacagagctctgtctcccatttctctgctctgtgtccaaccctgttcttcgcccttctctggcaacctccctcctctggctccccttgagagctgccagctgggtgtggagaggaagaaaggccaaagggaaggttagggatttggagggcagggggagattctgtgggtgatggcaagattagagatgttggaggggcaggagtccaagcccttgctgtgtgtgtgtgagtgccattgtgtgtgtacacagggtgtgtacatgtgtgggtgtgtgcacaatgcctgtgttacgggtttgtgtaggtggctgttatgtgtgtgcatgcgtgtatacatcgtgcaggcatgggacatggagacccaggatcacagtttgtgcttttcaggtttgctgtgtgtgtgtgtacacgggtgtgtgttgttttctctgtacatgtcactgcatgcagcattaataacaggatgttctgtgtttctgtcactctgccccccctttcctctgtgtttctgctattcttttcctgcggcaacaaaagtgtttaataagcatatgtgtatgtggcctctgtgtacctgtgacttatgagtgagttcatggatcttagttcttggtaatatgtgtaaggttatattacttccaagaaccaagcaagccaattagcaaatttgttcttctgttaatgctttagttccaaagcggaattttaatgcatttaaagttagactttatgcctttattagatgagcttgcacatgaaaataatggctgagctcggttccctgaaatgagagtgaggcagccatacctgagaaatgcagaaaaaatgttactagggaagagatatcctgaaccattggatgcattgcttagtgtgtaccagaaggataattaacacatttgctcctggtttttctttactctggtggcaatctcggatgcctgtgttagagtgagagaagggctgggggaggaaagggggttgtcctgagacagagtggatgtggttgtacttttcacgtgaatgaaaggatgtttgtgcttctgagatatggggatacctttctgtggtcaggatcatggtgtactcaagcatgtatttcaggggttaaactggaattcccctgcatggggatatgtgtgtcttagggttataggtccatttctgtagtgtgctgtccacatgattgcccaagagacttgggccacaaagtccacaccagcagctctcatgtgggtcactgggttcaagtatgtactcccttgttgcagagctcacatatgtcaaagcatgtatcctgtggggtgtgtgggcctcagggtctcagaatgtggatccgtgctatgcccgtgctcacagttgtctgtatgtctcaaaagcacatagatccccagttatttttctgtattgtggttctcatatacacgtacctccatagctcagtatatgtttctgtactatacacctgttcctgagggagtgatagggttctcgtgtcatggggtccacatttttgtatgcaaacctcctaacacctgggttttacaggtaaagggaagctgaggactgattctagggcagtttgcaggcaatttgcaattctggaagcagacagtgaaaatataattgtggtcctcccttgttctgttctggaacctagagggttaacaggcagctcttccggtccacccccctccttccagcctgtagcttcttgttgccgtggagatggtggccccgccccgatgcagcacctgcccccccattggctgcagtggtgactgtggggctgaggggggagcccaggcctgggcagccattctggagctggagccggagcttggcatccccccacttacattctcttccagcccctcggcccctctaaattcccttgcagccgagcctcagcttcctttttcagcgcttgccatccctctaggctcttggcagactgagctgcatccgcattcacctcccctcctcctcctttccctatccttacttgggagtcccgagaacccccactgtccatccttcctgctccctgcccattcccctgcattctttgcttttcccctccccccaccaaccttctgagcccctgccactgcagtgcacgtggaaccggctccttctcccttccccccacctgccccttccttggattttctgtccccagcttctccccctgctactcttcacaggtctcttccaagacctccccctccagtccagggagggggtcatgggaggcagccctggccctccagacagacaggggttccaggaggtggggggcaggtggaagatgtgcccaccagggggaagaggaaagcctgcctatgggcaatgacctttaacccatctttccccccagctagccccttctggggtgggtgggcaccagggacctagcctccctggatctttggtgtccttcattactggggttttactgaccctctcagccatgctcccctgctgactgccagccccagtcatgggcctaaggcctcccaccccatccccctcagggggctcctgctcaggttccttgccccctccttcccgctgccagcctctccgccgtcgctgctcttcctgctgctttccggggggtaggtgaggccggagctgaggggcagagggaggtgggggcatgcactggggtcaggggtgggaacctgggttaacagcttcccttctggccccctccccaacttcccttctggccatttcctcccctccagaataccacttgggtcgctcgaggaggaagagtgtcccaggggggaagcagtacagcatggagggtgcccctgctgcgcccttccggccctcggtgagtggtgcctaccagatgtggctcagttgggccccctcccctccagccccaactggggccctaggagtctgagaaagagggcaggagggggagagagggagtgagagtgagaaaaagagtgtgtgtctgtgtgtgtctccccacctctttggtttcccccttcttggctctgcccccctgcttctgagaccagccctcccaccttctccaagctgtgtgtgtgtgtatatgtgtgtgtgtgtgtgcttgcactgtacccgtgggagcaaggaagacaaactggtattagggttcctatccccctttcctcgcctctggagacttcccttttccccatcccactttcatccaggggctctctaccagctgagggatgagtaggtagaactgaccctgccccaacccaccccatccccatttcccccccagcaaggcttcctgagccgacggctaaaaagctccatcaaacgaacgaagtcacaacccaaacttgaccggaccagcagctttcgccagatcctgcctcgcttccgaagtgctgaccatgaccggtacaggggctggagcatgtgggatgagattgatgtaatgtagggtctcctgtgtgagatgcagagggagggggttatctgtgtgcaaaggttgaaggattcaactcaagttggttgggggatgtcatggcacaggggacagaacagaaaagaactagaatagggatctgtgagcagcaggagaggggtagggtggcagagagaagacagacagacaggctggaaagggaatgaaggtgaagccaaggagggactcctcagggactcctcaggccaagaaggatgggctctagcccaggatcaaaggagctgtacaggaggagagtgaccctggaggaatgtttaaggaatgcagggaaggggttggtaggtgagtgagcaataggctgtaggtggaagggtgtcagggaaggtcaggaaatacaggggcagcaggttggagtggggctgggggtggctgaatgaatggatgatggctagggctcaaggacctcatcagtgagggaagagacagtatagagcatggcagagaaggggaggctgggacaggtgtgcagggtgacagaatgggaagcaacccatggactgaggcatgaagaagcagccagcggagaagtccagaaggcactgtccctgagaccaggctgaaggagacctccactgtttgcctttgttgcctgccatttggggttcctctctgggtttccccctcacccagtcactccccagggagaaccatgccctccctttcccccatgtctggccacccccaggattgggcaggtagggaggttgggataaagtgagtcacacctttccctgcccccctcccatgttgccagagctggatttggggccggcagggggtgagggcatggtattcctggccgcgggggcgggggggggggtccgggggccgggggagcgtcgcgctgacggcagccagagcctgcgatgacggggctgctataaataacttcttggaggctcccacacccaagctcccctcccgctttcccactgctctctactcttcatcccctgcccatctccataccgcttttgtattgctatcctacccctcattattccatgcccctagccccctttatcttctgccctcctgcagtgatttttttgcattccatcccctcttagccctcacctcggttctcccggccatctctccagttggccttcctcctcttctcctgtcctctgtcttgctgcacatacctttgtctccccctttcttcttcttgccctacctcctcttcttccctagtccgtgtattctgtcttttatcctctttgagctcttttctgcccacagctttctcctatttcttatgcttttccctcactctttcccctgcttctgctaaaacttgtcctcttatgctgtgttcattcattctttgaatcattaaatgtttatcaggcactagccgtgtgccaggcccaggctagacatatctcttctctgtgccttcacttctttacttccactttttcctttatactgaggctctggtttctggggttacctggaggtactacctagaagtgccccaggcccactttgttctctccttttttttttttcttttctgccatggtccatttctgggttgagatatttctagatgtccccagtcctcgcaatcccttaggtgtgagatggtgggagtttcttttttttcctttttttttttttaaatagaaatagggtctcactgtgttgcccagactggtcttgaactcctgggctcaagtgaccctcccacctcggcctttgaaatgttgggattacaggtgtgagccaccaggcccaggtggagcaggggagttccttaaaggattctgatttttctcacatccctcacgtccttcctgataggcagggtttctttctgtgtctgtttgggaagggtgttcagggggccttctctccaagtctccatcctggaacagactgatgatgcagggtacctatgtgtctaagaagagtaggggggccgggcgcggtggctcatgcctgtaatcccagcactttgggaggctgaatcacttgaggtcaggagtttgagaccagcctgaccaacagggtgaaaccccgtctcagctaaaaatacaaaaaaaaaaaagaaaaaaaaattagctgggtgtgctgaggcaggagagacgcttgagcccaggaggcagaagttgcagcaagccgagatcacaccactgtactccagcctgggcgacagagcaagactgtctcaaaaaaaaaaaaaaaaaaaaaaaaggaagagtgggaagccctgatcccttcctctcctgaacctcctgcctgccagggcccggctgatgcaaagctttaaggagtcacactctcatgagtccttgctgagtcctagcagtgcagctgaggcattggagctcaacttggatgaagattccattatcaagccagtgcacagctccatcctgggccaggagttctgttttgaggtactgggtctggtgggctggggagggccaaaggacaggggtgatggaaggtggggggcagagaggtctagagaaagtggcacaggtggggacatcaaggaaacagaaacttctgggactggaggaaagggtaggccagggaggaagagaaggtagcagagtctcctcccctctgtagccctttccctcaactccacactcctttctaggtaacaacttcatcaggaacaaaatgctttgcctgtcggtctgcggccgaaagagacaaatggattgagaatctgcagcgggcagtaaagcccaacaaggtattggggaataaaggggacacaacctgtgcagggcaaaggttgcaccaacacgggaagctgggggcctagggaggaaagtgagttaaaggaggagaggcttggggaaggagaggattgaggtacagtgtatctggacaagcagggggagacccccattattctgagtcccccatttcttttcgctttctgtactgctaccctgccttacgatctctttccctgccatagaagtcatagacttacagagttgatggggctctggaaattctttagtctagcttccctgcaggcaggaatgcttcactaataccccgcaggacacatcaaatacacttagccaagtttctgtaccttggtttcctctctaagacagagggaactggtggcaatgggttggattaaatgatctctaaggtccctttggcacataaattctatgagtctgttcttcccaaaacttcatgcttccagttctgtcagctattctctgtatcccagtttctagcaagcttacagtcctagtcacactcctctggggggaactcttgtgtcttgatgtccttaaagaactcaacccaagatgctgacatgatctgacctatgcagagtacaaacaccatgttccctttcaacacactgcaatatcacctgagccttaccattagcttgtgctcaattgtatccccccaggcccttactgattcttttttttttttttttgagacagagtctcactctgtcacccaggctggagtgcagtggcgtgatcttggctcactgcaacctccgcctcctgggtttaagcaattcctgtgcctcagcctccccagtagctgggattacaggcatgcaccaccacacccgactaatttttgtatttttagtagagacgaggtttcaccatgttggccaggctagtctcaaactcctgacctcaggttgtctgcctgcctcagcctcccaaagtgctaggattacaggcatgagccaccacatctggccaagctttacccattctatatgcaattcttttttcacaatttctgatagtctctgcaggactttccagttcccttcaaattctacattaatatttttggcttgttattccagcttttgaaatctttccaatactgtttgtgttgtctagtgtatgtctacgcttctacagtagcttcctggggctgctataacaaactgctacaaactgggtcacgtaaaacaacagaaatttattctctcacagttcaggaggctggaagtccaaaagcaaggtatcagcagggccacgctctctttgatgctgtagcagggaatccttccttgcctcttcctagcttccggaggttgccagcagtccttggcattcctgggcttataactgcatccgtctaatttctgcctccatcttcatgtagctggcttccttctgtgtgtctctgtatcctgtatctctgtgtctccaaatctccctctccatataaagacaccagtttttataaggtgggttaagggtccactctaattcagtatggcctcttttttttgagatggaatatcgctcttgtttcccaggcttggagtgcaatggcatgagctcagctcactgcaacctccgccttccaggttcaagtgattctcctgcctcagcctcctgagtagctgggattacaggcacgtgccactatgcccagctaatttgtttttgtatttttattagagacggggtttcactatgttggccaggctggctcgaactcctgacctcaggcaatccacccacctcggcctcccaaagtgctgggattacaggaatgagataccatggctggcctcttcttagtttgattacatttgcagggatcctgtttccaaataagatcacattcacaggttcagggtagacatgagttttggtgggatactattcaacccagtacaccgtctcaccttatgattgctgtctgtatcccactttcttactgtctctcctcttttggtgtctctctgtcccttccccctttaacatcatgcccaccccaccatgccaggacaacagccgccgggtagacaatgtgctaaagctgtggatcatagaggcccgggagctgccccccaagaagcggtactactgtgagctctgcctggatgacatgctgtatgcacgcaccacctccaagccccgctctgcctctggggacaccgtcttctggggcgagcacttcgagtttaacaacctgccggctgtccgtgccctgcggctgcatctgtaccgtgactcagacaaaaagcgcaagaaggacaaggcaggctatgtcggcctggtgactgtgccagtggccaccctggctgggcgccacttcacagagcagtggtaccctgtaaccctgccaacaggcagtgggggatctgggggcatgggttcgggagggggagggggctcggggggtggctcagggggcaagggcaaaggaggttgcccggctgtgcggctgaaagcacgttaccagacaatgagcatcttgcccatggagctatataaagagtttgcagagtatgtcaccaaccattatcggatgctgtgtgcagtcttggagcccgccctgaatgtcaaaggcaaggaggaggttgccagtgcactagttcacatcctgcagagtacaggcaaggccaaggtgagtgttgtgccctcagggaaaggtgacttgggaatgggcacttgcttgggggttagtgaggacagggcaaattcacgagattgggttgtgcagaggctgacacttggattttcctgggcctcaggacttcctttcagacatggccatgtctgaggtagaccggttcatggaacgggagcacctcatattccgcgagaacacgcttgccactaaagccatagaagagtatatgagactgattggtcagaaatacctcaaggatgccattggtatggcccacactcaggccctcttcttcccaaacctgccagatgtccaccccagaccccaagtccacccttccacagcttgatacttcctaacccagagtcctaggactccagcctccaacacctgattctgaaatttccccaaccctggccacccccttccctgcccttggaaagtgtgaccacaccctcttgtgcccccaccccccaggagaattcatccgtgctctgtatgaatctgaggaaaactgcgaggtagaccctatcaagtgcacagcatccagtttggcagagcaccaggccaacctgcgaatgtgctgtgagttggccctgtgcaaggtggtcaactcccactggtgagactgggaacgctgggctggggggccagggtcgggggaattatgtgttcatctgttcatctatctgtccatcctcaaagaggactgagcaccatttatgggcaaagcattgttctaggcgctatagagcaaacaggtgaaagaggcctggtccctgccctcagagggcctccaccagaatggggacaaattagaagaaaaaaaaaaaaagccacagagccataatggtgtgtaagtgctgagtaagggtccccccaacctctgtgtgacataaggtcagagagaaggcagagctttgagataagtggggaagaggtgcccccttgggtaggctttgaagactggtttaggttctgatatatggacatagttggcaagaaagacatttcagaagaaggctgtgagaaaggcacatgtgtgatggtgaaaaggcccaggagttttcaggggacattaaagtaggttagtagcaattacatcaggtttagtggagcatgtgcctcataatggggagtggcgggagagatgtctgggcaggaagattagctttagaaactggaaggcctcaaggagtctgaggtcattggtaggccttgggatgccattaaaggtgtcagaaatattgtgatttagaagattaatccataggctgggcacggtggctcacacctgtaataccagcactttgggaggctgaggcgggcagaccacctgaggtcaggagtttgagaccaggctgaccaacatggagaaaccctgtctctactaaaaatacaaaattagccagatgtggtggcacatgcctgtaatcccagctattcgggaggctaaggcaggagaatcacttgaatctgggaggtggaggttgtagtgagccgagatcacacgattgcactctagcctgggcaacaagagtgaaactccatctcaaaaaaaaaaaattaatccataagtagagtgtatgtagtagagtagagggatgtatgttgggggatgactggaatagagccagctgggggctcggaggcatgaaagtcagatcctgaatcagaacagtgacagaagttaggaaggagctactggaaggaccctctcgggaaaggatcagtaggaattgtcagcttattggaaaggagggagcatgtctgtggggagtcacggatgactcaagaggccatgaggctggtggttgggagaccggtggcctcattgacaaccaggaaagtcaggaggaggagccagttggaggtgtgggggcgatggtgagctctgctttacaccagccgagtttaaggtgtcagtgggacattgaagtggaactgggaggtgcggggagtgagctctgagccattccagggactggggatcatgcctggggcacctccatccccatttccctggaatccagaagagttggggggtccgagctccctgtacctcaagtgaccctccatctctctcccatctctgtctctccctggtgtctgtttttcttctcctcctctccttgtctctctcccacacccctccatctctctcccacgtgtctctcccctcaccttctctccccctccatttctctctccctaatctgtctgttccctctgccatggcccccttcttcaagcagcctcccatcttgctcctgcggtccctccttccctgtctctctcacccctgtttccacaccctcacctcctaccacccccctcagcatgttccctggaagctgagggtctctggggctcagtcccggtctctctctttctctctctctctctctgtctccccgacccttccccccagcgtgttcccgagggagctgaaggaggtgtttgcttcgtggcggctgcgctgcgcagagcgaggccgggaggacatcgcagacaggcttatcagcgcctcactcttcctgcgcttcctctgcccagcgattatgtcgcccagtctctttgggcttatgcaggagtacccagatgagcagacctcacgaaccctcaccctcattgccaaggtcatccagaacctggccaacttttccaagtgagggaagcttcaggagtgggcagggcagggagtggcagggcagggagtggcagggctgggggtcggcaagaagggtctcctgagtccccagagatcctgagatggggaggctatgataccttgtgtgtgtgtgtatgtgtgtgtatgtgtgtgtgtgtgtgtgtgtgtgtgtatgtgacctttatcttctgcattcttggctaggtttacctcaaaggaggactttctgggcttcatgaatgagtttctggagctggaatggggttccatgcagcagtttttgtatgagatctccaatctggacacgctaaccaacagcagtagctttgagggttacatcgacttgggccgagagctctccacactgcatgccctactctgggaggtgctgccccagctcagcaaggtcagcagatcccctctttgccctatccccagatggctccagaggttcctggagcctgagaaactaccctttgaagattttttttctccccttgtttctcgaggtgtcaccactactatcccaactcaggccccctccacctgcaccctcagaggccctcttagagctgggcactgagcccccaggtaacagcctcacccttccaggaagccctcctgaagctgggtccactgccccggctcctcaacgacatcagcacagctctgaggaaccccaacatccaaaggcagccaagccgccagagtgagcggccccggcctcagcctgtggtactgcgggggccatcggctgagatgcagggctacatgatgcgggacctcaacaggtgagcaccctgggacagccaggcctgtgccctaggagcccttctcctattctagatactcctcactgggccccacatgcatctctctagggcttgaaagaagggaggaaaaagcaccaagttctcaggggagacgataaggagacaggtacagtcagtggtaggctgagagccctttacagcctgagggagtgagagatttggagctctaggaatagggctgaggctccaccaactcacggcttagttgtaagcctagagcatccctgctgcaagctctgatttgctgtccctctgcctgcccatgctagtccccaggctgaggttcagccagcatgtcatgtcagccatgtgtcaaaatgttcaaacatctcagtaatagctagtgaataagcacttcccccagcccccgaccacaaccccacagacctccccatgatccagcacttagagcagtgacagcagaagcctagcagggcctgcagcctgctccagagtcccagcctccattctgataggtggtgcccgtgcttcatttgctgctcattattttgatgatggccctgctttttcctctgcccgtgtcttcctccatgacaccatacccatcccaccattcccgcctctcctttcatttgtccacatctctctccttctctgtctgtgctcgcccctctttccatctctctccagctccatcgaccttcagtccttcatggctcgaggcctcaacaggtgaggggctctcccctcccccgccctcctctcctctcctgtctgttccctctcccactccactggccttcgccctactcctctcctctcctcctccatggacctcatctcctccatatgtgcccagccctgcccccatcccttctcttgctgcccccatctcccctcctctaggcctcacccccttcccggaggggccctgtcctttccctttactcacctgtcccctcccatcctccctgcctgccctcttcagggctgccaccgctagctctcagcccttccctctgggtcccacttttcaccccaaggcctgtgccagaccacagcaaggttcaattgctaggagccctgaccttaccttctgcttgtgtgcccccttcccttctgacagctctatggacatggctcgcctcccctccccaaccaaggaaaagccacccccaccaccgcctggtggtggtaaagacctgttctatgtaagccgtccacccctggcccgttcctcaccagcatactgcacgagcagctcggacatcacagagccagagcagaagatgctgagtgtcaacaagagtgtgtccatgctggacttacagggtgatgggcctggtggccgcctcaacagcagcagtgtttcgaacctggcggccgtaggggacctgctgcactcaagccaggcctcgctgacagcagccttggggctacggcctgcgcctgccggacgcctctcccaggggagtggctcatccatcacggcggctggcatgcgcctcagccagatgggtgtcaccacagacggtgtccctgcccagcaactgcgaatccccctctccttccagaaccctctcttccacatggctgctgatgggccaggtcccccaggcggccatggagggggcggtggccatggcccaccttcctcccatcaccaccaccaccaccatcaccaccaccgaggtggagagccccctggggacacctttgccccattccatggctatagcaagagtgaggacctctcttccggggtccccaagccccctgctgcctccatccttcatagccacagctacagtgatgagtttggaccctctggcactgacttcacccgtcggcagctttcactccaggacaacctgcagcacatgctgtcccctccccagatcaccattggtccccagaggccagccccctcagggcctggaggtgggagcggtgggggcagcggtgggggtggcgggggccagccgcctccattgcagaggggcaagtctcagcagttgacagtcagcgcagcccagaaaccccggccatccagcgggaatctattgcagtccccagagccaagttatggccccgcccgtccacggcaacagagcctcagcaaggagggcagcattgggggcagcgggggcagcggtggcggagggggtggggggctgaagccctccatcaccaagcaggtaggtgaaggcaggaggaaggcgggctgggtcacaacagggagggaagaaggagatggggggtggggttgaaacagagtctgtggcctgaagttacaatcttcttgcctccttttggccattaaacaaatgtgtatagagggcctgctatgtgccatgtgctatgccaggcactaaggatacggcactgaaccctcttagcactctcattccagaggggattaatccataagtagaatgggggtgactggaatagggccagctgggggcttggaggcatgaagatcagatcctgaatcagaacaacaggagaaattctctggcattcaactcacatctctggcattcagaggtgataaaggctacagcagggcaataggactgggactgtcgtctcctttggctgtgctgttgccctctaaatgtaccctgctttttcccaccttttctttctctgttcgccctcactgtgccttgtcccagcattctcagacaccatccacattgaaccccacaatgccagcctctgagcggacagtggcctgggtctccaacatgcctcacctgtcggctgacatcgagagtgcccacatcgagcgggaagagtacaagctcaaggagtactcaaaatcgatggatgagagccggctggatagggtacgatgggctctaccagctccaagccccagtgtttccttttacccacaggggagatctctagtcacttccaagggaaacctccagggtcagttatggtggtaagaaaaggcaaagacctgatcacctcttgagaagccttccgtccatctggggagaccagatacacacagttgttaaaagtcactttcaactctattttgtaggttatatatatcatagactatctggggatcatctattttaggcttacctccatgttcttccccaggaggaacataagccctggctcctgtgactgcttaggaaaggaaatgttactttactggcagtaggagctaataaattggatggggatggagggggttgcagctatattacaagtgatgtctggcctacccagtcactgtcccatgggcataagtgacagtcagtgggcagggaatgcatgtggtaaagtagtatgtatcagtcatgtgtgaaaagaccatccagaccctcacttggtggaggctgagggcaaagggcaccaagagctctggggctaacacagataacttagcagaaagttacttgaggaagctgttgttcctagggcctgaggaagagggcggctgcaggattaggtcatatataaagaacatatgatcctaacacggggaagtggtctttgagcataggaaatgttgggactgactcagatgggcttgaccagcaaatttaatgagaattaaaccctaatattagccccaaggcagccaccgtaggaagttaattcacatctctcctctgcatgtagaagggttggtgatatatgtatgtatcctcttcagagaatgaggaaatagtcttttgaatcatttttttttctgtgcttcagatgaggaaaccttgttgagaaaggctgtagactagcactatccaatataactttctgcagtgatgaaatgttctgtaatctgtagtgttcacatgtgtctagttgtgattcaggaactgaatttttagatctatttaattttaattttgtaatttttttgagacagggtcttgctctgtcacccaggctggagtgcagtggtgcaaacatggctcgaggcaacctccgcctcctgggctcaagacatcctcccacctcagccccctgagtagctaggactacagggtcgtgctaccatgcctggctagttttttttcttttcttttttttttttttttttttttgtagagacggggttttgccatgttgcccaggctggtctagaacttgtgagctcaagtgatctacctgcctcagccttccaaagtgctgggattacaggtgttgagccactgtgcctggcctaaattttaaatagctacatgtgggctggtggctaccatattagacagcacagctgtagactctagagccaatagggcagataaaatgactcttctgagctcttccagctctggaattcctagattctcagcctagaattcacttgtagacctcctatccttggcaccttgacagagccaaggagagggtcacatggaggacagcacctgcctttcccccgtcaattgccttttcttcctatgtctccagcatgtgttctggggcctggcttagggctgaagagtcaccctatttttaatttctgagcacagttactcaaggtgtgtttgtgagtgtaggtttctgtgtgggtcttcatgaggggccatacatagacctcagggtgtgggagtctgtgaccttgctccattttgagggaacctcagcaccatggcagggtcttctcaaaagcaggtgtgtggatatgatccacaggcagggaaggggttggggaaggcagctggatgtccctcaacatgcagtggctgtgcttggcagacagggatggaggctgggtggtgggcttggggtggggcgcccctcatagtgcggggtcgtgtgcccggcgggcaggtgaaggagtacgaggaggagattcactcactgaaagagcggctgcacatgtccaaccggaagctggaagagtatgagcggaggctgctgtcccaggaagaacaaaccagcaaaatcctgatgcagtatcaggcccgactggagcagagtgagaagaggctaaggcagcagcaggcagagaaggattcccagatcaagagcatcattggcaggtgaggggcggcctggggagggggttgtgagggagagcctgaggctggagagagcaagtgggtgagctactccgctgactcccatccccaaactcaggagcccaccaggagagcccaccactctcctccccaggaagccacccactcactcatcaccagatggagagaaaccccaacctgcttagtgcattaaatatctctttaccaaaccctgacctctcttctgatagagtagcttcggaagcccttggaaaatgtacctgttcctgtccaaccatcactgcatttgcatttaccctaggccagagctccccactagttattctcaacttaacctgtgatgttcactccaaacctaagcagggctccctagccagagtaggccctgcccttcctgggtggaccctccctctctagccttggaaaggtgttctgttagaaagggtcttttagcctgtgtatgttttcagctgctccagcaagtcctgggctccaaagagggtatcctcagcaaagaggtcaattatcttcagagtggtggggtcggggtgggggggaccctgggcgcactccaaccagagccacctccattttgatccattctaaatgtattttatgtaagatttaattagaagaaaagggcttcttgaaatattttttgaaaaccactgctctaattgatatcctttatgataaatcacctcgaggatcttcacagtgaggtgacatgggggatgcagaagccaggtcctcagccatggaaggtctggggaaggggcactgctgtcctgattgggacgatggaggcctggaggtgtctggatggtagaagtctttgaggcacagaaagctgccttagcagggaggtgtaagggttcctgggaggaaggtggagagcatgatcctgaggaacagggagtcttgcatcacggcaatggagggactctgattctaagggataaggatgcctgaggtttttccagagagctatggggttccatgggcaggctctgagcctgtgcccgccactaaccccactgaagcccgtcccttcaggctgatgctggtggaggaggagctgcgccgggaccaccccgccatggctgagccgctgccagaacccaagaagaggctgctcgacgctcaggtggaaattacaatgtcatttatcttctccgtgtcccatccccatccatcccactgtctttcgtgcactcactacaccagccacctagccccatcaccatctgtctctcatagtctgctgtttgtccactggctgctcctggcagccccctagtgaccccatcttcatcccatcgtctgtgcctttgtcactcctggcagcgtcagcccaactcctgtgccttcccatccagtcttcccactcctctctgcatctcaggaccttctctaccagaaccttggtctttctgcccctagaccccacctagttccaagaacccctgccccttctttgctcactcctattcaagccacgttgttcagcttcctctgcgctcttgggccagagggctagaagctgccgttttctggaatagagcacagggcagtatgatctgtagtttctccaggccctggccggtaccctgaaaacttggggacccatcacctctgttctcttggctccctaattttcctgtctccttggcagctcctgcatagcttcctcttcctgactcttcagatcttgaaggccttccatcctgtaacctccctttgccctcagtatttaagtccagcctccctctggcctccctcccactctggccctcagaccttcccagctgcctgctgcccagcctctcttctcacaagccagcttctaggacctcccttctgcacccttaccccttgctttcccaaaattctgctcattttcctacccatactcctctttgctctgactgctaggctccccccgcctgccatccccccaccaaggctcctgaccccatgaccccactctctcccactgcagctcctcatcaggtaattctcctggttccgctttggccacgggcggaggacacagggggaggtgactccggaccactgcaggttggtcgtgaagcccactccctccaacacctccggagcctctcccctctcactgctgccctccacacccagagaacctccacagactccagccctccgacacctgcacagatccatctcccaagacaccacccaaagagagcatttgctgctgcttcccagaactgtccaacaataccttagcaacaccaagagttgggccctagatgggcccagcacattcacaggtcacacccacttccctgcaaaacccaccccctcccagcctcctcctgactctaagccctcctcttcctctacctctccagtgtatgtctgtcaccccccatttcaccagagcgtccttaggggctgggggtgggtttgttaatggggtggaggcaatgatgggttggaggatcttggctataggggctgtgctgactgcagcaggtaggttgggtttccctcttccttccctaatcttggttctctaccctcctttccactcctcacctgattctctctcttcctcctccttatatctgtgaggcagaaggcatctgaagctcatattagcccccattgggtgggaattaggagtgggtagttaactcagggagacttgagataccctggaaaaaatgctattgagatgtcctgacattaggcagggtggatggaacaagaaggagcaagaaaggaacctcaggcagatgttaggacatggacttgatcatgtggcctgggagtttagaaatggggagagacatcctcctagatcagatcgtgggctcagtaggcatgttgattcccagggagaggtgccaggaacagcatggtaaagaatgtactcttcacagctcacatccccaggttgctgatgccactcactccccctctcctgccatcgagtggccttgccggacacatcaccctacctaaaaagccagtaaatgagaacctgtcagctatagccatcatttctgagatgcgattttctttgggattgagctgcagtgggcagtggctccttacactgtaattttaattctctgcctgcccagcctctctgtcaaagtagctggtgatctataaagatgctaaaaggcaccaggggactttgccatttaaaggactcctgcagtgaattcttttgtaaaatgaataatggcaccctaatttatccactttctaaatttgggtccatgggggtgtccagggcatgcttatgtgctgtcaccagcagacaaacagagggaatggaatctgggggttccttccctgctctcccgccatactcaggataccctaccataagtgatttcctctcactgacttgcagaaaatgtgtgagatacccagcaagctaagaaggcagttttgctgggtatctcatacccaaggctggggtttgggtgatctgagaggttagctccttgatcctaggatggaagggagagcttatatagaagcttttacttggaaggttttgtatcctaaggtcagacatagctatattaccaagcctaaatgccatgtggcccaggaaataatttggacatttgttctaaaccacttgtggtaggtattggtctctctgcaactcagccattaattagaaattagttttgagcctgaattttaaaaagccaagtgttgcccccagcccacacacacacacacggacatgtacagtacaaaccccagataattacaacagccaaagagagaaggaagtgaatttcccaaccagaagcgtagggaaattcagatggctttcttttctcccagcagaggaacagaaggcggagctaagggcaggaaccaggagttggtcaaggagctataggaggtgatgagagtagaaccaggggtaggagctggtctggtacccctcaccctctaattgggagcccagggagaaggactgaaaagaagatgggagtggaaaagaataaagccagtttctgcttcccagggatgcagagattggggcatgctgtgtctgcagaagctcctagtcatttccgccataattgtgagagagaggggcagccctcccacaagatttttcccttcccatatcacttccctgaatccccttcctttccccccagtacagttaaacctctctctaatttggaatgttatatttgagaagatggccactgtgaataagtgacaaacggaatgacagtgtctatttaatgaaatgcatgtcttcaaaatatatacagaactcgatgaacaaggctttttccactcctcagggagcatgcattaatgaatagataggattcaaaagtctgttttctggtatgggttaaatatcccctcctacagacatatttccaccactaatttgcttagtacaccttttcttcacagataaaggaaaatgcaagctcagtttttcttcagattatgaagaaattccaaatccacaggggtttggattaatgaggttttgctgtactgcctccccttattcctcaacatgaagttcccacctcggattggggatgggtgggagggggtttcaagaggaggagggtgggatgggcaaggaatatacacaggtgaagccagagaagggttaggttgggggtgcggtgggaacttgctgttttgatctggtttcctggtgtgacactctgggttaaaggcttgaaggcccctgttaggagtctaggggtgagattctcttctctctgatcccagaggacgttaacttctactgcaggtgagaaacaaaataggaggatggtggggactgtcctgggaggagggggtggtccatggcttgtggtgtgggctggctataggggaggccactgctaggggactggcatccaggcccccttgaagcgtctcaataagtccgcgctctcctttttggtgtcttgcaggagaggcagcttccccccttgggtccaacaaacccgcgtgtgacgctggccccaccgtggaatggcctggcccccccagccccaccacccccaccccggctgcagattacggagaacggcgagttccgaaacaccgcagaccactagcccacccagcatcagagaccttctcttcctttcctgtgcaccccaccctgtaacagcaccaaccaccaggattggacatcaccgaggaacagcgggattgcctccccgaatgcctccctgggaggcacactgattgcccacccccaccactgcaccatttccaggagggagagtggggaccctcagccgcccccttttccttcccattggggtgctgccctctctttgacccccagggacccttgccccaggacaccgcctaccccgtacagaccccttcactccggggtgctatccccatcctctgcctcatcgttcccctgagcactgggggacagaccctcacccccaccctgggggtgtggcacctccaaactttcaacttcagggtgatttttttagcagtaaccagagctgacaatctaactcccctccaccgccccattttggcctcccctgccccccttgttatggggaggggaccccgggtgagggggccctattaccccttgatttctcaggagcgtctgggggggctcagcacgcacaaactccttctccttctaccactcttaaatttactccctccccacccagaacccagatggggtggagggggccaccggggcagggagggggcggcaaggggggaatgggagttgtctccccttctccccacacctgatctgctctcggctggtcccagagcggggtgagggggcttatgcccccccctcccccagtgtgttgggtggggtggaattgaggttagggtgaggggtcagggtttaggagggtgtgtatgttgggaggacaggctagttgatctgtcctactctgacacacagtcccctctgccccttccttctctcttcttggtctctactcccagggggaggggggaacttactctaggaaaagccatgtctctctcccccagggtggggggacctgtgttggaggaggggtgttggggggcccccttccatgactctgtcccctgggggaggtaggacagggctgggcttccctctcatcctccccctcccaatctccttccacctccctccctcccgccagctccacgatttttcggtgtttctctgtacatagttttctggcgggataggggaggtaggatggatggggtttggggtgggtaggccatgggaggggagaagcccctccttggcaccccctcttccctgactgctgtcccctacccagccttgcccccttcatccttttgcgtttggtattgagactctcctagactctactcctctttcttttgtatggacagttccccttcagtcccatccccctacacatacacccagccggggccaaatttatacttatataaaagttgtaaatatgtgaaattttatccctgtgccctttccccacctcaggccctacccctggaccctccccaaccttccttctctcttctttggctgttgtaattatctggggtttgtactgtacatatccggggtgtgtgtgtgtgggctgggggcaacccttctgtacagagcttcctggccccctccccccccgcccctctgcttccctccccacccaccacctcaagggtagggagttgctcttcctacctgttttattttgttttctcgttctccctccccaccccactcccagccttatctatcccccctcactgtccccttttctccactcccagccccatttcctttttttctggagtgtgtggtgaaacagaaaaaaacatgtttaataaacggagattgttctttta

SEQ ID NO: 15842 - DNA, 117314 bp, Homo sapiens; identical to SEQ ID NO: 1275

SEQ ID NO: 15843 - DNA, 48900 bp, Homo sapiens
gcggccgcgacgactgcctgctgttcgaggccggcacggtggccacgctgggtgagtccgggccgggggcagcgacgcccggaggagagggcgcccgcattcgcccagcctcgggaagacgggtacccccccttcccgaggggatcgggcggcgctgggactgccggggcgtaggggtcgcgcgcagaggggtggctgtttgaatgaagtggggctggggactcgagagagcactctggctgggccggtggcgcacggaggccggccgcccctccacggggatctccggcccgcgccgccagaggatatggttgctggatagccggctggggcgctttgcgtattcatgaggatcccggggtgttgacttagccggcctgaccctgtgcctggcgccttttcttttgcacctgttgatgaaaccagtgattgccctttggtttgtgttggcggctccactcctggaggggatggggacaaaagccccaaaacataggctctggagaaaccgctgatggcagctttgtcccacgtaaatacttggtcgagaagcatcggtgctgcaatttatagaacttgtaaacaaatataccatgacctttatgctgtcttagatcctgccaagccagcgaatttcacctatggacttcagaagccttgaaactggcattgtgctatgggctttagtacgtgatctcacttaattctcacaattctactaaaaagctattattatccccattttgcagatgagcaaactgaggcctaaagaggctaagttgcttgccaaggtgacaccatccacctgacttttatgtggctgtttctgtaatgtcattcaatgcgtggcttcctggtatcgctaacctgggtcccttgttttgtgctaaccattataaggaaaacctgggtagcaccaaagcacgtgaaaccaggtctgattgttagacttctaaatgtggacacccgagagtaagctcccaccactaggcgtccagctgtaacagcttgccggtattcctagctaaacaaggtgcagcccggggtcactcgtacttgaggtggtcggcaaatgcagcaggctgctttgtagatgcctctagccttcttttcacatttgtatgcatcgactcccgttcggatgtatgtcttggaaggactatctctcctatttctgattccctaatcatttcattaacatgcatttatccagcttgttctcagtcacttgattactgaaacaatgtctccagtagtctcagcatcaaaagtaggcagtgaattgtagattaagttattttcagattattctaatttgtgctgtcctgaagagtctaagtttggttatttggtgtggccttgaaagaaaaccacagaaatttccattccattttagatgtctacttcataccacatttatcggaagcgaaagagtaatttcatggtacaaaactactgtttcatcaaatagattaagatgtccttcagttggattacggcaacattaagccaagttcatacacattcaagaattctttgaagcagcttagaaaaaagagattttattttttcaaaagtgaagatttaaaaatgattaatgacagtaatgtagtgcatattttccattaggagctgaagtttgggctgagatttacatcacggtggtgattacagtataccagattttagaacagagaatgtaagaaaggaattggctcgtcttcaactcatgtgcagtccacatttgtcatttaacctagcattcatttttcagtagaaaactttaaaaaaaaattttttttttttttgaaacagaggcttcttctgttgcctaggctggcatgcagtggcacagtcacagcccactgcagcctcaacttcccaggctcaagcgatcctcctgcctcagcctcctgagtagctgggactataggcacatgccaccatgcctggctaattttttctctttcttttcttttctttaaatggggtcttactatgttgcccatgctgttctcgaactcctgggctcaggtgatctttccgccttggtctcccaaagcgttgggattacaggcatgaactacttactgcgtctggcctgaaaacttaattttttaaagtctgttttgtttaagtaaaatgaaactatttttaaaaagcagctgtagcatttggtggctttgctggtccagagaatgtttgtaggagagagccttatgttactagaaagttgtttaaaactttcaacatatcctaaatgcatcactattggataaaatggctctgaacttgaaattcccatctgtgttccaaagggctagctagctgttttactttcctttcttggagaaagtgattattttttttcttttttttgagatggagcttcactcttgttgcctgggctgagtgaagtggtgcgatctcggctgactgcaacaccgccacccccacctgggttcaagtgattctcctgcctcagcctccccagtagctaggattacaggcacacgccaccatgcctggctaatttttgtatttttagtagagacggggttgtgccattttggccaggctggtttctaactcctgaccttaggtgatccacctgctttggcctcccaaagtgctaggattacaggcgtgagccaccatgcctgacccgagaaggtgaatttttacaagaaggctgcaatctctacttttgtatgggacaggacacttgtggcagctggcgtagctggtggtctaatcttgacctttcaccctttccttgaagttccgagtcgggggtagcttccttttctcttcagctgtggttttcctgtgatgggtccctcccagttagtaatgagaggctgagagacaagttgtggtaactgcttcgtgggtagtggtctttcccggcccctgagtcattctaacttccatcctgctccgctgcggatgcacatagctgctttcctaggggcgagaggagatgaggggactgggcctgatgaccacaggcgctgccccttcatagcacattttattcctgaaggatcctaactggaaaagtacctctcgccgaaggggctgggtggttccttatcattttcaggcaaggcctggagacaggggcttgaactgggctgtgatttttaggaaaaacggatggtccatgattcgttgattgctggactccttccatctgaacctgtcttcacctgtcttcacctgtcctgctctaaagtgaactcttcacactagggccgtctggcctgctagcaggattgttgaaggaattattccaaattcctgcttctaaaagaattaggttgtgaatctgaatctgtcttttatgtagatcagtgggagcaaaaattccagaggcagaaaagccaaatgtattggcactgatttaaaaggcttttatgaagtctcgggaacctgactggagggtagttggccttctcagcacaggtgggaagccccgtagccggtaccagcatccctggccaacaatccacaattagcaaacagatgttcccttatttgcacatgggacaaaaacctactcctgtctctgtctcttgtaaacttagggaaaagtgcttattgttaatggattttgtgtattttcagagtaagcgacagtgttccaaagttcaaggttctccaacagcccccaggaacggtggcctgagggtgtccctgtgtttacagtgcgggctgtgtgtgagtgaagtcgtgcctcctgccgcccagccgggctttgctgtgaacaggcagcagggagggagggatggggcaggagacttgagagaattaattaagttaattaatgggtgtccctaaattactttgagcttctggggggaaaggttctgtgtaaacaccaggcccccaggttctcccagctgctgttgtgcgaggccacgtctcgagtttagctttgtttgaattggtgagatggccccagggcagagcaggactcagtctgaactgttgcctagatcactttctcaggcattatggccagatttatttggtcacggactggaattttgatctgctagagaggaccacagagaatcaaataagtcaccattttataaatgctcctggacaaagttgaaaccacaggtaggaccaggcaagggttccggggcccctgacgtgggaaactagagcagcgacccgggaccacagtggtctgtctgcctccaggactggtttgcctcctctcctagccggaggctgtctcagcgtagtgtttacaaaatgcaaactgggatggtgtgtgcttctcccgcgggttttgtttgtttgtttgagacggagtctctttgcccagctggagtacaatggcgcaatcttggctcactgcaacccccacctcccaggttcaagggattctcctgcctcagcctcctgagtagctgggactacaggcatgcaccaccacgcccggctaatatttgtatttttagtagagaaagggtttcaccatgttggtcaggctggtctcaaactcctggccccaaatgatccgcccacctcagcctctcaaagtgctggggttacaggcaatgagccaccacgcccggccttccccgtgatttttgtagctcacctgtaagatcgtgatttcaaatcttaccaggctcttgttttggctgtgtggctcaaaaacttggcttttagcctttaattgtgaaaacgttcaaacacaaaagtagagggaaaaatgaatcccctgtctacctgccattcggcattgatagttatcaatatattgccatttttatttcacttgtccctgtattttttatgaaaacgtgaatctcctaaaatttagtttgtttaaagccaggcaagattctaatttgttgggttggcttttttttttttcttgcatttagatatagaagttcaatttttttattttattgtaaattgacaaattattatcgttttttgagatggagtcttgctctgtcgcccagctgggagtgctgtggcacaatcttggctcactgcaacctcttcctcccaggttcaagtgattctctggccttagccttccgagtagctgggactataggcgtgtgctaccatgcccggctaatttttgtatttttagtagagatggcatttcaccatgttggccaggctggtatcgaactcctgacctcaggtgatccacccgcttcggcctcccaaagtgctgggattataggcgtgagccactgtgctaggccaacagattaggatgattatatattatggggtacaaagtgatcatatatgtgtacaatgtggaatgattaaatcaagatgattaacgtagtcatcacctcaaatacttctttgtttatttatttatcttttttgaggtggagtcttgctctctcacccaggctggagtgcagtggcaccgatctcggctcactgtaacctccgcctcccaggttcaagcgattctcctgcctcagcctcctgagtagctgggactacaggcgcgtgccatcacgtccggctaatttttgtatttttagtagagatggggtttcgccgtgttggccaagctggtctcgaactcccgacttcaagtgatccgcccgcctcggcctcccaaagttctgggattacagacatgagccactgcacctgaccacttattgtttgtagggagaacatttgaaatttactctcctagtgatttcaaaatatacattattattaactatagttaccatgctatgcaagttcgaaatttacttggcagatttcgtgtggccagcagcagaaatggtggcatgaactgattctgagacattggccaagacacatttttaaaagcaaagtgaccacttgggaagggtcgaccacagcctggaagaacagggagcgctctgctggtgagctcgggaggacaaggtctgggccctttgacggcactgcctctagccccgggcaagagagggccgagggccatgtccagtggcctctatgctcccctttctggatgacattcctgctgctcaagaccctggagtgtgctaagcacatagtgcagcctgctcagccccctcccagggcctcaggcagactgtgcagccgtatgtccaccccaggcccgggcgttggggtggcaagggcatgttacaggtggaacgggacacacactagctgggactctgtgtgtgtatgcacgaggctccctgcaggggggcatgaagcccaggttgggggaagtcggggaagagaaggtggccaggctggggccgccctccccactggctacataatgaacctggccttccaggtagtcacggtggcatacttttcgaggtaggaggatagaacctattttatttaactgttttactttgttagcttgatttaaaactgaacagctgggcatacaggatgcagcactcatgagtactctggccccagaccctacagatattcaggcagacctgtcctgggcacctgtcccagcccgtgtctctctgctgtgtctctcttctggagcgttcctggggtgctcagggtcccctttgtgctttttggctgctcagtttctgttgctgggctccttcggccttcccactgaggatggggaatatattctgttttctttccacttgaattgtccttaaagccatgggtaaactggttcaggctcagacttgggaatttgatcggagtccctttagcatttctgggcagggcttgttggtgtcgtggccagctgtcctcgaggtgaaaaccaaattgggttgggagggtgcacatgacacttaaagcccccagagctgcggtgccatcaaccacacactgtggacaggaggctgtcagtgggcaggctgggtccaccttcaaagtccatacgaaacagcccagttcagggtactgcttcttttcgagatctcacgggcaggagccttctggcactgttcatgtaaatgtaagtcattctttctttctggaggaaaatttagacaggtgaatgaaaaccggagtgcttaatccgctattctacatgcagaagtttatctcaggaaacagtcccagatcactagcccattttgcttcaaggatgtttattgcaagctgttttgagtttttcactggttaaataaactttggttcaacttgatcataatagctgacatttgtggagtgtttaccacctaccaggtgctgatccaagtggcttacatttattaacttacttcatccttatgtcaaggcaagtactagtaatctccattttacacttggggaaactgaggcacaagaggcctaagaacttgcctgaggctccacctccagtggaaggctccagagaacaatatgttcagtaaaatctcattcttatgtaaaaaaatgaatatatatatatatatatatatatatatatatatatatatggaaaaagactccctttgtcctgttgtctctggcttatcttggttttcatctgacatacacttttgatcgaggaggttcccacttggggaaacagccagcccctttctgagcagagggtgtggcactacaaaggcgaaacatgatctctgggagaaacatgcttgaagcccacgctcctgggggcagagctgagcctccacacggatgtccccagcactgggagcagaggctgatgcggccccaaggtgctgaggaaagcgccccccagtgcaaaggatgctacaaggccccaggcttctcaaggaacatgaggcctggcaaacccagaacgttagactgggtcggctccaagatgcccctgggtttgagctggagaagtgtctgcgggagggtgctggggctcctgcagagcgtgtcttcctgaccctgtgggcttttctggggggggctaggaggctctgccaagttggtggatggaactgtgccttgccctggggggcactgggcaggagccagcctcggagcgtgagtctggtgctgcgccaggaggctagatgccccggccaggtcctgtgggctgcgccgtctgtgcccttggcccgcgaggctggcaggctgccactgcttgtaaagcctcctggttgaaaaggtgactcggagcagcggattcactgggagcctgtcagccacagaggcagcttgtgcttgtgccccaggcccaggccgcaggaggtgggatcaagttccacggctccagtgtgaaggtctgagcttcattctaaggcaggtttttgaggacatggggctctcgggcacctggttgtattcctgcatcctgcattcctgcccactctctcatgccttcttctccttctccttggcgtgccccaagccagccttccatctcagatggagttgtatgtttctagtgagcccacacaccccctgaggacagggcctcacccccgcacgcctgcttcttcatcacagctgctaggaaatgaagatgcatgtccccaggggcctttgaagtaggatgtggtctccctgagcagaactctgactctaaattctctcctggctctggcgttggtgtgggacttgggttgcgggagggggcaggttgttagcggctgctgctcagacccagcggaggaccgggctgctccaggctcccggcaagatgtagcaaaatggccaaatttaaggtgagcacgggctcccgtgcagtttctcacccctgctgctggctgcctgtctgtgaatgctaaggcgaggggtggttctacattgacttcttactgactggtgggagtaacccggaagaggcaaatgacttccttccctttcctcggctctgaacctagaatgttccagtgataccacctccaaactcttcacctgtgtcctttcccacctctctgccctgaggacagggaactaagtggctgctcacggtgggtaaaactgaggcttacaagacaccttgggcaatgggacagccagaccccagccctcagcacctgcctctcccatcccaagccccagtctctttttcagctgcaaagtcaatacctttgctttcagagagggagcatgtgccacgccaggagaggctttgggtgtatcacagatggagactgcctagcttaactgcgcagtctgaatgattctaaggaggggaagagagaacgcctctggagcctggcacacacatttgccggagaaagtggtgagtgcgttgtgaccaggtgagggacgaaccttaaggagattggctgagaacacctcccctcctcaccctaagtcaacaaacccgggacagcagtgcttccaaaaccttacttgttcacctcacctggagattcttgtggcaaatcgggttctgcctcgttggctctggggtgggccttgagagcctgccgttctaacaagctcccaggtgatgctgatccacgaccagctttgagtaccaggatctcgcatcagcttgggagggaggagacctgaatcctagccctggctccttaggctcttctttccagtgggggaatttagttaattgctccgggccccaatatcttaatctgaaaacaaatgaatgacaacctagttgcctttcctactctgagattccatgcgtcttaaaagaaaaaagttttaaaactaaacatgtcactgtcaccatcgctacttcacacacctaaagttataaaccactcagaaatgcaaatcttaggagatgtgatctggcaaggcaaaatcgaagatggctttgaggtctcagctaaacctagaaatctgatgctctgcattttttatgggatgcttatgaattaatgaaaatacatgagattatctctccttgagtctaccctttcctacaaccagcaaaaacttataaaaagcaattgaagcttactttgggaatgccaagggattgattaaaatatggactgtgctgattccatggctggtttagcagattcttgttaaaagccatgactttttaaaatttttatttttttgtgggtacatagtaggtatatatatttatgggatacatgagatattttgatacaggcatgtaatatgtaataaccacatcatggaaaatggggcatccatcccctcacacatttatcttttgtgttacaaaccaattatactcttttagttattttaaaatgtacagttaaattatatagtcaccatgttgtgctatcaagtaccagttcttattcattccttttatttttatttgttttactcattaaccatccccacctcctccctagacccccgccgctacccttcctagcctctggtaaccatccttctattctctatgtccatgaattcaattttgatttttagatcccacaaataagtgagaatatgcaatgtttgtctttctgtgcctggcttgtttcttttttttttttttttttttttccttttttttgagacagagtcttgctctgtcacacaggctatagtgcagtggtgcgatctcggctcactgcaacctccgccttctgggttcaacctcccaagtagctgggattacaggcacccaccaccacacccagctaatttttgtatttttagtagagacagggtttcaccatgttgtccaggctggtctcgaactcctgacctctggtgatccacccgcctcggcctcccaaagtgctgggattacaggtgtgagcaggtgtgagcaactgcactcggctggctggcttgtttcacttaacataatgacctccagttccatccatgttgttgcagataacaggatctcattcttttttatggataaatagtactccactgtgtatatgtaccacattttctttatccattcatctgttggtggacactgaagttgcttccaaatcttggctattgtgaacagtgctgcaactaacatgggagtgcagacatctgtttgatatactgatttcctttcttttgggtagatacccagcagtgggattgctggatcatatgatagctctacttttagttttttgaggaacctccaaactgttctccatagtggttgtacgcatatagtacatatagtacataacatatataacatatgtatactacataacgtatatatagtatataacatatatagtggttgtactaatttacattcccaccaactgtgtacaagggtttccttttctccacatccttgccagcatttgttattgcctgacttttggatgtaagccattgtaattggggtaagatgatctctcagtgtagttttgatttgcctttttctgacgatcagtgatgttgggcaccttttcatatgcctgtttaccatttgtatttcttcttttgagaaatgtacattcaaatcttttgctcattttttggatcggattattagatttttttcctgtagaattgtttgagctccttatatattctggttattagtcccttgtcagatgagtagtttgcaaatatttcctcccattctgtgggctgtctcttcactttgttgattgtttcctttgctgtgcaaaagctttttaacttaatatgatctcttttgttcatttttgctttggttgcctgtgcttgtggggtattgctcaatacatttttgcccaggtcaatgtcctggaggtctttcccaatgttttactgtagtagcttcatagtttgagggccatggcattcttaaaaacataactttcattcttgcatagctttttttttttttttttttttttttaagtaacctggactgtcatttggctagggaggcgggagtttgtgtgtctggaaatgtgtgggtttttttttttttttttttttttttttttttttttgggacggagtctcgctctgtctcccaggctagagggcagtgcagctacctcggctcactgcaagctccgcctccctggttcacaccattctcctgcctcagcctcccgagtagctgggactacaggcgcccgccaccacccctggctaattttttgtattttttagtagagacggggtttcaccatgttagtcaggatggtctcgatctcctgacctcttgatccacctgcctcggacttcaaaagtgctgggattacattacaggtgtgagccaccacacccagccagtgtgtggtcttttttatctgtctgtttaaactgtctgttttatatgttgcatgaaccccgctttaccatgaatcttatcaatgactgataaatattgtctattggaaacattctctttaagaggaggtgaccgttctctgcagctcctgctgattcagcaaagctgaggtcaggtggagccagctgggcagagatgagtgattagaaggctgtcattggcagtgacagtccacgtgctccagggcagaacagtgacactggctgtcacagtctgtttcaacaatggaggttgtttgtttttatttaaatgatgtgaataaagaaaggaatctttgaaaactaaggctggagctgcccaggcctgagccaggcccttgtaacaaggcccttctgggtgggggatctacctctcttttcacctggaccacctggcggtgggtggcgagctcagaaccacagctgggtggaaaatgggagggccagcagcgagctgcaggaatggaattccatgatggcatctcatgtctccagagtggacagacagaagcttgtgttttcatttcaaagggcatctgccacgccctccaggcagaccacataaatggcatttttgggtgaggcctgagggattctgtctggtggtatacactgattttaaccagaagcaatagatttgggctctttttgacaggggaagatagatgagagatgatttccatgaggatgttgaaaatattggcaattctgaagaccccagggagtcccagggggttcctggccaggagcgcccctccattgccctgcaccaccttgctttccaggctgtggctctgtgtgtctgaatctacggcatgggggcacttccttctaattcacagaagaagctatatgggccccagactgcccatcctgctaaaactggcaaaggccttttcccagcctgagcagtagtgattcagccaactgcagaagtggtatttggagctcacccttaaaacataaagcaagttatgttcagactatatacaggcaatgagaaaatatgatgaaatatgactgcgtatgaatagccccagacttctagggcctttgagtgtgtctgtcttgggcaacatcttctccttttagatttcaggctcagtttactgtcaggaaaattaagttgctgagagcgtctcagaattttggcttaaaagagaatatacacctggaacaaagacttgaggggtgctcctattaaaaaaaacaaacagtgtgtgagcttcaaaggagcaccttgaaactccagttccatcacatccactctgctgggccctcctagggcagctctctgtcttgtgcctgccttctcttctgaacactcctaaggtattttgagtgcggaggataggatcatacactcaggaaagccgagagctagatcctgaagcatctgtgcgggaaatgcccatctgtgcctgaaatgagcatctgcgagtgaagtgatcccatgtctgggatctgtttggcatgcgccaggagacagacggacacatgcatgcacacacacacacagcggggacggggagttggtgaaataagagtgggaaaatgttgacacctccgtgagccgggtgacaagctgcttggtggttcactagacagggagttataaattggccgcttttcaacatcgacagataaaaatcaatagccttcccataatgccatcattaatcaattagagtctgtaatgggaaaagcagatgccactcccccacagtttctgggaataaacaaagtgtataaggcctaaaagaagaaagctatagaacttgactgaagcccacatctgtggaaaggcatactatgttcttggagtgggaacatcaacactatagagatggcagttcctctccagttaatctggaagtgcaagtatcgatgagtaaatccaattaaattccaacaagagcctggtctaaaatgtaacaggctgattttacagtatcgctggactccccctacatccaaacttattcttaccttcattctcccattttggttaatggcagcaccatccaggcaactgctggtaataaaagcctgtgagtcattctgacgccccttccttcctcagcctcatccaacctaccagccagtagtgaatcccaccccaaaacagatggtgaatcccaccgagtcccccggtcatcgctgctacatcgagagtgcagccactgccccatgtgctttcctggtctgcttggcagcctttgaactagtctcctggctcttcccctgctccccgtatagggatctgcttgaagctcacacagccctgatcctctgcccctgcctctttctccaccctcatctcccaccatttcctgggctcactgcattcagcagcctgacttgttcctgctcagaatcttcacacccacctgcatgcactccctcccccaggtgatatggtttggatctatgtccccacccgaagtcatgttgaaatgtgatccccagtgctggagatggggcccagtgggaggtgattgggccatggtggtggtttctcatgaatggtcagcaccatcccccctggggttatcattgaaacagtgagttgccacaagatctgattgtttaaaagtgtgtggcacccaccccaccctcttggtcctgctcctgccatgtaagttgcctattcccactttgccttccaccatgagtaaaagctccccgaggcctcccaagaagcagatgctgccatgcttcccgtatagcctacagatccatgagccaattaaatctcttttctttataaattacccagtctcaggcatttctttatagcagtgcgagaacagactagtacaccaagggttggcctggctgctgctgcctccgtctccccacctaccccacccccccccacccagcttcgtgactgcagtaagaccttcctgacctctgtggctggaataccctgcagcccccacacaccaactgtctctgccccatgcctggtttcctttcttcttggcgcttatcactgaaattaccttatgtgtgtgcttacgtgggtgtcttctgttgtccactgcaaaaatgcattgtgggttgaattgtgtgccccagaaaaatacattgctgtcctaacccgggataccttgcaatcttatttggaaatagggtctttgcagatgcaatgaagatgtaagttaagatgggatcgtactggtatagggtgggcctttaatccaatgtgactggcgtgcttataagaagaaaagggacacaggcagacgcacgcagaggggagaatgtcatgtgaaggcatacagggaagacagccatatgacaatggaggcagagatgggagtgacactgccgcaagacaaggaatgcctgggctaccggaagctgggaaaagcaagggaagatgctcctacccacgccttgatcttggatttctggcctccagaactgtgagacaataaatttgctgttgtttcaagccccccgttctgtggttctttgttacagcaacccaggcaactaatacaggggcattgtgtatctcgttcagtaccttaccttaacactgcctcgtgtggaaatgaggcttggcaaacactgttgaatgacgaagcattggcaaaaaaaatagccaagattttgaaaaggatccacaaaggcagactgatttaccaggtagcacaacatattataaagccctaaccatcgtggaggctgtcagcacaaatcaacacagtagagtggaaggctcagaacagacttgtgtgagcagtgttactttgtttcttataaaggtgatgacttcagtcggtcagagaaaggtaagggtggatactcagcacctgctgttggtgtggttgatcagtgcagtgcctaagaggcccctgctctattcaactggatattcacgcaggcattcttggccggtctgctcagagaggaataggctggaaaccttggctggccagcaggatgctgcctgctgctctgcttccaggggagcgaggggtcttcctggcagtttttgcaggtggctgcacacacaggtgtccttctggtcactagctcctcccccagctgaaagccctgggtccccaaggagccagaatcccttataaaattaccagccttacagagccctgggttcacacaggggacattccatgttacaagagttaccacacctaaggaagccccatgcctggcttcttcaccgagtggttataattcacttatgggtcttccctgtccagaggcaatttgccaatcaaggtcatttttaccatgagcaatgttgtctagtaacagagttgacgttccatcttgattggggttcccagggaaccagagctagataattaaacattaaattctcatacagaagggaagaaagattttgctaagcctgtgaccaaaactatccatatggacactaagtgagagtcctatgttttatcatacattaaaataaatgcagaggtatttaagtgtaaaaaaacaactttcaaagtattagaaaatataggctatgctttcacagtgttacggcatggaaagatgttctaaggaaagcatcaaactcagaagtcataaaggaaataaacctgacagatatgggaaatatttttattgaagtgtaacatacatagagaaaaatgaacactcgaagcgttgagctccatgaatcttcacccggtgaacacacccacatagccagcacgcagatctggagagagaacgtttgcatcccaggcccctgcctcccattccccctgtgtccgaatgatagatttgactacataaaaatggaaaactccaatatatcaaaagacaccataaacgtagtgaaaagacaagcaacagcccagaaggaaagtttgtgcagccttttgtaacatagaaaaaggccaaagatggatgatcatagcatataaaagaactcctatagatcatgaagaaggaaggacaaatagttcaacagagaaattggcaaaggatataatgagcaattctccaaaggaaaaatacaaatggccaaaacaatggagccagtgtggccggctctgcccagcacggccatttgcacatggtcactgttgggtgggtgagggctgcttgccccgtctccagccccactctcttgccatctccccctgtgattcaggcatggagctcaggccccaggtggcaggcagcgcactctgctcagttaccccagctcctggcttcatggccatgccctggcacctgtctccctccccttagcctgctgacctttttcccatgggatgtttggttgtctctgtacaggctctgagccagccctatgggcttccagacaagcccagattgagcctgccctctagggagcacccctgtgtagcttccagctgagaccttgagacacaggcccagggagccaagctcagggctgcgaacatccaggtggggctcaggtgctagaggcggacaacagcctggtgcaggacccagagtggcaagaggtagtaagggggccatggtgttcagaaattggggcaggtggtgggtaaggcatcctgcttctaaaggccagggtttgggagggcaaggaagcccctggcaggagtcagggcaggcatcccgggcaggtagtgtttgttctgtgaagcaggcttccccaaggaggggccctagagcagaaagctgtgatgtgcaggtgactgggagacctgttctctttcgagccgtgcagctccggttagtggatgacagatttcaagccctgctcaggccagtgtttttcacacatgtttgacctttggttgacagcacacagcacaacagcttatggtccaggagtgcacctcggcatgcagtttgggaatcctggcgatgatgtgattaagattctggggccaggttctcaccaagccaaaaggctttttttttttttttttttttttttttttttttttttttgaggcaggagctaattctaggtacagaaaaccattggtaaagtggaggaagctgtttccagatccacggaatgacggtaactagcgtcacttgagaaggtttcttctgcccttttgtaaaaaatagcatgatgttttctcctagagacagacagggcctctgtacgtaagagcagacatgtatggagaaggccggagagtcacaaaccatatgtgcctgagatgtgccacctgtggggctgtgaataaggaagcagaatcagtgtgtttactcagagctggatttggctgtttgttccttcatctttcttggaccacatgtcctggtgttcagaggctcctgagagcctggggctcagtaggccgtctcatagcccctctaacccaggtgagaaaacaggtcccagtgggtccctaacccatgctcattttctcaccaaacaacaacaaataaatcagaaagtcctgaaaaatgaattctggcctgttttctggattctggattgaaatatggagtaggagctgacttttagtaagttgatcaactctccccgccgaccccctagccttctggaactgtcttcagtaaacacaacccccgccacccctgacctacccgcaccgcactgtggtcggcctcttctttgaacacttcccttacagcacgcactccccccaagctgggccttctcttgagaccactctgctgtccttgggagtgatggtggaggcggggtagacaccctgtccctgtctcgtggtgctcctttgggccacagctcctcttccctccgtaggaggaaccatctggaatccatcttcctccttgaccacacctctccattcattaaggagcagagttccctgctcactgggtctctctacccctcctctgtccctgtctgggtgaggtcacagagagcctcacccgcctgctctgttggcctctcacttgccgtcctctctgccccgttccctctcctgcacacctgtccgcggtatccccagctcttagtgactctagccctctcccgccctcctctgcaccctgcatgcacttgtgttgctgaatgtggccggagaaaaacacagccatcttgactgttctgtgagacttcatagatttccagggctgtgtggaatcaaaaaatcttcctgcatttccccagccatctggcctccaggatgactatttcacatctcctcaagcctttcacatctcatccccctcacacctgatgattttgcttcctatttcactgggaaaatgaaggtaactgagaactttcttttttttttttttttttttttgagatggagcctggctcttgttccccaggctggagtgcaatggcacgatctcggctcactgcaacctccacctcccgggttcaagcgatttctcctgcctcagcctcccaagtagctgggactacaggcgcccgccaccacgcccggctaattgtcttgtatttttagtagggacggggtttcatcatgttggccaggctggtctcgatcttctgacctcgtgagccgcccacctcggcctcccaaagtgctgggattacaggcatgagccaccgcgcccagccaaaggtagctaagaactttcaacagcccccacacctactccctggctctggtacagtggacagcctcccaggcttgtcccccctcccagtgaccttgacccctctcatcttttaagacctcgctcccgcagtttccccctttccttcctaactcggtcatttgcaccattataccaacaggctgtcttagctcacattaagaaaccctctcttgaccctggcctccacctcatctcttggttttcccatgtgacgaggttgtctacacaccttccctcttcccagtctcccttgaagtgactccagccaggctgtgtcctcccactcttctgaaacctttcctcaaggcctccaggaccttctggctgctcagtcttccatccaacagcatcccacagatgaagcattttcttcgcttggcttgtcttacgctctgttctcatcatattgcttcctcactgcctgtttttctccagagcctagaaccatgcctggcacacagtgggcatctagaccctttgctgagtggtgaaattgaagtgtgacagggtgcgtggcttccctgctcaggctccctcagttcccaaagctgtgctccttcctggatctcatgtagcacaaggaggcatacgtgggtcgcaccacatggcttctagaggagtatgtgtgaatgtgttcatgttcatgtggaaatagggaggcggccctgaggtgggaggagccttcccaagaggaatcacctgagagaggaagaagagctggggaggaactgaggaactggtttggcaggttcaggaagaagtgagtgaagaaactggaaaagtagccaggatcagaacctgcagccgcaggacctaatttgttaggacctaaattaggggtgattgtgcaaggcagtgcagcatggaagccccactccaggacttccctggtggctaggaaacattgctccacccctccctcttgtcaaaagagaaggtgcacacacttggagagaaatgggtatttttgtgcttctttcttgttccctgttgggtaggagggttggggctaccaggcccagtgaaaacacagcccagccctgcctgttctgcctcatcctgaagtgtaaggaactgcccattgtgctgggccctgtcactggctctgcccgaggcatatgtggcactgggcctggctttttaaggtgcaaactgttttcctggatttcttatttttaagggaaaaaactcaactacaaagactcagtggccagtcctgtgctcaagccctcttgttaggggagctggcctccctctttggccacagctcagtgcagggaggggtgtggaaagtgctgggaaagggggaggacccaccctccccacagatgggtttctggctctgactgcgggaaaccaaactttcttgtattttctctggctgggttgtgatgtgggcatggcgttggtgggaggtagtgcatttgctgagggtgatgtgttctgagtgtcccctcactccgtggctctttcatgtggcctggactttttggtgagggagcagcagtgggaggacaggagagtcctttagcgggctgatgtgtgtctgccagttggctttgtcttggctcgcagcttctgtttcagacagatgttttgatccccctttgcttagcaaccagctgcagccttgctctgtcttgggaaaaccactgtctttctgaagagctgcttcagctccaaaactgataactctggaaggagcagccaccagccagtcagaactgagctccgaattaacacatgaaggagactttggcctcttgagaccctgaaatacaagaagatggtttcatgtcatgtccaagaatgtggccacaaatgctacctcagtctcgggctgtctgcattgttaaatgacctcattatttttctgacctgtgggccgggcttcgttggcatttccttaaggcgtgttattgtggaaaatattattcaagaaagaagagcatgtggtttgcttggttactgagctggactggctctgggtgaccagagctctcacgcagagccgtgcacggctgctcccactgagaccagcctctgcctcgggatggtctgacccacggagctctgttttgggacccagaatccatgagccacatttgctgtgctgtgggacaaaccacagtttccttgggagcctctcaagtggtggctgtttctcttccacacccttggaccactggagctggagacggggagttccccagcctcctccaaggataagcctattccttaagcctccacaagccccatcattatttatttttatcataagccatgttgttcgagtagcatagacaactttctcaggttaccagggaaacaggactagaaagtcaacccacgatcaaattaccttgccgaaagggaaccagctcagttaacccttgaccccacacgccattgtcagaggcgtatgaaccagagcgactccatcttgaataggggctgggtcaaatggatctgagacctgctgggctgcattcccaggaggttaggcattcttagccacaggatgagataagaggtcagcacaagatacaggtcataaaggccttactgctaaaacaggttgtggtacagaagccggccaaaacccaccaaaaccaagatggcaatgaaagtgacgtctggccatactcactgctcattatatgctaattataatgtattagcatgctaagagacactcgcaccagcaccatgacagtttacaaatgccatggcaaaatcaggaagttaccctatatcctctaaaaaggggaagaaccctcagttcctgggaattgcctacccctttcccagaaatgaataatccaccccttatttagcatataatccagaaataatcataaaaatgggcaaccagcagctcatactgctgccctgcctatagagtagccattcttttattcctttactttcctaataaacttgctttcacttcatggacttgctctgaattctctcttgcatgagatctaagaactctctctcggggtctggatcgggacccctttccagtaacaccacgagactgcgtccctcactgcccctcgtttcggcagttgcatggttccttggtgagttttccctctttctcgctgtcatttctcactatgagtctggcgcttgttcttggtgtcttcagtggccacgtcgttgatccttcggaggaccttcgccccctctcctccagtgagtgaccccacccctgcagccactcgctcccatgccacgcccctgacccctccagcatctgtctcaaacatcccactcttctttctccactttcaccttgtcactcatcctgcaattcccagtcccagtgactattttttttttttttttttgagacagtcttgctctgtcgcccaggctggagtgcagtggcgcgatctcggctcactgcaagctccgcctcccaggttcacgccattctcctgcctcagcctccctagtagctgggactacaggtgcccgcaacgacgcccggctaattttttgtatttttaatagagatggggtttcaccatgttagccaggatggtctcaatctcctgacctcgtgatccacccaccttggccttccaaagtgctgggattagaggcgtgagccaccacgcccggcccccagtgatctttgaccccactgggatggcgacccttagaacccatggccttctcatagcccctcgtctgtctcacaccttccctctttgccatgtcagtgaccagccctgccttgcactcaccctccccacccgcccttctcttgctgggtcctccccacctggtgaaacctcagccctggttacatcctgcactccacgcctgcaccagccgctgtgcagtagaagtttctggagatgccccactaccacacgggcagagcgtaccatcaggtcacaacccctgagccaaggtgggcctttcacttgcgtttctgtgctctgtccactcccccaccctcccagatggcaactccaccctcccctttcctcagctctgctgtgcctcctccccatcctcactttcagctgatggcctcgtcctctcattccaccccaaaatttgaagccactggaagagaattcccgctggctccctgcaccaccactacccgcccaccatgtctgtcccccttcccacctgctccccgcagtgcactgtctacgtttcaggccagtgctacctgtgtgcagatgcccatggcctgctccagggcatggctttcggagctccctgctcctgccacatccgtcctgacctctctcttggctgcattggtcctgacctctctctcagctgcatcaatcctcgcctctctcctggctcatttctgccagcacaaaacttggtataaatgcccctggcctaaggaaatcttttgacccactttcctctccagcagcctctccatttctctgcttgccacacgcacacatgcacatatgcacacgcacacacatgcgcacacacgtatgcacacacgcacgatccatgcacacaatgcatgcacacacaggaaattcctcagagaatcatctgttgccactgtgtccattttctctctccctccccattcaggtttttgcccctcaactttactgaaactgttcctctctgagctgccaaagtctgactaaagtgacaaattctcagtcctcaaattatagatgcagaagcagcctctgacctgctgactgctcttgcttccttgaaacgctttcttctcctggccgccaggatgccacgcactgctgggttttcttgtatcttcttggtcacttctcagtccaccctgaccttcaaacatgctgcacccagaagtcggtgccctccactcactccctaggggatcccctccaacctcatgattattttattttattgctgggattacaggtgcacgccacactcccagctaatttttgttgttgtttgagacggagtctcactctgtcgccctggctggagtgcagtggtgcgatctcggctcactgcaaccttcgcctcctgggttcaagtgattctcctgcctcagcctcccaagtagctgtgattacaggcgcatgccaccacacccagctaaattttgtatttttagtggaggtggggtttcaccatgctggccaggctggtctcgaactcctaaacctcaggtgatgcactcacctcagcctcccaaagtgctgggattacaggcatgagccatggcaccgatctgtttatttttgagacagtgtctcactctgtcaaccaggctggattgcagtggcgcaatcatggctaactgcagcctccacctcccaggttcagatgatcctctcacctcagcctcccaagaagctgagaccacaagtgtgcacaccttgcccgactaatattttttattatatttttagagatggagtctccctatgttgtccaggttgttctcgaactcctgagctcaagtgatcctcccatctcagcctcccaaagtgctgggattagaggcaggagcccccacacccggccccatgattgtaaataactctgtctgctgggacgcctgggggatctttccaaccagatttctctgctggactccagacttgcagagctctgtcgtcagcctccacgcagggctgcaacagagccacggcatgtctggtcccagcagatgctctgcccagacctgtcctctcactctttgctgtcacgccagggccactccatcccttccattgttcaggcaatgaacatggcatcatccttgaaccctgtctttctctcatatcccataaccaatctgtccatggttccaccttcaaaatatacccagatatgtgatgatgttgaggaattgctggtaacttttttagatgtgataatggtattgtggttgtgttttgtttttgtttttgttttagacggagtttcgctcttgtcacgcaggctggagtgcagtggcgtgaccatggctccctgcaacctccgcctcccaggtttaagcaattttcctgcctcagcctcctgagtagctggagttacaggcatgcaccacctcacctggctaatttttatatttttagtagagactaaaaacagggtagtggtgtgatcacagctcactgtagtcttgacctcttgggctcaagcaatcctcctgtctcagcctcccaaatagctgggaccacaggctcccaccaccacgcctggctaatttctttaaaaatttttatagggatggagtctcactgtgttgcccagtcttgtcttgaactcctgggctcaaccagtcctcctgccctagcctcctaaagtgctgggattacagggagggagataccatgcctagctagtttcatttgttatctgcctggtgtgtgtagacatctgctttgtcacctccattgtggagagcaacatggggtttcaccatgttggccaggctggtcttgaactcctgacctcaggtgatccattccccttggcctcccaaagtgctgggattacaggcatgagccaccacgtctggccatggttgtgttttttaaaagagctcttatcttttccagagtcttactgaaatatttacagatgaaataatgtgatgcctggaatttactcacaataacctagggcagtgcttctcaagctttggcatgcattcaagtcccctggagggctcattaaaacagctttctaggtcttgagcccagagcttctgattcacaaggcctggggtgggccccgtaacttgtatttctaatgcttggtgctgctggtgtgaggagcccattttgagttgagctgatctaaggtataggagagtgagtagcctgggcgtgggctgggagaaggtggagttggtgggtacgtggtaatgaaggtacaagggtttattatgtcaccctacttttctttggaaagttccgcaactaaaaagcacgtgtgtatgtgtgtctgtctgtctgtctgtctccagaactcttcagctcttccattgctgcgccctggctcaggctagagtcctctcttgcccaggtggcgctagcacctcctaactggtctccttccttctctccttgttcctctagagtcagttctcaacagagcagccaggatgatccccagacccctgcagtggcattcagagtgacacccaaaacctttctgtgacctcaaacttctgtgcagtgtgttccccacgccacttcctccatgaaccttcagtcacactgcccgcctcgctggggcttgcactggtcaggagtgcttctgccgcaggacctttgcacgtgcccttctgggcctacagtgctcctccactctccatgcagccatctccctggcttccttcaggtccgcattcagatgtcacccttgcaatgaggccttctcagacaacaccatctaaaatgtcacttccccttccccactattcataccctactccctgctcactttttctgctccgcgcctgtcactgtctatattgcactgattgatcttatctatcctggcaggaagcttgagcagcgcccgcctcttcctggctgtgcctcggcagtgcccccaccccagcctcccaccccatcttggtctgcaccccctgccatcactcatccattcattcctcctgttcctcttggccactgccaaatgctggatggtttccatctgtttggttcactgcagtgtctctgtccctggaagggtgccagccacagaaggcacgaagatgtgtccacagagccggcggctaaaaatctggcaagaggagtcgaggaagggggctgaggaggtagaagggagggctttcctcaaaaggccagaaattcgtggccagccaaaggggaagcaaagacattctcgtgtaggaaaacttacaggaaatgcaactaaaagcgtgggagacaggaagtctgtgtatttctgagattatcaagaaaggggggatggaagttgcaaatgggcaggccaaattcagtctgcagaggtgtgcttccagcccacgcagtgcttaaaataaatggagatggttgccagcactggaaggtctggagtgccctgtctcctggaaacactgcagcctggcaccactgggctggtgagcatgactggcacctgcagcagctgcccaccagctaatggcaggtgtgtgttctctgctcacccaaagcccttccagcagcttcattttgttgttgttgtttatttgtttttgagacagggtagtggtacaatcacagctcactgcagtcttgacctcctgggctcaagcaatcctgctatctcagcctcccaagtagctgggaccacaggttcccaccaccatgcctggttactttttaaaagaatttttgtagggatggagtctccctgtgttgcccaggctggtcttgaactcctgggctgaagcaatcctcctgccttggcctcccaaagtgctaggattacaggtgcgagccaccatgcctggctagcttcatttgctaccttcctggtgtgtgtagacatctgtgttgtcacccccattttggaaagcaaaaaggatttcttcttccttcaaacataattgagaaaatacagttgtttgggggcaagtagggtgcggggtgactctggaaccggcctcctgggaagccaggcctctgggagtgctggaggtgggcagtgaggctgccaggcccctgccttctggggtggggtgcatgctcctgatacatcagaagggtcgggggaggacttggaggtgaaggcactgcaggaagagaggaagcttactggagagacggtcaatggggcagtcaggctttaaaaggacgggcccaccaagtgaaaagatgaccaagtgtttgggctgaattgtgtcctccaaaaggatatgttgaagcctaacccccgggacctcagaaggggatcttatttggagatagggttgttgcagttgtaacgctgagatgagattatactggagtagggtgggcccttaatccagtgtgactgctgttctaagaagatgtacatgtgacaatggagggacatgtggggagaggatggccacgtgatgatgggggggacatgttgggagaggatggccacgtgacaacagggggatgtcaggagaggatggcctcgtgacaacgggggaatgccaaaagaggatggcctcgtgatgacaggggacacatggggagaggatggccttgggacgacaggacatgtggggaggggatggccacgtgatgatgggaggacatgtggggagagaatggccacataatggtggggggacacatggagagagaatggccacataatggtggggggacacgtgaggagaggatggccacatgacaattgggggacaccacgcggggagaggatgaccacataacaacgaggggacatattgggagagaattgccacgcgacgacggaggaagggactggagtgaggaagtcataagccaaggaacgccaaggacagaacaagcagcaaacacaagacacagggccaggtaaggaggtccccggctccaggtatcagaggagccctgctgatgcctggatttcagctctctggcctctggacccagaagagaatgaagttctgctgcctggggcctcccagtttgtttacagtgagtctgttcatggtggagaaacatcttctcatgatgttcctgtccaccatggtcaaggcctgttttgagctcctgcattgtataagtcagaggtaaagctgtttttctcaaggggtcaataattgacagtattggaatgggacaaggtggtcctgttgggttttgtttgtttgtttttaaaatatgaggatagaaagtcgtgtttttacttgtgcttaattttcccagtggccgggatgtgaagtccacgcctgtcatctgtaatgcaccagggcaaggggtcggttttgtttgcatagcttctcccagggtcatcttcccacccctcaagtgtggatttggccacaacactttgtttagcaatttcctgtcattttgttttatttggtcaggcttatttgcatagttgaatgaatgcacaaaggcctccttgtttcgtggttcacaaagtcagaactggatcataccagggcatacgggttctgtttcaaggctttgtaaagctgctagggttgaaataggtatttttggtgtcggaattattttattgcatttatcagtttatctactgagatggggcactgagaactgctgatttacctctctgcagccctgtctgcagtacctgaaggctgggggaagacatttggcaatgcacacagcctttgtttctgcctgtgaagttggggtttcataggccacctcccaggagggccctgtaggtgcatgacagagtccgagtgtctcaccagtgggtttgtcattgcacccaagcagatgctgggggagaggatgcctcttccttctcctcacccttcatcagtgtgtgagcagaggcaggagacctgtgggctggaaggcccacatcctccttcccaggctgtgaatgtggcacttacatggcaggaggactttgcagatgtgatcaggaccttgagaggagacattatcctggatgatctggatgagtccatcgcactcacagggtccttaaaagctggaagagggaggccaggcagggagagggaaggaaatgtgaggatggaagagggatccgattgccgcgattgctgaatttgaagaggaaggaaggagccgagagccaaggaatccaggcagcctctgggagctgcaagagacaaggaaatggattctgtcctgcagccttcggagcagatgcagacctgccgacaccttcctttcagctcagcgaaatccatttcagaattttgagtgcagagctgtaaggtcatgagtctgtgctgcttaagccactgtgtttgtagtcatttgttgcggtagtaaaggagactaatatgctattttgccaccattctgagcttttgaggcaggctgatggaaaaggtgggacagtggcttcccagtacttttctaagtgatcctgagaacctaatatcccaggcacttcatattctgtaactctccaccctgctgccagcagagtctgcttagtcctcaagacgaggggcttctgctgctctcagaggttgatgatttcattgattatctttaagttactctgcactctcccttccccagagaaaacccagtcaaattcaagtgagcattggggaaaatattcattcattaaactggttcttaacctttttgggggcaccgacctcttgagattctgttgaaaatgggattttagcccccataaaaatacatatcaaaaatttgcataaattttggccaggcacagtggctcatgcctgtaatctcagcactttggaaggccgagacgggcagatcacttgaggtcgggagttcaagaccagcctggcaacatggcgaaatgccgtccctactaaaactacaaaaaatagctgggtatggtggcgcatgcctgtaatcccagctgcttgagtggctgaggtggaagaatagcttgaacccaggaggtggaggttacagtgagctgagattgcaccattgtactccagcctgggcaacacagcgagactgtcaaaaaaaaaattgcatacaattttgagaacaattttgtatacagattcccccaggagctaccccttgaagctccaatggctgccaggggcttcctctgtcaccccaggtgaagagcccttgtacagattaattcacattaaggctgatgaatggctgttttcctagtaagtctcctcgctgtttgccaggtccttaaaccatgttcagtggatcctcattatttgtggattccatatttgtaaattcatctgctctctaaaatttgtttgtcaccccaagatcagaactcatagacaccagcagagtggcaaaaatgtgttacccgatgagccttttcccagctgaaaaggatgctctgccatcttgtttcagcctcttggtgtaaacgagtgtggttttcatgatttgtttagtgccatgttttccatgttttgtgctttttcttcgtggtttcactgtttgaaagtgctgtctagtgtttccaagtgcaagaaggcagtgatgtgccttatggggaaaatatgtgtgtttgataaactgtattcaggtttgtgttctagtgccactggttgagtgttaacgaatcaacactgtacagatgattcctgacttacgatggttccttccagtatgatttttcaacttaacaacggtgtgaaagtgatatgcattcagtagaaaccatctttcaaatacccatgggaccattctgtttttcactttctgttcaatagtctatacatttcataagatattcaacactctttcagaaagtaggctttgtatttcatgatttcgcccagctgtaggctaacatgtgttctggataggtggaaggcaagctgagacatacctctatggtgtttggtaggttaggtgtattgaatgcattgtcaacttaggatattttcaacctatcctgggtttatcaggacatgaccccattgtaagttgaggaccatctgtttattcagtaaggtgtcttttaaatagaaaaacacataaaacaaggttagtattgattgattgacaaaaatgttgcaacctgaggctttcaggaacctaactctgcatttcctttaggagtgctgcttgcttcagtatctgctggtaactctatggaacatagctactgtgaataatgggaattgggtgtattttcaagttgttggcctctccagctacgctggtaatcagtcctgctctttaaatcacatcttaccatcagtcctgcctagagaaatggaggaagggaggtctctggtcttacggtctgtcccgactctctgccccaccagctatgtcccgagaaccagcctggacagagccatctgattggtgggtggtagcaggtcatgttgtgaggccctggtgcctgccttctgtcctcctgtgctcgctagaggagcatgaggcaggagcagccagtccatgctggttcctgagcgaggcagctctagggctgccagcacccactcctggggggctgagggtaggaagagcttcagaggggaggatgggactgtctgactatatttccaatcccagttgggacttgtggtctgatgaggacaagtgcctttgagggggatggggatggttgagaggaaccaggaaatcaaatgtgtcctggaaaacatggcatggtggatcttttgagttggggtgttgggatgtgtgtcagctaaaacaaggttcacctgcttcaaatgttcatccaagctttctacacttgcctctctgagtcaacatctttagagacagcaggaagtgatgaaagtcagttcacagtccatctgctctgagggcttggtatgaggggctgatgttttctgtcattttctcctttctaacatttcactttgggatcttagttcctggttgaaattccttaactgtgggagtcgaggcagcctaagaatccttttcggctgcttaagacaatgaggtagagagggaaccagctgccccttttcttacctccatgatgatgtagaaatggttccatccagcccaagggttcttctggggcccaaagctccttaagggctctgtgcataggatttgaggattagttttcttgggtggggagaaaagtccatctttatttgtataaatcctacctgaaatgcagcatttcctctaattaggaaggcaggcaacaaaaccagtatgttagctatgtctgtgactctgtcaccaatgtgggttagccgtatctctgaccctgtcaccaattgcaattacagatgtctccacatcacattagtgttgtttcagatatcttgaagtagcatttgttcccattactagttttaaattaaggtggttaatagaccccactggattttgcgatttaatatgctgataaggcacatatattgctatactataacattttttaaaaattttgataactagatttcaataagattggtatttgtgatcatatttattttcttgatttttataacagctttattgagatataatttctgtaccatacaactcattaaagtgtacaactccatgtttctaaaatatattttcaggattgtacaaccatcaccaccaccatcaccataatctaattttagaatatttttgtcccccttaaaagaagcttcgtactcattagcaattatctacattccccctttccccactctcagcccctggcaaccacaacatctactttctgtctctagaaatgtgcctgttctggacgtttcatagaaatggaatcttgtttttgagacagagtctcactctgtcacccaggctggagtgcagtggcgtaatttcggctcactgcaacctccacctcctgggttcaagccatccccctgcctcagcctcccgagtagctgggattacaggcgtgtgccaccacgcccagctaatttttgtatttttagtagagatagggttccgccacgttgcccaggctggtctcgaacttctgacctcaggtgatccgcctgccttcgcctcccaaagtgctggggttacaggttacaaagtaagccactgtgcccggccaaaatggaatctttctgaggtcttttgtgactggcttttttcatgtagcataatgttttcaaggttcatctatctttgtattttgttctgtgcacttaaaacattattctgagaaggggtctaaaggcctgccccgtcgtcaccagaagggcctgtggcatcattggagaggttagggctctccctaaccattagggctccctgcgcctaatggttcttccctctgtcagttttgcattaaaactagtacatgccttggcttgagcatggacaatcactgccaaagacccggcaggcaaggcacgcagctttccttgggatgggttggacccaggccctgggcactcagaggtactcaggcacctctgcccagtctccccaagttaccacctccacaggtgccttggagtgagtgggcatctccaggatgtagcctctagtggatgatacccgtggacagggacagcaaggtagagtaatagggccaggccccaggtgcctgcccccagctggacgccagaaccccaggaccccagctcctccagcccccaggaagctgtcagcacttccagagagcaagctgttggtgggaaggtctgaatccttgcagctctgtgattcgcgaatcataaaacctccacacttggtgtttgtgggccgagctattgtctttgtgttttctttttggagtgggtgggaagccagcttggcaagccgggtgtgaatgaacaggaatgagcaggagacgctcgctgatgccttctgtgatgtgtttcttccccagctccagaagaaaaggaagtcattaaaggacagtatggcaagctcacggacgcgtacggctgcctgggggagctgaggctgaaatctggtgagtagccgctcgctggaggagcaggcgccaggctccccggtgggcaggagcctctgtgtcggaaggggcctcagtgcaggcattctgtttgaccgctcttctctctctcttcttttttttttttttttttttttctccgagatagagttttgctcttgttgcccaggctgcagtgcaatggcgcgatctcggctcaccacaacctctgcctcctgggttcaagcaattctcctgcctcagcctcctgaatagctgggactacaggcatgcgccaccatgcccaactaattttttgtatttttagtagagacggggtttttccatgttggtcaggctggtctgaaactccgacctcaggtggtccacctgcctcagcctcccaaagtgctgggattacagccatgagccgccgtgcctggccgacctctcttctcttttaagatgtttctttatgcctcgggacctgctcctcctgcaggaacctgcaggtggggaggtcaaggtgagtgttgcctggttgtcacctgcctgtgctggggagcagggtggggttcccggcacccccaccctgtgccagagaagctcgtcttcattgcttgccggcgagggcctaagtgtttcgaaagtctggtctggggcttctgcccagggcattgtccgcagtactctagaagatgtgccaaggcgggtgggtgaagacagggaccagggcagatgcccgggggcacaggggtgggctgggagttgtcagcaggagaaaaaagccaccgatgtgtgactgtcagtcagtgtggggtgggagggagaggaagggacagtgtgatctgacttgcgaagggagagaacttccaggaagacgtgggcatctctgctcactctgagagactcgggggtgagccggtggtggccggctgtcgtgggtggtcacagccaaactcagctgttcctggagctcaggagccctggggctttaggttctaccacctgtttccttccttctctctcaggggcccccttgccatctgtgacctggctgtggacatctcttgtgacttctggggccgagacaagagcccagtcgcattcctgattctcagtcccacctggctgagatgggaatggctgtatgggttgtctgaattcgggctttccctgagccaagcgcacacctcccttccctgctcacagcagctgttttcagagactgaggatgtttaaagctgccagaaaagcacggttacgttggccattccttttctgggtgttttctgtcatggaatgtttttccctgaactgtgacgattacagtgatcatttccaaatagcatttaggaaaaatacacagtacccacatgacaaagtgcatttatgaaatgtctgtttcgtgccaagagctagccgtacattcacttatttaatcctaaaaataggctaccgtgataatgcatctttgtccccgtttacagtaacgggaacaggctcagaagcttcaagtaacttgccttaggtcagaaacttagttggggtttgaagcgcctccaaacgcttgctttttctgtggaaatgtgcgggctgccgagggttttctgcaggactttccgctctgcagcgatcttcctgaagttgcaggaaatccctgtggcccttgccttccatggtgatgaccgtgaggatggtggcctgcacctgcatgggactcacttaggaacttgttaacacggctcccgaggccacctgtgctgttgtcaccctgccttgcaggtgtggcagggatgccgcgttccatccatgctgatgcccttttttccacatggtagtatctgggcccccaggatgcctcacagtcttggcttccttcagttatagttggcagctgcttttggtccttacatgaatgactcattttgcatccgacagggactgggattcgacgaattacagtaaccggctcaaggtcacgccattctcaagtggtgccctgggttttaaactcatgccttgcggcaccagggactgccttcaaccaccaggctgttctcctttctgaaagggacaggtggctgggctcacaagggggacaggaagtgcagtaccttcccccatcccaggggaaaagtgttttttcccagggctgtgatctaagatcagctgtgggaaattggtcctaaccaggaagggtggcagccccaaagatgtcttattagagcgagccagggtgtctgcgggggtcagcagggtctaatggggcagggagtgctcagagaggagaccacctcccagggctgccctaggcgaggcctcctccctgccttcagccagtccccgccaccccacaccccacagaagggaatgaggcttcttgtggaccatgcgagaccagccctgctccgaggctttgggtgcccccaacccctgcccacctgtgagagtcaccccccggagtgggttggagtttctctgagtgtggtgtgtatgagtttgactttggcgatgtcaggataatttggtctgttttcaacacattctggaaagcaccctgagcatctgaaggatggaaggattgggctttaaatcaagttttttcagtccccattggttatcttaaggggcgtttgactttaacttgattttctttttcccctgtaagtccctgacccagaactgtgatctattttcttttgtgttttcagctgttgagcatgttgggcagcacggagtgtagctacaactgtgtgaccccacctgtgtgactgactccacctgtgtgactccagtcgtgtgaccaactacaactgtgtaactgactccaattgtgtgactaactccacctgtgtgactctgcgtgactccaactgtgactccatctgtatgactccaattgtgtgacccccacctgtgtgactctgactgtgtgacccccacctgcgtgactctgactgtgtgacccccacctgcgtgactctgactgtgtgacccccacctgcgtgactccgactgtgtgacccccacctgtgtgactccaactgtggactgactctaactatgtgactgactccaactgtgtgactaactccacctgtatgactccaactatatgattgacttcaaccgtgtgaccccacctgtgtgactccaattgtatgactgactctaactgtgtgactccaactgtgactccatctgtatgactgacctcaactgtgtgaccccacctgtgtgactccaactgtgtactgactctgtgtgactgactccacctgtatgactccaactatatgactgacttcaaccgtgtgaccccacctgtgtgactccagttgtgtgactgatttcactgcgtggctaactccactgttgcctgactccagctgcgtgacttcagctgtgtgactccatgtatgtgaccctagctgtgtgactccaactttcagttgccacgaagacaaccagctgagtcaggagtgggcctccctttcaatgtttttagctaagcatctctgcgcaaagaaagaggcttccccacaggctcttaatttgggacaagttttcccttagtttgggaaaaatttcaatctacctaaattagccttttacattagaaatcgagaaatatgcacaaaaattcataaaagcctttttccaggttccaaggtttttgtagaaagcccaaagttcccctttccttcctgaaatgccagcaggaaggggttggagctcccgtgattagccagggagtcaggcttcctgaagtttacacaatacaaagcatattaagtgagaatgtagcagaaaaaagaacttatcccaatgattatagcaatttaaattctcttgaacccaagctctcaaggcctacctgttttatagcctcaagggactctactcctatcccagactataatgaattgtgtctcctggagttgtgcagtacgcaacctgtgaagctgtacacgacagccctataaattctctagcagacagccctcctagattctagttcccacttcacagctgaactgcatttaatctctgtaggactgttttcctgtctgtaaacctgggaaaactgcctcatctctatgttgcctagttctcaggaggtccacatgggccatgcacatggtagccatgaagagtgtggagtgctcctccaacaccaggcgggctggccacaggcagtttcttagagtgtggcctggggacgctgccaccactgagaagctctgctgtctctcctctgtccctgggagggctggagggaggagggtgctgagtgagagggacctggcctgcagagggctgaggacgaggtgtgagctggaaggccaggctgtgtggcctcggggtgtggactcctggtggggggctcctctgcacaggctagcagagggctggtttcatgggcagtcacttcagaaggaggattccctggaggggagtttgaacccttagtcttttgggatgcagtgttctctagcaagtcttgaagcgaactggcctttgtcggtcttagattaatttaattcctgtgcccagtggtgggatattaccaagagagttgacacccagctccctgagggggaagctctgagatgatgcagcatttgccagtttccaaggtgtaaattcacgggccagggctgatttcaggttcccagcgtggagctgaggaaggatctgcaccaggggtgctcactgcgggtgttcactgctgtggccgccgctgcctacacctccctcatgttctgcagaagggaggcgggagaaggccctgagaccatgccgcatgggcacacagtgcttagggttctgaacctgcgggtggcgggggaggctcaagggtcatctggccgaagcttcccccttcacaggtgggaaagcctagacatctttagtcctttgtttggagctttaagtctgagggtgtctgtgtgagcagagggacagataggatggctggagggaccccagggttgggattggcacagaccaggctgggaaggtgaactcagagctgagacaacacaaggaaatgccagcccagagccttgtgggaggcctggggtggtcccggtaaacggggccttgggtctgcaagccacgtatcatgactccaacagccagctttcctggcctgataacaaattgcctaggacctgccactggctcttgcctccctccacctcactctggcagctccctctgacccatgcatggctttgctttggccagagccctggaaccaaagccctttacctggaggggacattgagactattggcgcatcctcctgggaggcccagagagggtaagagccttgcctgaggccacacaggccactggaggtgtgcagagcctggagccccactcttctgagttttgtttttccacttgctatgagatccttgatggtttcagggccctggtctctccctcagctgaggactgccaagaaccccgcaagcctagttagcttcttggctgtcagagaattgatcctgcctcacaaaagcaaatcctgtgctctaggtgagcatcgggaggggcctcacacacctggggcaggtggggaccagtggcttgtaccacactgacggtggcccgggagtcagcgaccccccacagcctggtgctaggctcaagccaggacactttccttaaaacccatagtacaggccaggcatggtggctcatacctgtaatcctagcacctcagggggccgaggcaggaggatcacttgagcctagaagttcaagaccagcctgggctatgtagcaagactatgtctctacatagtgatggtatctacagcaccatgccaggagcggtggtgcacgcctgtagtcccagctacttgggaggctgacatgggaggatcgctggaacccagaaaggggaagttgcagtgtactgagatcaagtcactgcactccagcctgggtgacagtgcaagaacctgtctctaaatttaaaaaaaaaaaaaaaagcaaacaaacaaaaaacccatggtatacagagaacacagtcaggcagtcaggctgtcaatgagattaggcaggacacagtgaggctgggattgaaggaggaggaagccatcagtgctgggtcaggtaggcagggcggggccttcccggagaggcagcgctccacacagcggtcctgaggtttgggtaaggctcttccacagaggcctctgtggttacacccgtcccaccaactgtctgggacacacaggcaggggcagttctaaggaaaagtgtccaggtccttggcttttttctatcatggagcacctgtgatggaggacagggttcttattcccctctgaggtctccctgcttccatgttagggtagagggtaggcccttctctcttctggaagctcaccgtgtgccgtgctccaggaagtaactccccctaggattccagacaaagggacagttcaaaagcttgtcaacagcattgcaataaggtcaggactaggtagcaatctgtttgcaagtcaggtgatgtccaattgtttgcttcccccataacggaaggagaatttaattggggtatcagctgacacattagtaaccattttatcagcaggttattgtcatttcttagcgctaactcagaaggactttgaagaatcgagtgacatttctacaatgaagccctttccattcccatctatttattaatgtgaacaggatcttttagtgtttgcgtctacaaaaatgaaaactagaattagaattggtgcagaacctactttcattccttcaataaatatttattcatctcattaagagatgcctttccaacacattatgactttttgtatcaaatgattatttgtcggccaggcacggtggctcatgcctgtaatcccagcactttgggaggccaaggtgggcggaccactagaggtcaggagttctagaccagcccagtcaacatggtgaaaccccatctctactaaaaatacaaaaattagctgggcatgggggctcatgcctgtaatcccggctactcaagaggctgaggcagtaaacctgaaaggcgaaagttgaacccgggagacagaggttgcagtgagcccagattgcgccactgcactctagcctgggcgacagagcaagactgtcacctcccagagaccccacctcctaaaaccatcgccttgggtgttcatacttcagcatattaatttgggggtgcacacattcagccaatagcaggtacactggttgaccacactcttaaagaggacagccaaaaaaaattatttggcagtgttttatttacattgtattgtttacattgtttgaccagttaggtatcactggaacgataaaccagaacgctctctttttaaacacttggagttgaggaacacacggctgcaggggctgatggggtgatcagaacaggacgtagaagcaccagatatgctacattaggatggaattctgaagaggggggactggaaatatgagtgaaagttccatgtggtaagaaagagcatgctcctgcaatcctgtaaataatagatggcaatgagtatcacgttactgtgtagattccatgggatactgacaagaggctcccagagttttagttttacgtgtcaatatttagaatacactgcacaatatattatttacaggcatttcaactaccgatgaaaaccttcaatggcagttttaaaatgggcagggaacgctgtctgagtccagtgtgttgctgtgacaaagttccgtagtagacggggtggcttatcagcaacagacatttatttcgcgcagttctggaggctggaagtccgagaccagcggcccgcagattggccggctgtgaggacctgcttcttgctccatagatgctgccttttctctgcatctgacatggtgggagaggtgcaggagatctctgggcacaaaccccattcatgagggctccactgccataacccagtcacctcccaaatacccccaccacctcaaaccatcaccttgggtgttcgtacttcagcatattaacttgggggtgcacacattcagtcaatagcaggtacactggttgaccacactcttttaaagggtacagcaggccaggtgcagtggttcacacctgtaatcccagcactttgggaggctgaggcaggtgaatcacctgaggtcaggagttcgagaccagcctggccaacatggtaacaccccatctctaccaaaaatacaaaaaattagccggtataatcccagcaactcgggaggctgaggcaagagaattacttgaacccaggaggcggaggtagcagtgagctgagattgcaccactccactccagcctgggcaacaagagtgaaactccatctcaaaaaaaaatagccgggcgtggtggctcacgcctgtaatcccagcactttgggaggccgaagcaggcagatcacctgaggtcgggagtttgagaccagcctgacctacatggagaaatcccatctctactaaaaatataaaattagctgggcgtggtgacgcatgcttgtaatctcagttactccagagggtgaggcaggagaatcactagaacctgggaggcagaggttgcggtgagccgagatcacaccattgcactccagcttgggcaacaagagtaaaactctgtctcaaaaaataaataaataaataatacatgcatacatacatacatacgtacatacatacatacatacagggtacagcaaactaatccgattggaaactgccggactttggggctagatggagcatgggcttaaagtgaaacctacattttggctccaacacagactagctgtgtgcttgggcgggtgattcagcttccctgggggacagtcatgcgtgtgtgaaatggcagtggtagccctgagacagcagcatgggtaagcaggctggcgacgtcatctgcaaggaggtgtaattaggagcaccagctctggggccagacttggcttgagaaacttgcccaggcactgtagctagaaagtggatttggatcccagctccccgctctgtcaccttgggcaggctgcttaacctctctgtgcgtctgtttccctccctgtgagatggggctggtaagggcgccccttgcggtgggcgggaggatggagtccgcgcctgtacagctcccctgcctccactgcgctcaccagataccggctctcctcactcccctgtaccactcccgaccccctcctccctggacccaggagccccagtgctctgtggcaatgttaagagcctctcctggctgctacagtgctcctctccccagcctcccccaggccgtggtcctgcccaggaaatgcacctgggactgttgccaggcactcaggccccccacacggaggctgttgaggaagtggtgctagaaatcagctcatgactctcacggagtgatgtcatgcaaaattttccatagctctggcagccacaggggccatcctcctgcctctccgagggcacttctgctgaactgtgcttttccctgcactgtgtcagaagaggcaggtgggtgccgggagcgctctgtggccaaggctctgatcacaagctgccaaccccggaaccccacctatcctacttgagaagctgaactctgacccctgtccctgtccccagtgtgataacttcctttgttcttaggtggttttgaggtggtttcctgaggatgtgtctggggagatgtgatgggatcaaccccctgccctgctggcagccccaccccatggcatagcagcaggcccctgggagccctgagcgctcattaaaggaacgcactttaatgacagccacacgccaccctgccacaagcagcgctcttctccctatgaagtgtggtgaggaaattggggtgagagggtggtggaactggttgttttgggggtctcttcctggagtgtggagagatcagaaccatctccagaccatggctgtagacagcggcccttgatcattcacagaagatctcgctgggcggatccttcagacctcagcggggtgggaagagtgtccttgggactagagccctgccagaccccaaaggccggtttctacccgatgatctcttgggccccgtcccgagagtgaggcacggcgccaccaggcacccccgatacgcagcgtgttgtgaagtgcccttgtgagcagcgggggatagggaacagaaaaccagctgtcagcgacagcgaggtggtgccccagagagggctgcctcattcgcctggctgcagggtccgaggtcgtcttggtagcatttggcaggaatttatttaggaagcattcagcaaaccgagtgtgtgtggtgctgggagatgacgacgaaatggccctgcccccaaggaagcccctcccctgggggcacaggtggggagggaggtcatgagctttgtgtgtgtgacaactgctgatgggaatgctattggcacgtacgaggggtgcctgtccgtgtcttgggagagcaaggaaggcttcccggaggagttgctgccaagttggcccagaaggatgaggaggagttcttctggtgaagtggggagggcagaggcaggatggtccctacggagcatgtggggacgctcgtgttcttccagaggatggaatgctgggcccgaagcctgaagtattgttagggtagagacaggcgggaggtgcgtggagaaggggtcatggaggtcttgttgggcagatggcggtgggacgtcccaggcagggggagcatcttgggcaagagcccagggtgcgaggtcatgcttatggcacattggaccagctggaggacagccagctcaggagagcagccggctggggtgtctgcccacgtgtggggcagggatgggctgcagcggggagggatttgggagcttctgtcgtagtcctgcagggagtgggagctgtgcaagaaggaagggcggagcggctgtgatccaatgactttgggaaggccactcctgtgatggagtgggggaagacagaccccaggccaggggtcctgagtcaaggcagtggctgaggaggcactggggaaggtgatttggagaggctttgggggtaggtcctgggggtctggaagggctctaggccaggaattttcagactcctgggggcatcagaatcacctggagggcttgttaaagcaaagcttgcccccagcctcaggcagctgggcggcaggaatctgcatgtctaacaggctcccaggggatgctgacttgctggccagggtcccacactttgagaagccccgcctgaagcttacaggacagggcaggttcttgagccattgagttgggcaatgccatgggaagttgcaggtgcacagacgttgccttcctggctgcggttgaacctgggctccatttgtccccttggagctccaggcggccgggccgacttcgaccctgagctctcctgtctgatttcctttccaggtggcacgtctctgagcttcctggtgttggtgacaggctgcacatctgtgggcagaattccagatgctgaaatctacaaaatcactgccactgacttttaccctcttcaggaagaggccaaggaggaggaacgcctcatagctttgaagaaaatcctcagctcgggggtgttctatttctcatggccaaacgatgggtctcgctttgacctgactgtccgcacgcagaagcagggggatgacagctctgaatgggggaactccttcttctggtgaggccctgggtcccctgcagagggtgggccctgggtctcctgcagagggtgggccctggttggcatctgaggccttgacctccacttgcaccacccccgggttatggggcacctctggagagttaggacccaggcctgctctcagcacaatgagaggaaaactaaccctgaactccctgccaccccccacccctggcccctggaatgtgttcagtgtagatttggaaaagaaacctgcgccaggcatggtgcctcatgcctgtaatcccagcactttgggaggctgaggcaggtggatcacttgagttaaggagtttgagacaagcctggccaacatggtgaaagcccatctctactaaaaatacaaaaaaaaaaaaaaaaaaaaattagctgggcgtggtggcaggtgcctgtaatcccagctactcgggaggctgaggcaggagaatcgcttaaacccaggaaacggaggttgctgtgagccaagatggtgctactacactccaccctgggtgacagagcaagactctgtctcaaagaaaaagaaagaaagaaaagaaaccctgttccataagtaaaaaacataagagccgacgtctgctgagtgcttcctcagtcccgggtgccgagctcagtgcttctgcctggattcactctttcagtcttctcaatcatggttacctccagtgtgcagccgtttaccgctgatgtttataaagcactgtgttcgggtcaccgtgctaagatctctctgctggtaataactcatcattattataaaaacctttataataattatgcggaggctctgttaccccattttacaggtagagagactgaggcacgaatagtcgagggaattttgccaaactccacacacttactaagtggcagagccaggatttgaacccaggctttctgggtccaggtcccaagctggtaatcacagtgctaaaccagtcccatcaatggggaagctgagtcaccctgcccaaagggacttgtagcaatgcactaagactagtcccggagcccaggcagaggcggctggatttctgtatgtttaagatctcctggtgctttttcactccacagcaggacagagacaagagtggacaaccctgtaaatacataaattatctattgccctttctggacataatgctgtttctgtcagattcgcactgatgcctagagatgccaggtagaagcaaaagtgaggaaagtcctgccatgggagtcgttccaatgaacctcatctaatgtaatgttttagaatccagtgtctgccttttgaagctatatcagttttcccagctctgagacgggactcgtgaggtttatttctgacctgtttgtgcctctctccctttgccagaggcagccacaggttttcatctggccttggtgctttggattccccagaagtgaattcctgatttctgccggaagaaggggaccctccccacatccctgtgtccatcccaacgctccccacccccacatcctctttggttctctggtattgtggatatttgggggcagtaatgtgcccagacttcaaaatgcacgtgaatcaaggctgggcatggtagctcacgcctgcaatcccagcactttgggaggccaaggcaggcggatcacctgaggtcagcagtttgagaccagcctggccaacatggtgaaaccctgtctctactaaagatacaaagaaaattagccaggtgtggtggcgcacacctgtaatcccagctacatgggaggctgaggcagaagaatcgtttgaacccaggaggctgagattgcagtgagccgagatcgcaccattgcactccagcctgggctacagggtgagactctgtctcaaaataaataaataaaataaaataaataaaatcgtgaatctca

SEQ ID NO: 15844 - DNA, 30383 bp, Homo sapiens
aggtgagctgctgtgactggctgctgaagatcatctgcggggtggtcaccatccgcaccgtgtatgcctcccacaagcaggccaaggcctgcctcgtctctcgcgttagctgtgagcgcacaggcactcgcttccacacccgtggcgtgaacgacgacggccatgtgtccaacttcgtggagacagagcaggtgagtgcccaggcccatctgtggcaccaaatggttccgagtggctgcagctcttgcacacgcgctttccacttggggcagaagaggccctggcatatttgtggtggtctctgatcaggcttcctcctataagtggagaacagcacgtgtaattgggctccacatgaaaatgtgacctctggtttgcatggtgtatcctttctgattcacatctcatgcagggaaaatgctgcttagccgaggtatttttaactaaacggaatcaggaatttttgccttggtcgtgaaaggtgggcagtattccaagggcagctgacagatgaacaaatagggtttgaaaatccttttaggacaaaaataagtagatcaatacaatggggggatgaaagaagaaaccattattttttattctaaatcaactgaagcttctcctggaagccagtattagcaccctagagttgtgaaatctgcgtgttaagcagccgctcccatccgttcccctagaatatagccatctgcttaatttctcctggagttttttctaaattctgttctcatttccagagatgctgtcttacaacttttaaatttttgctctaacttgcaatctgtaagataaggccaccatgtggaatacagtggtgtaagccataagaaaggaaaaccccggaaggcacatgtatggtactcctgccagggcaagctgggtgccctgtgtttactgagtgaaggcgtggctgtgcgtcccccctcgctgccgctgctgggagaggaatgccttatgcggactttggccactttaatccagcagaggtttgagcacctacctttactgtgtgggactttctgcctgctccagtgttcagagggtagatacagagatgaggaggctgctctcagagtccccactcagaggaacatcagagcagggggccctaagatgggcaacagctgcaattacttgcctgtaattctgctcagaatgtctgcactgtggatatcaacgaggctattatgtaaatatctggttaaaaatgagattgcttttggcatcttcgtcatgaagtctttgactgttcctatgtctagaatggtattgcctaggttgtcttccagggtttttatagttttgcgttttacattcaagtctttaacccatcttgagttgatttttgtatatggtgtaaggaaggggtccagtttcagtcttctgcatatggctagccagttatcccagcaccgtttattgaatagagaatccttttcccattgcttgtttttgtcaggttggtcaaagatcacatggttgtaggtgtacggccttatttctgggttgtctattctgtttcattggtctacgtatctgtttttgtaccagtgccatgctgctttggttactatagccctgtagtatagtttgaattcaggtagtgtgatgcctccagctttgttctttttgcttaggattgccttggctattcgggctcttttttggttccatatgaattttaaaatagttttttctagttctatgaagaatgtcaatggtagtttaataggaatagctttgaatccataaattgctttgggcattatgtccattttaatgatattgattcttcttatccatgaggatggaatgtttttccatttgtgtcatctccaatttctttgagcagtgttttgtaattctcattgtagagatctttcacctccctcataaactgtattgctaggtattttattcttctcacagcagttgtgaatgggattgtgttcctgatttggctctctgcttgactgttgttggtgtattgattttgtattctgagactttgccgaagctgtttatcaggttaaggagattttgggctgagactgtggtgttttctagatatagaatcatgttgattgcaaacagggatagtttgattcctctcttcctattgggatgccctttatttctttctcttgcctgattgccctggtcaaaacttctaatactattaatatgttaaataggagtgatgagagagggcatccttgtcctgtgctggttttcagcttttgcccattcagtatggtgttggctgtgggtttgtcataaatggctcttattagtttgaggattgtggatctaaccaaactaaagagcttctgcacagctgaagaaactatcaacagagtgaacagacaacctacagaatgggagaaaatttttgcaaactatgcatctgacaaaggtctaacacccagcatctataaggaacttaaacaaatttccaagaaaaaaaaaaaaaacattaaaaactgggcaaaggacataaacagacacttttcaaaagaaggcatacatgcggccagcaatcatggaaaaaagcttaacatcactgatcattagagaaatgagaatcaaagccacaatgagctaccccctcacacaagtcaaatggctattatttgacttgcgtgaatattatttgacttgtgtgaaatgagatacctcctcacacaataatggctattgttaaaaagtcgaaaaataacagatgctggcaagattgcagagaaaaaggaacgctcatacgctgttggtgggagtgtaaattagttccaccattgtggagaacaatgtggtgattcctcagagacctactcacaatagcaaagacatggaatcaacctgaatgtccatcagtggtagactggataaagaaaatgtggtttgtatacagcatggaatagtatgcagtcatgaaaaggaatgagatcgtgtcctttccagcaacacggatgcagctggaggccattaccctaagcagactaaggcaggagcagaaaaccaaacactgcatgttcttacttacaagtgggagctaaatgatgagaacacatggatacaaagaggggaacaacacacactggggcctatcagagggtggaggatggagggtaggaggagggagaggatcaggaaaaataactagtgggtgctgctaggcttaatactgggtgacaaaataacctgtacaacaaacccacataacatgcgtttacctatgtaacaaacctgcacaagtacccctgaacttaaaataaaagttaaattttgaaaaattttaaaaaggggacagagagagaagctgtggccccagctgggtggttttctcttttctggctgatgtctgcatggggagagtcccttccctgccccacttcattaccacttgccttttattttgaacttttatttaaaatactggttttggatttcaaccagaattttaagacttggggtctcatctattgcatctcatcgagtaagtccctgggaaccactgtcctttagcggcactgtccttcctaaaacaccggacattctaacacggaaaatgaaagcaaaccgcatgcatttcctaggactgcccataataaagtaccccaaactgggtggccgaaaacaacacacttattctctcccagttctggagactggaagtctgcaatccaggtgtcggcaggactgctgtctcttcgaagtccccctggggagaacccttctgagcccacctgaccgccccggctcttggtggcctctggcaagcatctctccatcatctctgcctccgttttcgtgtggccttctctgcctgtgtctctccaggactccagtcgtactggatcagggacccaccctactccagttgtcctcatctttttttttttttttttttttttggagacggagtctcgctctgtcacccaggctggagttcagtggcacaatctcggctcactgcaagctctgcctcccgggttcacaccattctcctgcctcagcctcctgagtagctgggactacaggcgcccgccaccacgcccggctaattttttgtatttttagtagagacagggtttcaccgtgttagccaggatggtctcgatctcctgacctcgtgatctgcccgcctcggcctcccaaagtgctgagattacaggtgtgagccactgagcccggcccagttgtcctcatcttaacccattacttctgcaaagaccctatttccaaacaagttctaaagtactgggagttggtacttcaccatatggtttttggaagggacacagctcaccctgggccgcggatgctggctcctgttagaggactgtgctttacaggcagcgcctgtggccctgtgagaactctcgctgcaatctttgctttctcacttttacagaccaacaagccctaccacagaccaggctgggccttggctctggccacttcgtgtcgcgtgcctgctgactggcgcttgtctcctgtgttgccagcctgcttgttagagctcagaggcagggaccttgcccccacatctcctgaatctcccacctcgggcagcctggcaaggccatagagatatgaacagcctgcccttccagctcctggggtacagcccgatgctgttgacattgcctccacctcccttccttgtctgggctggggagggatttcttggctcccataagcctttgtgggcttcctagtgtgtgtgttttgtcctttttcgtcctctgggctctgggctagacagggctgctctccatgaagtccccacccaaccttactcccaggagcagcagtgattgacagacagctgggcaccaccacctgccgctcacccacagatgcagccgctgcggatgctgcccccgccccacctagagagcataacttaacccatggtgacttcgttaacaagagatgcgtagcggggccccaggaaggtggccctacacccacggtagctcttggttgggtgcctatgtttcaggctgtgctgatgagcctggaggtgcctgggctggcccatccatcggagaccccggacagcctggctacccaggaaggggagctgtcacttcccagcgctgagtccagggctgtccacgtgggccttcagcaaagcctgactgagcctgccaggtcccaggctctgctcccaggtgggtgggcatggggggcagtggtggtgtgatgggggcgcagcaggagtggggcaggtgaagctggtcctgccaggtgctgccgcccttccaggtggtacttccgataggtggtgttcggctggtgacccctgcctggaggtcgaggggaagcacagcagagccagggcagggagaagcgtgtgctgcgcgcagcccaggaaggaggggcatggagcagaaagaaacacaggtgaactggaagagcagagagggttcatgcttcctgcacacatgggaccagggcatgggcctggtggggggtcagcattcctccaagccaaaaaacacaggtgtgacagccctttttctaaaacattacagaggcagcaggagcagagatggctgcagggaagtgactgttccccaaaagcaagaaactcctgttgcctcacttgtataagccaagggaacccctcgctttctgtctctggagtcactgaatatttttgtttatgtcactttatagcagtactgatgcttaggttgatctaagttcgtttttaaaacacaaaacacgtctttaagtggaatgcacagttagtatgctcctgcgaagcggcagccccgctgccctccctggctctgcggccacctgctgaggatggttcttctaggatgagtcaggagagtggagcaaggctcagcctgcaggtccttgctgagctcagggaagcagccccgtgaggatcgggctgcgtggtctgcaggggaacctgcctgggaccctgtgagatttacctgtttcaggtgccagtgatctgctgggattctggagaggtccctcaggggagcctggcacttcctacccccttgagtttgcaaagtcacaactgagggcctgggttgggacggtgtcatgagctctccataagctttgcttatggtacaggagcagactgtctggcgcttctggagacctttaacgtgctcctgtagacagtcgggtaaactcattctggtagcacagcgtggcctccccctccacctgacatctgaggaagtggcaggctctgcatctcggtggcctcgccccagggtgcagggagcaactttgaggaaattagtgctgagcctccagtaggaaggaggactgtgctggggaggcaggtgagccccttgtggtgccgcccgcaggtcacactggcctggggcccctgcagaggaaacaggatccaccagccaggcccgctgaccatttggaagtggagcgtgcacacaggcggctgtgcggtcatcgtctggcaaacaaatgatgggaccggaccaggagcagactggctccctgtggtggggactcttggcaggcggatcggcttcttaggaattaattctcaggaagccagaaaagggggaccctgtggcaccctctgcttttgctttggtttaacatgtttcctaggaggaataattaatcttctttctctgaggcaggctgtgtgtgtgtgtgcatgggttgtatgtgtacagtgtgtgcgtggtatgtgcatttatgtgttgtacatgtgtgtatgtgtcatgtgcattgtgcatttgtgtatacatgtgtgtggtgtgtgccttgtgtttgtttttcatgtgtatgtgtgcagtgtgtgcatttatgtgttgtatacacacatgtgtgggttgtgtatgtgttgtgtgtctgcacgcacagatgttgtgtacatgtgtagatagcatctcagcctccttgggaggaagccttgagtctttttggctctgctgagtcatagctggtgggcttgctctgcagtgctgactcaccacacagaaaaacaagaccaaaaagtcccctcagtctattaaaaaaaaaaaaggatgtaagataaatatttggctattcaagataaggccactgactcattcagggaggttaggatgactgcgtgtcctcccaggaatgcagacttggagataattggtttgcagacactgtatctggaagcagaaggtcagcagaaagcctttcagatagaaggtatatgtacccctgtgagttttcctgcctcgtcgctctctttttatggccattaggtttctgttcccactgctctggaagcgtcactcagggtcaccctctggctgctcagtctggggtctaggcactggcctggcctcatcacagcactggcacgggcctccgacttttcttcccgtggccccactgctcttcccggtctccctcccacctcttgtctgttccttcttgaatccctccttcttcccacgacccaagctctctccgacgccagcaggtgcccgcatgcatagtcatagcgtcagggcctctggggaagagaaaacagcttcgttttttgagtggctactctgtgctgggactatgcccccctcatttacccctcacagctcatcccttctccgtgcacaaggtgacatgaacttcatgtagagagagggaaactgaggctgaagatggctaagtaatgtgcccagggccaccctgctgggcaaatgggggtttgcaaagtggcagtcggacccagcttgtgctaataccagagcccactttctctcctgcttccactctctgtcctgcctccccaccccaagagccctctgtcaaaatgacatctgtgaggtgagacatcacttcttccactggtattaaaagttgttcgcccagaatggaaatgtatcacttgcatttgatggtcaagttatgcctactgccttgggaacaaagaagacagtcttgatgataggacggggtgcagatgtcacctacttcccctgtggaggacggggtggagaactttggagctcctttcttcttgctccagtgtgggcagggaggggcatacagagcactgacagccctcagtgttttcagaagctggttctgggcaagtctcagcttgggaggagcctgatgtgatgctggaagtggcattgttagcacttggggcagtcagagtgaagggagacattcctcagcctaaatagatcgtgggcattggtttttgttgttgtttggtgttttttggatttcactctgttgccccagctggagtgtcgtggtgcaatcatagctcactgcagcctcatcctcctgggctcaggtgatcttcttgcctcagcctcccgaatagctgggactacaggcatacgccaccatacccggctaactttttaaaaattgttttggtagagatgggggtctcactttattacccaggctggtctcgaacttttgggctcaagcccgcctcccaccttggcctcccaaagtggtgggaccgtaggcgtgagtcactgcgcccagcctggatattgttaaacattgtctttatatacaaatgttggtttcttttccaggaacctgggcctatgcagggcacacacgccggtcagttgtatgtacctaatttcacggtagccaactatgtctgtagccgttcaagcaacctgctattttattctgttttgtcagtagaagaatggagttcaacagctttgctggtactcaatacctggaaacagacagcatgttcttaacacatgcttttttcctttggagattaagggatagtattccagtttgacaatgtagataccaggctcctgtaattcctgtggcccagggaaacagtggctctaattttcaggtcctccactgcagaatgactcattcctgtgtgatctgagcgtgatctcgcctgcatgggaagctgccctgtaagggagcaggccggtgaggaacggaaaggaccacagcagcgcccaggccgccctgccaggccaggctagagttgcgcagataaaggccccgcatctgataagtgtcgccgcctgcccctgctggcgctcaggatcgtacttcttgtccttttaaaactcccttgcactccagcgtcattggaggcctgcaggcacactctgaaatagctgtacgtgtgggtggggaggagatagatgtcttaaagtgtacggatcatttgtttctctgcaggtgctgtcacactggaagcttgtggaaaccgtgttgtgtgtgttaactgagtggtgtgtttaagaacacagtggggcagggccaggaccaagtacaagatcaggttgagtcttgcattgtcaagtacgagactggctagcacagtcagtgaggtcttttggctatcactggtgcattttatttcattcagtccttttctcatagctctcttctgcttagctatttgccaaggcaaaaatagagggctctaaggaaggttacattccagagcacactgacttctattcatacagggggtggcggaaggctgttcctgggattttcagggtgacgataaggttgtgccctagaagtgtgaattcccggagaccctgggaggccccaacccccagcagaccccctcctcagaggctggtcgacagccagcatgcccgcccagtacctggcgagaggtcagggcgcattgccggatgggggagcagaggacgccggagtccaccgtccgcccttcattctggctggtgtcgggtcacaggtggccggatcccgttacccagcccaggacgttcggtttcattgaagaatacctttccctttctgtttccttgtgccgcagatgatttacatggacgatggagtgtcatcttttgtccagatcagaggctccgttccgctgttctgggaacagccagggcttcaggtaggtcatgaaaaaacttaaatgtccccttgtgatgttgtccgccctgcccttcccttcaatagctggggaagatttcttttaacacgttcgtttcatggcatagtttccagtctttttcctcagccctgttgtgttgagctgagctatcaaagtgtgcacacgtgtgtgcatatgcatgcgtgcgtgtgtgtagaaaacacagacaccactttgttgtttctggtcgtcaaggatgctgtgtgaaaccgctgactcgggaacggtgctgcggtgcctgctgagtgggtgccgcgaagtgagcttgggtagcactgcctgaggttagaccctgagttcggtgtactgaggacgtttctgagagccgtgactctcatggagggcttcaggaaggctctgtggctgcgtaggtctggcacccggtgctgcctgttgtggggccacgtgagacttccacagctttcccgtgatttctaaaaataccccttgccgtccaaagcagggctctggtcagtgccagagagatttggcattctttctcctgggaagagcacagggtggggacacattccaagaacacatttgtcatcaatggaatgacacgctgcctccttcaccagggtctctaacaaggtgggttatgggccgagtggactggaggggcctccccactaatccccagtcttcctccctgtcccgaggggacgtgggtgccttcagaaagcctctcggccagggcctttgtcgcctctcggctcttcttaccgacagctctcgtgtgactgcatttgggttgccagccagtggctactggggcccagagtgccatctgccaggttccagggggtgtttgacaacgctggactcagggtccccagtcctgggttcagcttcttagcctgctctttgacttgaccctgtgccaggagcaggtgagtcacttgtccccatggctgtcagcacgctgcagtgacagcattggtgaagtactgggtcagcctgggcagtgagatggatgaatggaggtctcgtttaggctccacgctctggtagggagaaaagtcttgattaacattcagtctttccactagaaagagcgcaccacactgcacgagataactgacggcctccggagaaacgctcctgaggacagctgtgacacagaaactcctccggagggctgcccaaaggaggtttttggaaaaatagctttattgcaatataacttacacacccatttaaagcctacaacttggtgcttttactgcatttatggtgttgtgtaaccaccactgtaatctaatcttagaacactttgatcaccactaacaaactttgtccccgttagtggtctctcccatcccctccaagtctccctcatgccaactcgactgttcatctactgtctttatctatagatttcccattccagacgttccaaaagagtttttgaaacctgattttctttaaatatggagttttcctttggaaacttctcgagctctgtattcaggagaatgaaagaattgatcgaatgagtgtggcacaaaaaggagacagggagaccatgttgtgtttcatgtaaagtttgtaagaaatccaaaaattaggggaatggtcatgatggattcttagaatttgggaaggaccctttggaattcatccattccaccctctgactctcagttcaggggtcctccttttttttttttttttttttttttttgagatggagtctcactctgttgcccaggctggagtgcagtggtgcaatctcggctcactgcaacatctgccccccgagttcaagccgttcccctgcctcagcctccagagtagctgggactacaggtgcccactaccacacccagctaattttgttgtatttttagtagagatggagtttcaccatgttagccaggctggtcttgaactcctgacttcaggtgatccacccgcctcagcctcccaaagtgctgggattacaggcgtgagccaccgcacctagccaggccagttcagggatcctcttccaggacctccaaagggctgtcctccaggccacaactggggatggttccgactcttggtgaattcctcctgtattgcactgctgcgtctgtctgactctagagtgttttggggtgcgcgggaatatgtctgattcttctccgtgtgactcaccctcagtccttggagggagtcttctggttccctcttcttcttcttgtcttctctaaggcctcccaactcctttggccaccttccctcctgtttctaagactctcaatgttctcatctccctcatctaaaaaatgacactcctttttgtcgttcccctcttggatttcattttggtcttaccttgaccttcgtgctgcctcagatgtagcctgacccgccatgggatgactgtgccttggtctgtcaggggccaggagcagtggaccacgaggtctcagctttttggcagctgtttcaccctcttaaattcctaacatttgtgctgcaccaaagcctccatggtttcttctttttgtttcttgttttgttttgtttttgagacgaagtcttgctctgtcacccaggctggagtgcaatggcacgacctcggctcactgcaacctccacttcctgggttcaagagattctcctgcctcagcctcacaagtagctggggttacaggcacccaccaccatgcctggctaattttttttgtatttttagtagagacagggtttcatcacgttgaccaggctggttttgaacttctgacctcaagtgatctgcccgcttcggcctcccaaagtgctaggattacaggcgtgagccatcgcgcccggcctccatggtttcttcaaaacaagcttcagaaggctttagtgttccttaatcttattaaggatttgctaacctttgggcctaatacctgtgtttagcctctaaacaccactcatcatcaaagagagatgaagtcatcttcacagggggccgggagggcagcgggaagtggtggtctaccgtcaccggcttcaactgtcactatcaagcctaaggctgcttctagttatttttctccactttgaactttttctcttccttcttcacttaggttagatgaaaagtgcaaagattttggggtgagtagcttgcgtattaagctgcaatgctgtccctccttgacagctgccgttggaaacccaggagcccagcaggatggggcagggttgagcagagggtggtggatgaggatttgtctgcatgttttcctgggtaatggtaccttcagtacttcctgactccatttctagcagccgtgtacctttaataaatttcatttttacgtgtaaatgggctgtgcagtttataaatagccacattgaaattttacccttaaagcaaattgctccctggtctagctagttcgagaatctatttatgatctgtgtctgtggttgacaacgttgctcccctggtcattgtagaagcttccccccaccatatgctgtatagacacgtgccttgccaaggtgagttcagtctgtcttttgaagtttcctgcaactgaaccaaacggaggaggatgccgagtagagcagacccctcttgccctgccttcacctctttcctgccagaaaccattcgccaagtttgtggagtcgtggcgctggatgggcttgtgtgtttgtaccttccttttttccaaaaaggacatgagatggcttgtagtataacagtttcaaaaataagtgaagaggtctggatgaagggcaagagtcgaattggtgcccacgatgcatgccgtgggtcttgtgtgcgtgggaaggaacctgacgcttgttccaagcttccccgcagccaccacagaaagaaccacagtcacagccagtttatgacagtgactcagagcacgagctttgaagcgacgcagacctgggctcaaattcaaactctggctcccctgctttgtaaccatgtgtgtttgagaggctcttatctgtgccaagccttagtttacttttctgtaaaatggggctaacaatatctaccttatagggttctagagaggattaaagagcgtaatataagaatttggctgggcatgggggctcatgcctgtaattccagcaatttgggaggccaaggtggacagatcacttgaggtcaggagtttaagacaagcctggccaacatggtgaaatcccatccccactaaaaatgcaaaaattagctaggcatggtgtcaggttcctgtaatcccagttattcaggaggctgaggcaggagaatcacttgaacctgggaggcggagtttgcagtgagccaagattgtgccaccacactctagcctggtcaacagagtgcgactctgtcaaaaaaaaaaaaaaaaaaaaaaaaaaaaaaacacacagtatctagaatctaaaaagtactcaaaatggcagctgctattgatactaatagaaacaaatgataacacccaggagataaaaccaatggtggcatccggagaagcatggctcttggtgccgtgagcactgaatgagagtttcctcctgtctttgtgggaacagggacaccgtgagatgtagtaacatgaagacagcttcctggtcagtcttatctctcatccctcatagactcatcgtaaatcagtaaccccagatgaagccatttattcatcccaaacattcactgagcgtctgccaggtgtagggggcaccagggatcagatacagtccctaccttcagggagcagggggcaggacagggcagtgttgtgtggacagagccgtgttggaggaagggagaggccccgggggcagctctcccaggctgagggtgtggggtgggctgcccaagggtccagactggggaggggtgaggaagaagcactcaggcaaggaaggcagcccttgcagagggaacaatgggtgcaggtgttgtaacccttgggttcacagtgatcagggagcatcactgggtagcttcttgaagtcctgggcatgaagggaatgggaggagagataggagaggtgagcagggctgggtcaagggcctgtggatgctacactgaggagtttgcatcccataccagcagctactcaagcagtactccccaaccttgctgcacagaagactctgctggggagcttgaaaaatcctgatacccaggttgataccatacacattaagtcacaatatctggggccgggagccaggcagctgtcctttttgaagacccatgggtgactccagcatgcagaaaagtatgggaaccactcggtgctgtgctggcaagccagttttattggggtcagactgggtgcagggagctttggtttgtagcatttgtccattgctgtggtgtaaattctcccatcgtggccactttcaacctacggctccacatcactgagctcagagttgggaccagctgggtgcaccgtcggcttgcaagcctgcaggagctggctccagcacacactggacactgctaaagggctgcaagaggtagagacacaattagacagaagtctaggcagtgttagtttggaggggaaagacaccagatgggaggccgttgagctgagatttttgggtaaccttaagtctggtaggagtggtggggtgcaggggagaggtgtggaggtgctgtctgcgatccttgggcctcttgagtgctgatcgagactctgctgtgacttccacagccaggagttctccagaccccgactatcctcatggctgtctacctaacctcagtctctggtctataggattgaactaatgactttaggggccagataagagtagctggccctttgcccagaggggaggaggacggggtggaggagaagggaagctacaaaatgcagtgacagtggtggaccctgccctcagctgcagctcgtgcctgtggcttctgacacccagtgacctcaggactaggtgacaccagagaaggtggatgctggtcagtgttggagcaggacagaggggaggaaggatatgaggcccaaggaacccagacaaaagggatgcacggggtgacggaggaagggtgagctccggagagaacatgaggcccagctcccctccacttttgcccaaggcctcactgtgttgcctttccacctgcctaaaagaagcagcttagggtcatgactcagggagaggcggttagacaagtccaataatacaacttgtttaggggatggagggacccagcctgaggccctgagcccagggaagcagctgtggcaagctgagcctggtcatggtgtccctgaggctctgcaggtatggacatgcctctgctggtatgcatgcagctctgcaggtggggacacggctctgcaggtggggacatggctctgcaggtatgcacgtggctctgcaggtggggacacggctctgcaggtgtcgacatgcctctgctggtatgcacgcagctctgcaggtggggacatggctctgcaggtatgcctgcggctctgcaggtatgcatgtggctctgcaggtatgcatgcagctctgcaggtggggacatgcctctaccagtatgcacgtggctctgcaggtgtgcacccggctctgcaggtatggacacagctctgcaggtgtggacagggctctgcaggtgtgcatgcagctctacaggtgtggatgcacctctgcaggtatgcacatggcccctggagctgtcttccctgctgtaccttctaccccttcatgggcatttgtaacctaagccaaaagggaacataacaagtccagaaataagtcaaaaccagaaccactcaaacttcagcgtgtgtgcataggaatctcctggagggcttgttaaaacacagattcctggccccacccctggagagtctggctcagcagatctggggtaggcccaggacttcgcatttctaacaagcacccagaggaggtccaacgaccacactttgagaatcactggtctagacttaacagatcccttctgcccattccctgctctggtcattcacccgggggtggtgctcccgactgacttcttagttctctgaggtagaaaggtttgttgtcagcagtgatactggactagccactgcaggggatattgaccatgcctgtgacagttgggcccagccctgtccacacggaatgcttgtctaagtccaggataaaagacaagcctgaggcctcagaaaagatgtgctgcagcccctgtccgggctgtgccttctgctgtgggcagctgattccagggcatgccgtctgcttgccacattccctgagtcctcactgatgtggttgaggggaccccatcaaaggcaggtgcctcatttcactctgctttgctgcctgttccctggactcaagggcatagtttctgtcaaattaatttgcgcttgtgcaggtttgttagaaactttgaagtgcttctgggtctttccatgggggttctggttaggtgtcatcacccaggccaggggattcagcgtctcccatccctttcccacctttccatgacacccaatggcatgttgactcggagggcgctcagtaactgaggaatggactgctgactgatagtgcagtttatatgttaacgggggagctatagagcctggggattggagcctgctaggtccagtcatctgtgcaacagtttctacctaattaaaagaagaggctttgggttatgactcagggagagacagttagacatgtccagtaatagaacttgtcacgacggagagccaggctcctcagccctggcctgccaagcttgtattctcttcttactgtgctcccatggggaatgatcctataaacagctgctgctcattgctgaagccaggggagacttcttgtgatgactgacagaccacacagagcaggtagcccctctcttgggttttagccctggtgacctctcatagggtggctgaggggtacacagacccgctgacttccctcagggtgcaggatggagcaggcctctcggtagtgcgaccatgaaagttttcaaattttctgagatttcctcagccaggtgttgatggccatggggataaaggacagaggtaacacaggcagcaaaaaaataaaaaaaaaccccacaggtttggggtgagcctttcttaggagctccattagccaacagccaagatacctcattttgcactcacttcacttgtgaccaaagtgtcttaggaccaaaagggatttgggactttgttgaactgtttatataaaaaaaacctggctgggcacaatggctcaagcctgtaatctcagtactttgagaggccgaggtgggtggatcacttgagcccgggagttcaagaccaacgtgggcagcatggcgaaaccccatctctacaaaaaatacaaaaaaaaaaaaaaatagccaggtgttgtagtgtacacttgtagtcccggcaacttgggaggctgaggtgggaggatcatttgaacctgggaggttgaggctgcagtgagccgtgattgcacctctgcactccagcctgggcaacagagtaagaccctgtctcaaagaaaaaaaaaagaagaagaagaataagaagaaaagaaaaggaaaccttctccaaggaatctctaaatctattgctgagaaaccagttctctagatgggtgcttttcttgagtctgagatggggcagttgtatcacctgcagtgttgagttatacaatgatacatgaagcatgataatagctgcatctcataacatagataaatctgctgacactacttttacaacactcaaacagaagcaaaactaaagagtgcatttttaactacttattcttgaaataatttcagacctacagaaaaaatttaagaacaagagggaactcccatatgtccttcacccagattcactaaattttaaccttttgccacacacgttattattttttgaaccgtttgaaagtaggttgcatatatcacattggtgttagtccatttgccttgctgtaaaggaatacctgaggctgggtaatttataaaggaaagaggtttatttggctcatggtaatgcaggctatacaggaagcatggtgccagcatctgcttctggggagggtctcaggaagcttacagtcatggtggaagaggaaggggagccagtgtgtcatatgacgagggagggagcaaggagagggaggttgcaggttcctttaaacaactagctctcctgtgaaccagcaagaactcattcattaccatggggttgtcaccaagctattaatgagggatctgtccatatgatccaaacacctcccaccaggccccacctccaacactggaggtcacgttttaacgtgagatttggaagggacacacatccaaaccatgtcagtgtctctttacttaagtgcaaaatatactctcctacatatagtataggtacacatttgggaaatttaacattgacaaagtacttcaatctcatctgcaggcaatattccaaattgatcacttgtctcagtgatgtcctttgaagcaccttttcccgccttgagtccagcatcacatactgcattttgtggtcatgtctctagtctttaatctgcatctgttcctcggctttctgtctttcaaaacattgatgtttttggagaatgcaagccttcttttccgttaagtcgagggtccctacatttacattttcctagtgtttcattataatcacattcagtgtatggatccctgaccagaatgctacctacatgatgctgtatccttctcagggtaccagatctggaggcacacggtgtccatctgccactcattagtgatgttaattttggtcacccagtcaaggtgctattcagtttctccacttacggttaatatgttttcccttccaactaatcagcaatctatgggagacactttgagaccatgctggtatcctgccttttactaaactttcccttaagatttatcatcaacagataatttttgctgaacaattatttactatgacagttgtaaaatgatgatttttaaatgatttcctccaaatttattacttggtattctactatagagccctctcttgttccccattcacccacctacacacccacccacctgcacactgattcacccatctgtcacccattaacccatccattcatccactcattcacccacccacctgcttatccactcatcgtccacctatctacccacccatccacctatccacctacttgtctacccaccatccacccatccctctatccagccagtcatccatccatccatccagtcatccacccatccagccatccagccatcaatccacccagccatccacccatccatgcacccacccatccacccacccactcacccacttacctatccatccatctttcatctacccattcacccacccatccatccatcctcacattcacctgtccatccatccacccacctatccatctactgatgcatccactgatccatccatccacccacccattctcttatccacctttctatccatccactgatccatccatccacccacccatccatccatccccattcacccatccatctatccattcagtcgcccatctattcacccatccatccatccccccattcatccatccacccattatccatccattcagccatccacccatccattcacccattcatctatccatccactcacccacccacctacccatccacccatctatccatccactcagctatccatccatccatccatccatccatccactcagctattcatccatccacccacccatccatccactcagctattcattcatccatccatccacccacctacccatccacccagctattcatccatccatccatccatccatctattcacccatctagttatcatcagtatagattcatgaatttctattttattcatcaggttaaaatccattactgtcctcatacagtttgatgttcagattgtcccagatttggccagcaaaagcccctttaagctgactccagcaacaatatgtattttaaatgtattttctaaaactaagttgagtattaaataaatagttctattaataataaggcaaatttgatcattaggatgactcagattttagggggaaattagtgtccctgaaggcataaaggagactgagaagcagtttctgtctccacagttggcttcactgacctctgtgctatcagagagcttaggatctgacatctgcctcatcatcttaccctggatctgctttctgtggaagaattgcagcagacatggtcatgttgcagttaggactgggcagcagcaaagccagactcgaggcacctagacctgagtttggagcactgttagctgaatccagagagctcagccttcctgagccctgaagagaccacagaggtggcctagtgggtgccacatgcagcctggctgggagtaagaaggagaatgggaaaaaccatggcctccttggtttgcagagaaggaagaatcactgttgttacttctctttgctttaggttggctcccatcatctgagactccacagaggcctggaagccaatgcccctgctttcgacaggtagggattgtctgacaccatccaagcctgtcattgtcatccttagacatcgtcctcccatcagacacaagggagagggtgcgacgggaaagggaggaccctgaaccctgaatctaaagctgctttccctttggtcctttatgcaagaagggagatgacaaaatgggatttttactttgttctcaggtttcctgaaggtaaattaatgaatgttcaggtagcactttataattattttatcttaccagtttcttgcaatgaggcttcatctctatgccctggttaataagggatcatctaaattatagggtatttgaagctgtttgttttttgttttaaaatagtatagaataaataagtatagaaaagtataaagtgaaaaataaaagtaccctaactcccagttaccactctcagagattttactattagtagttttttacatgtcattctagaaaacaattttggcattttatgtgtgtgtgtgtgtgtgtgtgtgtgtgtgtgtatttaaatacacaaattggatcataacacatttactgttttgcagcttgcttaagaaaagcagagctatttgtaatatgtatttgaaataataacttcttaaaagatttgcttatttaatctaaatactcaatattttaaaattgtcttagtgaatatagtaaaaattctcgaaagtaatgtgttaagtgtttgagtccttctacctgaagctttattgagactttaagtttgctttcatactcttgttaaacataacacttgtcatatgagcccagatgtgaccccctgattagtgtgtgacatgtaatgcgcttttctttaaagagatatttaatcaagtatagacaagaccattgccttttccaaagcattattagtatgtcctgagcattctacatgcggagttctttcagttgacattcatctatactaaattgtcttaggaaatagtgaacatgaaaccaaaaatgaaattctacctggctgagcttggtggctcagattttagggagtcgcctgggtgacagagcgagactccatctcaaaacaaaacaaacaaaaaacaaaaatattctacccgaagctgacccaaaacaagagggaagggtcatgctgggttcgcttcaggaaccctcctatgtttaggagctttcttaaaaaatacatacatctagttgaagcacatttgcatagactgcagatttttcagaatcctggtaatgcatggtgtgtgagatgcacgtaccacagagaatgagacctctctctcctcacaagcaccccagaggctgccttgccccttggaaagcattcctaaatctaggggtacacttagatctcttctgcaaatcacaggacaagctgctgaaagggtgagtctttctacaggcagctactgtgtccaggaagtctcttctgtaatgcttcttacccacgacactgggctggaggcaggagccctcccgttcccttgcaggtgctgctgctctcatgttcattgctgactatgttcccctcattcgagataacgtttggaaataaggtgacatgtctgcctagtggccgcagtggggcaccatgagggtccccctgaaagcaggctgcccaggtcctcgatggtgtccctggactggcatgtgcattgtcctgggtgcttcccaattctcttctctgggacatcactgcgctctcaagagtcgtgcggttctctgatggatttggttgagagtaaatcctttctttcccccgcaaaaccttcacacagatagtttttcttcccagaggatgcttgttttcctttgcctgagctgcatgggtgcccctgttagccgaggcggtctcttgtcactttgctgtatgtgctccatatctgaggagggctgtttgcagcaggactttggctgcagctgcttgagtggggtcttgtcatctctgtgtggtgatgagtctcggtggaagggctaacctttcacagggcggtgcctcagtctctcctcacaggacagtgaaccccttctccttccccgccccgctctgcgggcggctgctgtgcacatcagggtgtgctgaactcttggtccctccctgaagatgagaaggatgcttccaaatagaaatctgattcctcagtatcccgaaaaactcctgttttccaagtagcttcctatgacagtaacccgtaggcaggggaagtgaaaaaaaggcctcaatgctcagggtgacccaggaagaagcccgtatgatgccgaccttgctgctggtgccagcgtccccttacaccctgggtgccagcgctcccttacgccctgggtgccagcgtccccttacctgggtcggcagggcctctcagctcaccaataacgagcattttacaataaagggaaagaaagaggaaccacgtcccacacaccaagcactgtccttgtcactttcactcgtctttttagtcctcctcgccattctccgcaggaggggaagtagccctgctttatagatgaaggagccagctcagaagggatgaatcatttgatcaggggagtttggggttgggacagcatagagtaatgatgaggaatagtgagtaataatgagtaataacagtttccttctggccctgggctttggaaccagttgagaagaaggggcaggaatgagacaggaagagatcagaaatgggccttgtttccgatgagccacattgtgggatgtggcttggatgtgtggccacggtgggctccctcaccaggggcagagcctgcacgtgtcagagccaggcctgggatgcaccttctctgggcagaccgacccaaaagaaagcccacaagggctgaagccacacacagcccgccccagggctgcctggagctgcacgtggagacgggagcccgggagggtgctcacccttaacttaggccagggagtcagcaggcaagcctaacttcaaactacccacttcaaaatccatagtctttctactactgtcccttaaagttagtaagagaatgttttctcttactgcataagaaaaaaaatgatttttttcatgatcattattagctctttaaaaaattccgctcataaacgtgtcattacagaaatttggaaaagagaaagatgtttaaagaagaaaagaacttgaatcatataaaattctaccacttttgacatcatgtgtttttttccagtgttttttctatatttaggcataaagattgcaccattaaacgataatttgacatctgctttttgcattgtatcatttccctatgttttgtttaaggcactacatttcaacatgtttaaatttgaaatgtaaggttacttttaaaaagctggtgatcaagaataaatattggaatctctccctaatatttcaacatacatatttagaaagtagcttccaatacaaggaatgttttccaaagcctgcaagttttgttgtatctccttgttgtggtttagcataatgcaatatagcacttagattgaaaacaggatgctgagttgagagctctcctgccagttgttctagttttgagaagggtgggtaccaagcaaaataagagattcatttcacacatgtgcacattgcatgtgtaagactctagcccaggcacggtggcttatgcctgtaatcccaacactttgggacgctgaggtgggaagattgcttgaagccaggagttcgagaccagcctggacaacatagcaagaccctgtctctatgaaaaataaataagtaaaaattagccagatgtggtggcatgtacctgtagtccctattacttgagaggctgagttgggaggattgcttgagcccaggagtttgaggcagcagtgagctatgatcgtgccactgcactctagcctggacaacagactgagatcctgtctcaaaaacaaaattctcttgatgaaagttcaggttaggtgttctagatataatgggaggtgctttatagaaagtgcagcatatcctttgtctgattccaaacaaatgtagaagtctacgctagctagtagtaatggcagctgggaggtgcaggttctctccacccaggctcattttccacgatttgggtcatgggggacagctggtcctggactgtggcactaagaaagcatgactcctgccccgtcttcccttgaggggcagaacagggcagagtctgcacctgtgcccgtgcccagcatcacgcccaccccgctgcctttgcaggcacatggtgcttctgaaggagcagtacgggcagcaggtggtcgtgaaccttctgggaagcagaggcggagaggaggtgctcaacagagccttcaaggtaaggccaggctgtcctctccacagctgggctgggcggcaggtggccatggtggagcgttgagcctggaggtggctcctgcagggactggagctgacagcccagccctccttcgtttcctgaggcttccccagcattccgaccagtgaacacggcagtgctcagtgactcgggccctgatacagtgagtgtaatttcttttctttttttttttttttaagacagagtttggctcttgtcgctcaggctggagtgcagtggtgcaatctcagctcactgcaacctctgcctcccaggtacaagcgattctcctccctcagcctcccaagtagctgggattacaggcacttgccaccacgcctggctaatttttgtatttttagtagagacggggtttcaccatgttgttcaggttggtcaagaactcctgacctcaggtgatccacccgcctcggcctcccaaagtgctgggattgcaggcgtgagccaccgcgcccggcctagtgagtgtaatttctgtgagctgatggttgggagaatttgctcaaagtcaaaacagagcatctcctgtccccagccatgtgtcccttaccctccctccccatggggctttgagggcttctgacctctcaaggtacccctctcagtccagcccaggagcaggcaggcctccctttctgccctggctggtcctgggtgagttcccccagccccacagggcacccggcctcagggctcaggagcaggaacttcggtggctttcccctgcttgccggctggccttcaaatttccccctcttcctcgggctttcatggcagctcctggacctgctgctgctgggctcctgtgggctccttcagacttccttggggggcttttcctggcgatcctggacagatcctgggcagggtcacagagccatgggagcaagagactccgcccacctggccaggttccatccctgtgcatggatcccaggcctccagcccccgccccctgctccccaggcgcaagacgttccagaatgagccaagggggctcctggttcctttaccagcctccatgtcccctgcctaatagagaaaaactctctcgttgtttaaagctcaaagatatcccttacagagagagctcgaagtcgcctcactgggggttagggcgatctctgagcctttccctctgcttagaaatgccacatgctcatgctcagagcaggcacttcctggttgccaattttatttggccagacctgcttttcctgtttggtttgttgctattagcaacgagctccagaagtgtctcccttcccacccatcttggcagtgatgctggctgctaatttgaaggaagaagggaaaaagctaaaaaataagaataataataagaaccccaagtccttttcccctatgccttgagttgtggcccctcccatcagtgggtgaagtgcccggcactggtgagggcgggagatggcagccacctcatgcggagaagggtgggctcctggccaggtagggaggggcactctagctgaagacctgggtcatggccctgcctggggtggccctcagccacctcagcttggcccagaccaaggttggtggcccagcagcctgcccagggcccaatggccatcagtcctgctggatgaagcactggctgtggaatgcatggcactgagccaccaggcactgttgggctcctccagcttcttgctcacagcaagacttgcttgatgatggcagcactgcattgatttacactcagacctatcacaggcagtcacgttgagtcagatcagatgacccccaagtccttctagtccttccaagtcactaggacctctggctgggcagaggctggactggcctgacctgaagccacaagggcatgagtgcagggtgagaggcctggaagccgggtggcctgggtaggcggacagtttgtccttcatcacggggctctctggggagaaagccagggagctgccaggccagggaagcctcatatggaagggagggctcttaagggcatcctggtgccatcagcagccccttgacctgcttcccatctctccccaccttcactctggctccctgaccatcctgaagtagcatcgggatgtgggacccacctgggccacttcagctggagacttggtctcttcagagcataaccaccagaggctggtgcgcggcaggatggggccggttactagggcaacggggagctggattatgagctctgcagcctgccacagcactgctatctctgagggcctggggcacctgggccacctgaagaacagagcagtccttcctcacctgtgccctccagagagccctgcaggagtatgatctctccaggaagccacacctgctctggcttcttttgctcaagggggaccttctgccctttcgcaggcaagacgctctttgtgggttttgtccccccagggcctttgtcctgtgcttcccttttggggtcaactgcctggtccactgtgagcttccagctaaagcacgtcctgcggcgagtcaccttggttagccgcacgggtcaagctctgcaaggagcttgccctcctcgtcctcccttccctctgctcccctcaccgccctcccctcctcttttcagaagctgctctgggcttcttgccacgcgggcgacacgcctatgatcaattttgacttccatcagtttgccaaaggtgggaagctagagaaattggagaccctcttgaggccacagttaaagctgcactgggaagacttcgatgtgttcacaaagggggagaacgtcagtccacggtgaggctcgctgcgcactgtgccgcgtcttctgctggggggaagcgtcagtccacggtgaggctcgctgcgtgctgtgccttctgctgggtgaggcggcagaggggccgtgcagtctaggacatgtgccctatgaggggcagcttccttccctccccactcagttacccttgtggtttcctgggtcataagcttggcgacgccgggaatcttgggttccagcttctcatctcccttcccacagtaggagacaggcttttgaatttctcaaggagatgttgagtcatggttttctggcaaaagaaatgaactaataaaggggactgcattaaaacatggagctccacgctgtgacgcaggcctgtgagagtgagggccacagtcgcggtgggatggctggcatagacttagattgctagaggagaccagggtatggacttccctgttcagagcagaggagaaaaacgaagtccagttccctcaggtcacatgcagggggtcctcattatttgcagattccatattggcttatttacctattccttaaaactgatttgtaaccccaaaatcagtatgcaaagcatttttgctggacagagtatttaaatactctggcctcgtatttaaacaagtttcctttttaagatttagtaccatgtttttcacatttgtggggtctttgttaggggcccccctttgttcggggatctcatggtttagaatggccccaagcagtgtgccgaagagctgtctagtacttctgagcacaagaaggtggtgatgtgctttatggagaaaatgcacgttaagataagctttgtccctatatgagctacagtgctgtcggccatggttcagtgttaattaagcaaatatatatattcaataaggtgtctttatatggaaacatacataaaacaaggttgtatattgatcagttgataaaaatgtgaccagaggtttgcaggaacctaaccctatatttcccctaggagcgatggttctgtgttcatgtccaattcagtgttcctacaactttatagaacataattgctataaataacaaggaccagctaaacgtaaaacgacccagctgtgcaggctactgagtgtgtgtcctggggtctgcctgcctttccagaagtgctggggatccactgggatggacactggggtttctggggggctattgatgaggaggtgaggggttccctcttagaacatgtttcctcacacctgtaatcccagcactttggaaggctgaggtgggcggatcacaaggtcaggagttcgagactagcctggccaatgtggtgaaacaccgtctgtactaaaaatacaaaaattagccgggtgtgatggcacgcacctgtagtcccagctacttggaaggctgagacaggagaatcgcttgaacctgggaggcggaggttgcagtgagccgagatcatgccattgcactccagcttgggtgacagaggtgagactctgtctcaaaaaaaaaaaaaaaaaaaaaaaaaaaaccatgtttccttgggagtcaaaagtcagacatgggcctctgtgctatggccactgcttctttgaaaacaacatataaccgtttacatttcttcttgtcctaagttttcagaaaggcactttgcggatgaactgtcttgactgcctggaccgaaccaacactgtgcagagcttcatcgcgctcgag

SEQ ID NO: 15845 - DNA, 82129 bp, Homo sapiens
ataaaacctccacacttggtgtttgtgggccgagctattgtctttgtgttttctttttggagtgggtgggaagccagcttggcaagccgggtgtgaatgaacaggaatgagcaggagacgctcgctgatgccttctgtgatgtgtttcttccccagctccagaagaaaaggaagtcattaaaggacagtatggcaagctcacggacgcgtacggctgcctgggggagctgaggctgaaatctggtgagtagccgctcgctggaggagcaggcgccaggctccccggtgggcaggagcctctgtgtcggaaggggcctcagtgcaggcattctgtttgaccgctcttctctctctcttcttttttttttttttttttttttctccgagatagagttttgctcttgttgcccaggctgcagtgcaatggcgcgatctcggctcaccacaacctctgcctcctgggttcaagcaattctcctgcctcagcctcctgaatagctgggactacaggcatgcgccaccatgcccaactaattttttgtatttttagtagagacggggtttttccatgttggtcaggctggtctgaaactccgacctcaggtggtccacctgcctcagcctcccaaagtgctgggattacagccatgagccgccgtgcctggccgacctctcttctcttttaagatgtttctttatgcctcgggacctgctcctcctgcaggaacctgcaggtggggaggtcaaggtgagtgttgcctggttgtcacctgcctgtgctggggagcagggtggggttcccggcacccccaccctgtgccagagaagctcgtcttcattgcttgccggcgagggcctaagtgtttcgaaagtctggtctggggcttctgcccagggcattgtccgcagtactctagaagatgtgccaaggcgggtgggtgaagacagggaccagggcagatgcccgggggcacaggggtgggctgggagttgtcagcaggagaaaaaagccaccgatgtgtgactgtcagtcagtgtggggtgggagggagaggaagggacagtgtgatctgacttgcgaagggagagaacttccaggaagacgtgggcatctctgctcactctgagagactcgggggtgagccggtggtggccggctgtcgtgggtggtcacagccaaactcagctgttcctggagctcaggagccctggggctttaggttctaccacctgtttccttccttctctctcaggggcccccttgccatctgtgacctggctgtggacatctcttgtgacttctggggccgagacaagagcccagtcgcattcctgattctcagtcccacctggctgagatgggaatggctgtatgggttgtctgaattcgggctttccctgagccaagcgcacacctcccttccctgctcacagcagctgttttcagagactgaggatgtttaaagctgccagaaaagcacggttacgttggccattccttttctgggtgttttctgtcatggaatgtttttccctgaactgtgacgattacagtgatcatttccaaatagcatttaggaaaaatacacagtacccacatgacaaagtgcatttatgaaatgtctgtttcgtgccaagagctagccgtacattcacttatttaatcctaaaaataggctaccgtgataatgcatctttgtccccgtttacagtaacgggaacaggctcagaagcttcaagtaacttgccttaggtcagaaacttagttggggtttgaagcgcctccaaacgcttgctttttctgtggaaatgtgcgggctgccgagggttttctgcaggactttccgctctgcagcgatcttcctgaagttgcaggaaatccctgtggcccttgccttccatggtgatgaccgtgaggatggtggcctgcacctgcatgggactcacttaggaacttgttaacacggctcccgaggccacctgtgctgttgtcaccctgccttgcaggtgtggcagggatgccgcgttccatccatgctgatgcccttttttccacatggtagtatctgggcccccaggatgcctcacagtcttggcttccttcagttatagttggcagctgcttttggtccttacatgaatgactcattttgcatccgacagggactgggattcgacgaattacagtaaccggctcaaggtcacgccattctcaagtggtgccctgggttttaaactcatgccttgcggcaccagggactgccttcaaccaccaggctgttctcctttctgaaagggacaggtggctgggctcacaagggggacaggaagtgcagtaccttcccccatcccaggggaaaagtgttttttcccagggctgtgatctaagatcagctgtgggaaattggtcctaaccaggaagggtggcagccccaaagatgtcttattagagcgagccagggtgtctgcgggggtcagcagggtctaatggggcagggagtgctcagagaggagaccacctcccagggctgccctaggcgaggcctcctccctgccttcagccagtccccgccaccccacaccccacagaagggaatgaggcttcttgtggaccatgcgagaccagccctgctccgaggctttgggtgcccccaacccctgcccacctgtgagagtcaccccccggagtgggttggagtttctctgagtgtggtgtgtatgagtttgactttggcgatgtcaggataatttggtctgttttcaacacattctggaaagcaccctgagcatctgaaggatggaaggattgggctttaaatcaagttttttcagtccccattggttatcttaaggggcgtttgactttaacttgattttctttttcccctgtaagtccctgacccagaactgtgatctattttcttttgtgttttcagctgttgagcatgttgggcagcacggagtgtagctacaactgtgtgaccccacctgtgtgactgactccacctgtgtgactccagtcgtgtgaccaactacaactgtgtaactgactccaattgtgtgactaactccacctgtgtgactctgcgtgactccaactgtgactccatctgtatgactccaattgtgtgacccccacctgtgtgactctgactgtgtgacccccacctgcgtgactctgactgtgtgacccccacctgcgtgactctgactgtgtgacccccacctgcgtgactccgactgtgtgacccccacctgtgtgactccaactgtggactgactctaactatgtgactgactccaactgtgtgactaactccacctgtatgactccaactatatgattgacttcaaccgtgtgaccccacctgtgtgactccaattgtatgactgactctaactgtgtgactccaactgtgactccatctgtatgactgacctcaactgtgtgaccccacctgtgtgactccaactgtgtactgactctgtgtgactgactccacctgtatgactccaactatatgactgacttcaaccgtgtgaccccacctgtgtgactccagttgtgtgactgatttcactgcgtggctaactccactgttgcctgactccagctgcgtgacttcagctgtgtgactccatgtatgtgaccctagctgtgtgactccaactttcagttgccacgaagacaaccagctgagtcaggagtgggcctccctttcaatgtttttagctaagcatctctgcgcaaagaaagaggcttccccacaggctcttaatttgggacaagttttcccttagtttgggaaaaatttcaatctacctaaattagccttttacattagaaatcgagaaatatgcacaaaaattcataaaagcctttttccaggttccaaggtttttgtagaaagcccaaagttcccctttccttcctgaaatgccagcaggaaggggttggagctcccgtgattagccagggagtcaggcttcctgaagtttacacaatacaaagcatattaagtgagaatgtagcagaaaaaagaacttatcccaatgattatagcaatttaaattctcttgaacccaagctctcaaggcctacctgttttatagcctcaagggactctactcctatcccagactataatgaattgtgtctcctggagttgtgcagtacgcaacctgtgaagctgtacacgacagccctataaattctctagcagacagccctcctagattctagttcccacttcacagctgaactgcatttaatctctgtaggactgttttcctgtctgtaaacctgggaaaactgcctcatctctatgttgcctagttctcaggaggtccacatgggccatgcacatggtagccatgaagagtgtggagtgctcctccaacaccaggcgggctggccacaggcagtttcttagagtgtggcctggggacgctgccaccactgagaagctctgctgtctctcctctgtccctgggagggctggagggaggagggtgctgagtgagagggacctggcctgcagagggctgaggacgaggtgtgagctggaaggccaggctgtgtggcctcggggtgtggactcctggtggggggctcctctgcacaggctagcagagggctggtttcatgggcagtcacttcagaaggaggattccctggaggggagtttgaacccttagtcttttgggatgcagtgttctctagcaagtcttgaagcgaactggcctttgtcggtcttagattaatttaattcctgtgcccagtggtgggatattaccaagagagttgacacccagctccctgagggggaagctctgagatgatgcagcatttgccagtttccaaggtgtaaattcacgggccagggctgatttcaggttcccagcgtggagctgaggaaggatctgcaccaggggtgctcactgcgggtgttcactgctgtggccgccgctgcctacacctccctcatgttctgcagaagggaggcgggagaaggccctgagaccatgccgcatgggcacacagtgcttagggttctgaacctgcgggtggcgggggaggctcaagggtcatctggccgaagcttcccccttcacaggtgggaaagcctagacatctttagtcctttgtttggagctttaagtctgagggtgtctgtgtgagcagagggacagataggatggctggagggaccccagggttgggattggcacagaccaggctgggaaggtgaactcagagctgagacaacacaaggaaatgccagcccagagccttgtgggaggcctggggtggtcccggtaaacggggccttgggtctgcaagccacgtatcatgactccaacagccagctttcctggcctgataacaaattgcctaggacctgccactggctcttgcctccctccacctcactctggcagctccctctgacccatgcatggctttgctttggccagagccctggaaccaaagccctttacctggaggggacattgagactattggcgcatcctcctgggaggcccagagagggtaagagccttgcctgaggccacacaggccactggaggtgtgcagagcctggagccccactcttctgagttttgtttttccacttgctatgagatccttgatggtttcagggccctggtctctccctcagctgaggactgccaagaaccccgcaagcctagttagcttcttggctgtcagagaattgatcctgcctcacaaaagcaaatcctgtgctctaggtgagcatcgggaggggcctcacacacctggggcaggtggggaccagtggcttgtaccacactgacggtggcccgggagtcagcgaccccccacagcctggtgctaggctcaagccaggacactttccttaaaacccatagtacaggccaggcatggtggctcatacctgtaatcctagcacctcagggggccgaggcaggaggatcacttgagcctagaagttcaagaccagcctgggctatgtagcaagactatgtctctacatagtgatggtatctacagcaccatgccaggagcggtggtgcacgcctgtagtcccagctacttgggaggctgacatgggaggatcgctggaacccagaaaggggaagttgcagtgtactgagatcaagtcactgcactccagcctgggtgacagtgcaagaacctgtctctaaatttaaaaaaaaaaaaaaaagcaaacaaacaaaaaacccatggtatacagagaacacagtcaggcagtcaggctgtcaatgagattaggcaggacacagtgaggctgggattgaaggaggaggaagccatcagtgctgggtcaggtaggcagggcggggccttcccggagaggcagcgctccacacagcggtcctgaggtttgggtaaggctcttccacagaggcctctgtggttacacccgtcccaccaactgtctgggacacacaggcaggggcagttctaaggaaaagtgtccaggtccttggcttttttctatcatggagcacctgtgatggaggacagggttcttattcccctctgaggtctccctgcttccatgttagggtagagggtaggcccttctctcttctggaagctcaccgtgtgccgtgctccaggaagtaactccccctaggattccagacaaagggacagttcaaaagcttgtcaacagcattgcaataaggtcaggactaggtagcaatctgtttgcaagtcaggtgatgtccaattgtttgcttcccccataacggaaggagaatttaattggggtatcagctgacacattagtaaccattttatcagcaggttattgtcatttcttagcgctaactcagaaggactttgaagaatcgagtgacatttctacaatgaagccctttccattcccatctatttattaatgtgaacaggatcttttagtgtttgcgtctacaaaaatgaaaactagaattagaattggtgcagaacctactttcattccttcaataaatatttattcatctcattaagagatgcctttccaacacattatgactttttgtatcaaatgattatttgtcggccaggcacggtggctcatgcctgtaatcccagcactttgggaggccaaggtgggcggaccactagaggtcaggagttctagaccagcccagtcaacatggtgaaaccccatctctactaaaaatacaaaaattagctgggcatgggggctcatgcctgtaatcccggctactcaagaggctgaggcagtaaacctgaaaggcgaaagttgaacccgggagacagaggttgcagtgagcccagattgcgccactgcactctagcctgggcgacagagcaagactgtcacctcccagagaccccacctcctaaaaccatcgccttgggtgttcatacttcagcatattaatttgggggtgcacacattcagccaatagcaggtacactggttgaccacactcttaaagaggacagccaaaaaaaattatttggcagtgttttatttacattgtattgtttacattgtttgaccagttaggtatcactggaacgataaaccagaacgctctctttttaaacacttggagttgaggaacacacggctgcaggggctgatggggtgatcagaacaggacgtagaagcaccagatatgctacattaggatggaattctgaagaggggggactggaaatatgagtgaaagttccatgtggtaagaaagagcatgctcctgcaatcctgtaaataatagatggcaatgagtatcacgttactgtgtagattccatgggatactgacaagaggctcccagagttttagttttacgtgtcaatatttagaatacactgcacaatatattatttacaggcatttcaactaccgatgaaaaccttcaatggcagttttaaaatgggcagggaacgctgtctgagtccagtgtgttgctgtgacaaagttccgtagtagacggggtggcttatcagcaacagacatttatttcgcgcagttctggaggctggaagtccgagaccagcggcccgcagattggccggctgtgaggacctgcttcttgctccatagatgctgccttttctctgcatctgacatggtgggagaggtgcaggagatctctgggcacaaaccccattcatgagggctccactgccataacccagtcacctcccaaatacccccaccacctcaaaccatcaccttgggtgttcgtacttcagcatattaacttgggggtgcacacattcagtcaatagcaggtacactggttgaccacactcttttaaagggtacagcaggccaggtgcagtggttcacacctgtaatcccagcactttgggaggctgaggcaggtgaatcacctgaggtcaggagttcgagaccagcctggccaacatggtaacaccccatctctaccaaaaatacaaaaaattagccggtataatcccagcaactcgggaggctgaggcaagagaattacttgaacccaggaggcggaggtagcagtgagctgagattgcaccactccactccagcctgggcaacaagagtgaaactccatctcaaaaaaaaatagccgggcgtggtggctcacgcctgtaatcccagcactttgggaggccgaagcaggcagatcacctgaggtcgggagtttgagaccagcctgacctacatggagaaatcccatctctactaaaaatataaaattagctgggcgtggtgacgcatgcttgtaatctcagttactccagagggtgaggcaggagaatcactagaacctgggaggcagaggttgcggtgagccgagatcacaccattgcactccagcttgggcaacaagagtaaaactctgtctcaaaaaataaataaataaataatacatgcatacatacatacatacgtacatacatacatacatacagggtacagcaaactaatccgattggaaactgccggactttggggctagatggagcatgggcttaaagtgaaacctacattttggctccaacacagactagctgtgtgcttgggcgggtgattcagcttccctgggggacagtcatgcgtgtgtgaaatggcagtggtagccctgagacagcagcatgggtaagcaggctggcgacgtcatctgcaaggaggtgtaattaggagcaccagctctggggccagacttggcttgagaaacttgcccaggcactgtagctagaaagtggatttggatcccagctccccgctctgtcaccttgggcaggctgcttaacctctctgtgcgtctgtttccctccctgtgagatggggctggtaagggcgccccttgcggtgggcgggaggatggagtccgcgcctgtacagctcccctgcctccactgcgctcaccagataccggctctcctcactcccctgtaccactcccgaccccctcctccctggacccaggagccccagtgctctgtggcaatgttaagagcctctcctggctgctacagtgctcctctccccagcctcccccaggccgtggtcctgcccaggaaatgcacctgggactgttgccaggcactcaggccccccacacggaggctgttgaggaagtggtgctagaaatcagctcatgactctcacggagtgatgtcatgcaaaattttccatagctctggcagccacaggggccatcctcctgcctctccgagggcacttctgctgaactgtgcttttccctgcactgtgtcagaagaggcaggtgggtgccgggagcgctctgtggccaaggctctgatcacaagctgccaaccccggaaccccacctatcctacttgagaagctgaactctgacccctgtccctgtccccagtgtgataacttcctttgttcttaggtggttttgaggtggtttcctgaggatgtgtctggggagatgtgatgggatcaaccccctgccctgctggcagccccaccccatggcatagcagcaggcccctgggagccctgagcgctcattaaaggaacgcactttaatgacagccacacgccaccctgccacaagcagcgctcttctccctatgaagtgtggtgaggaaattggggtgagagggtggtggaactggttgttttgggggtctcttcctggagtgtggagagatcagaaccatctccagaccatggctgtagacagcggcccttgatcattcacagaagatctcgctgggcggatccttcagacctcagcggggtgggaagagtgtccttgggactagagccctgccagaccccaaaggccggtttctacccgatgatctcttgggccccgtcccgagagtgaggcacggcgccaccaggcacccccgatacgcagcgtgttgtgaagtgcccttgtgagcagcgggggatagggaacagaaaaccagctgtcagcgacagcgaggtggtgccccagagagggctgcctcattcgcctggctgcagggtccgaggtcgtcttggtagcatttggcaggaatttatttaggaagcattcagcaaaccgagtgtgtgtggtgctgggagatgacgacgaaatggccctgcccccaaggaagcccctcccctgggggcacaggtggggagggaggtcatgagctttgtgtgtgtgacaactgctgatgggaatgctattggcacgtacgaggggtgcctgtccgtgtcttgggagagcaaggaaggcttcccggaggagttgctgccaagttggcccagaaggatgaggaggagttcttctggtgaagtggggagggcagaggcaggatggtccctacggagcatgtggggacgctcgtgttcttccagaggatggaatgctgggcccgaagcctgaagtattgttagggtagagacaggcgggaggtgcgtggagaaggggtcatggaggtcttgttgggcagatggcggtgggacgtcccaggcagggggagcatcttgggcaagagcccagggtgcgaggtcatgcttatggcacattggaccagctggaggacagccagctcaggagagcagccggctggggtgtctgcccacgtgtggggcagggatgggctgcagcggggagggatttgggagcttctgtcgtagtcctgcagggagtgggagctgtgcaagaaggaagggcggagcggctgtgatccaatgactttgggaaggccactcctgtgatggagtgggggaagacagaccccaggccaggggtcctgagtcaaggcagtggctgaggaggcactggggaaggtgatttggagaggctttgggggtaggtcctgggggtctggaagggctctaggccaggaattttcagactcctgggggcatcagaatcacctggagggcttgttaaagcaaagcttgcccccagcctcaggcagctgggcggcaggaatctgcatgtctaacaggctcccaggggatgctgacttgctggccagggtcccacactttgagaagccccgcctgaagcttacaggacagggcaggttcttgagccattgagttgggcaatgccatgggaagttgcaggtgcacagacgttgccttcctggctgcggttgaacctgggctccatttgtccccttggagctccaggcggccgggccgacttcgaccctgagctctcctgtctgatttcctttccaggtggcacgtctctgagcttcctggtgttggtgacaggctgcacatctgtgggcagaattccagatgctgaaatctacaaaatcactgccactgacttttaccctcttcaggaagaggccaaggaggaggaacgcctcatagctttgaagaaaatcctcagctcgggggtgttctatttctcatggccaaacgatgggtctcgctttgacctgactgtccgcacgcagaagcagggggatgacagctctgaatgggggaactccttcttctggtgaggccctgggtcccctgcagagggtgggccctgggtctcctgcagagggtgggccctggttggcatctgaggccttgacctccacttgcaccacccccgggttatggggcacctctggagagttaggacccaggcctgctctcagcacaatgagaggaaaactaaccctgaactccctgccaccccccacccctggcccctggaatgtgttcagtgtagatttggaaaagaaacctgcgccaggcatggtgcctcatgcctgtaatcccagcactttgggaggctgaggcaggtggatcacttgagttaaggagtttgagacaagcctggccaacatggtgaaagcccatctctactaaaaatacaaaaaaaaaaaaaaaaaaaaattagctgggcgtggtggcaggtgcctgtaatcccagctactcgggaggctgaggcaggagaatcgcttaaacccaggaaacggaggttgctgtgagccaagatggtgctactacactccaccctgggtgacagagcaagactctgtctcaaagaaaaagaaagaaagaaaagaaaccctgttccataagtaaaaaacataagagccgacgtctgctgagtgcttcctcagtcccgggtgccgagctcagtgcttctgcctggattcactctttcagtcttctcaatcatggttacctccagtgtgcagccgtttaccgctgatgtttataaagcactgtgttcgggtcaccgtgctaagatctctctgctggtaataactcatcattattataaaaacctttataataattatgcggaggctctgttaccccattttacaggtagagagactgaggcacgaatagtcgagggaattttgccaaactccacacacttactaagtggcagagccaggatttgaacccaggctttctgggtccaggtcccaagctggtaatcacagtgctaaaccagtcccatcaatggggaagctgagtcaccctgcccaaagggacttgtagcaatgcactaagactagtcccggagcccaggcagaggcggctggatttctgtatgtttaagatctcctggtgctttttcactccacagcaggacagagacaagagtggacaaccctgtaaatacataaattatctattgccctttctggacataatgctgtttctgtcagattcgcactgatgcctagagatgccaggtagaagcaaaagtgaggaaagtcctgccatgggagtcgttccaatgaacctcatctaatgtaatgttttagaatccagtgtctgccttttgaagctatatcagttttcccagctctgagacgggactcgtgaggtttatttctgacctgtttgtgcctctctccctttgccagaggcagccacaggttttcatctggccttggtgctttggattccccagaagtgaattcctgatttctgccggaagaaggggaccctccccacatccctgtgtccatcccaacgctccccacccccacatcctctttggttctctggtattgtggatatttgggggcagtaatgtgcccagacttcaaaatgcacgtgaatcaaggctgggcatggtagctcacgcctgcaatcccagcactttgggaggccaaggcaggcggatcacctgaggtcagcagtttgagaccagcctggccaacatggtgaaaccctgtctctactaaagatacaaagaaaattagccaggtgtggtggcgcacacctgtaatcccagctacatgggaggctgaggcagaagaatcgtttgaacccaggaggctgagattgcagtgagccgagatcgcaccattgcactccagcctgggctacagggtgagactctgtctcaaaataaataaataaaataaaataaataaaatcgtgaatctcatgctgatctcattaaaaatgcagattctgggatggcaggtctgggctgggcccaggattctgcatttctaataagctgccagtgctgcttgtctgcagacggcaggttgagtagcagcctctggggatggcatttctgtgaatcgctggttacattttgcagggcccagcatgtgccccgcgagctgttacatgttcccctaaaggcagccaagcttaagcacagaggggctgtgtattatgaggtatctttgtgtggagtccgtgaaactattttaaaccagaactgtcaggggagcagaggtgagagctctcagcggcagtgagggtccttggaacccctaggggatccttggggtatctgaattgcaccagcacctttgcaagttctcttccctatgccagctctgtggctggaggtgtgaggggcactaacaaagcgaggcaaaggggattcacgaggtggaggctgagaggagctttggaaggaggagccccatggtgtccctttctgaagggagaggaggaagtaactctggaggtcgccaggctcctcagctgtaacacgccagggcgtggtgtttaggctcagggtggagcccccagaactgaccacaactgagtcaccacgggcagtgtggttctgggcttgatcgcctgaacccccactgttgtggcgcagcgtgaggtctggagacccacagcaggagtcagatggggtcaacgctcagcgtggctggcacataaggcagagtgagcagcagggtgaagtcatctttctgggctggtaattgatcacactgacaattgcctcccagtacaatcaggtcctgggaggaaactctttgggggtcctggatatgagtcatcctcctgccagagggccaggcagtgtcactagaaacagggctgatttaagggttgtccacttggcaaaaggtttcttctcctgagccctggtgatagtggccatagctgtgtagctggcagactctgaaatattctggaggctttgccttgatgccacatgcagatttcatatatgtgtttcggaagctggcttatcatctgaatttgagagagtgatttggaagagggacatgtgtttttgtacagcaatgcttcagcagcatttttcaagcagaggagcgctgtggctgtgcgacctcagatggggtcagacgcgggctgtgctccctgtgggggtgcatgtgactgtgcgacctcagacggggtcagacgcgggctgtgctccctgtgggggtgcatgtggctttggtcacagtcggggaggctggcctgagagcaggaagcttggagaagccccctgggacccatcagagctcacagcacagatttccagcaatgagaaaatgctgctgctgtctttgaggaaggctcaagggcaggaattgtgttgccttttttaaacaagtagggcactgtgatctagattcactcagtgccctgtaagagggcatctcctgatgatgggtcctcctccctgagagtgagtatgggccctcaggatggtaccactcaggtcccctgggtgctaaagcaagggggccaggccagctcagggatgagagaactacgtggtcgttcgcaggtgcacatggaaacgtagggcctcatgaagaaaggctcggcgtgaagagcgcgggctccaagctccatgacgccactggctggctctgtggcattagacaagcacttcacttctctgtgcctcagctgctttatctgtgaaagggggtcactgatgatacctttcacatagggtcacttcaagggtgaaatgagttaatccaccccaaagtacttagaatggggcttagtgcacaggataaatgttggctgtcaccctgtcgttatcatcatggactctagagcctacagcaatccactaggcatggagagggaatacttgaactttcattacattttattttcctcggatctttttaaaatttattttggattgctttgtagcgctctcgtcataatcatctcatggtgcatgtgtgtgtatatgtggataatttaaataactgttcccatatttaatatgatttttaatcacttattgatcatgattgtttaataataaaagatgattaattttttaccaatggggcctgcgatgaaaactgtggggcccacagggctaaccagaggcccctttgcgattccccgaaaagtgcacgctggctcactctccagctttgcttccatttagcgacagtgacgacctggtagtggctttgggaaaggactccctggccatcctcctctacgtgacacagtggtcctgctatttgggatctctttgaagcacatgaacttcccagatctgtacagcccaagtgcagagtccactggggagcagcatgcattcgctgacccgaaatgctgcaccgtgcgccccccagttcctcagccacactcgctgtccaggcagcatgtattggaggatgtcaagtgactggaattggtgtgggactgtgttttgcaggaaccagctgttgcacgtgcccttgaggcagcaccaggtgagctgctgtgactggctgctgaagatcatctgcggggtggtcaccatccgcaccgtgtatgcctcccacaagcaggccaaggcctgcctcgtctctcgcgttagctgtgagcgcacaggcactcgcttccacacccgtggcgtgaacgacgacggccatgtgtccaacttcgtggagacagagcaggtgagtgcccaggcccatctgtggcaccaaatggttccgagtggctgcagctcttgcacacgcgctttccacttggggcagaagaggccctggcatatttgtggtggtctctgatcaggcttcctcctataagtggagaacagcacgtgtaattgggctccacatgaaaatgtgacctctggtttgcatggtgtatcctttctgattcacatctcatgcagggaaaatgctgcttagccgaggtatttttaactaaacggaatcaggaatttttgccttggtcgtgaaaggtgggcagtattccaagggcagctgacagatgaacaaatagggtttgaaaatccttttaggacaaaaataagtagatcaatacaatggggggatgaaagaagaaaccattattttttattctaaatcaactgaagcttctcctggaagccagtattagcaccctagagttgtgaaatctgcgtgttaagcagccgctcccatccgttcccctagaatatagccatctgcttaatttctcctggagttttttctaaattctgttctcatttccagagatgctgtcttacaacttttaaatttttgctctaacttgcaatctgtaagataaggccaccatgtggaatacagtggtgtaagccataagaaaggaaaaccccggaaggcacatgtatggtactcctgccagggcaagctgggtgccctgtgtttactgagtgaaggcgtggctgtgcgtcccccctcgctgccgctgctgggagaggaatgccttatgcggactttggccactttaatccagcagaggtttgagcacctacctttactgtgtgggactttctgcctgctccagtgttcagagggtagatacagagatgaggaggctgctctcagagtccccactcagaggaacatcagagcagggggccctaagatgggcaacagctgcaattacttgcctgtaattctgctcagaatgtctgcactgtggatatcaacgaggctattatgtaaatatctggttaaaaatgagattgcttttggcatcttcgtcatgaagtctttgactgttcctatgtctagaatggtattgcctaggttgtcttccagggtttttatagttttgcgttttacattcaagtctttaacccatcttgagttgatttttgtatatggtgtaaggaaggggtccagtttcagtcttctgcatatggctagccagttatcccagcaccgtttattgaatagagaatccttttcccattgcttgtttttgtcaggttggtcaaagatcacatggttgtaggtgtacggccttatttctgggttgtctattctgtttcattggtctacgtatctgtttttgtaccagtgccatgctgctttggttactatagccctgtagtatagtttgaattcaggtagtgtgatgcctccagctttgttctttttgcttaggattgccttggctattcgggctcttttttggttccatatgaattttaaaatagttttttctagttctatgaagaatgtcaatggtagtttaataggaatagctttgaatccataaattgctttgggcattatgtccattttaatgatattgattcttcttatccatgaggatggaatgtttttccatttgtgtcatctccaatttctttgagcagtgttttgtaattctcattgtagagatctttcacctccctcataaactgtattgctaggtattttattcttctcacagcagttgtgaatgggattgtgttcctgatttggctctctgcttgactgttgttggtgtattgattttgtattctgagactttgccgaagctgtttatcaggttaaggagattttgggctgagactgtggtgttttctagatatagaatcatgttgattgcaaacagggatagtttgattcctctcttcctattgggatgccctttatttctttctcttgcctgattgccctggtcaaaacttctaatactattaatatgttaaataggagtgatgagagagggcatccttgtcctgtgctggttttcagcttttgcccattcagtatggtgttggctgtgggtttgtcataaatggctcttattagtttgaggattgtggatctaaccaaactaaagagcttctgcacagctgaagaaactatcaacagagtgaacagacaacctacagaatgggagaaaatttttgcaaactatgcatctgacaaaggtctaacacccagcatctataaggaacttaaacaaatttccaagaaaaaaaaaaaaaacattaaaaactgggcaaaggacataaacagacacttttcaaaagaaggcatacatgcggccagcaatcatggaaaaaagcttaacatcactgatcattagagaaatgagaatcaaagccacaatgagctaccccctcacacaagtcaaatggctattatttgacttgcgtgaatattatttgacttgtgtgaaatgagatacctcctcacacaataatggctattgttaaaaagtcgaaaaataacagatgctggcaagattgcagagaaaaaggaacgctcatacgctgttggtgggagtgtaaattagttccaccattgtggagaacaatgtggtgattcctcagagacctactcacaatagcaaagacatggaatcaacctgaatgtccatcagtggtagactggataaagaaaatgtggtttgtatacagcatggaatagtatgcagtcatgaaaaggaatgagatcgtgtcctttccagcaacacggatgcagctggaggccattaccctaagcagactaaggcaggagcagaaaaccaaacactgcatgttcttacttacaagtgggagctaaatgatgagaacacatggatacaaagaggggaacaacacacactggggcctatcagagggtggaggatggagggtaggaggagggagaggatcaggaaaaataactagtgggtgctgctaggcttaatactgggtgacaaaataacctgtacaacaaacccacataacatgcgtttacctatgtaacaaacctgcacaagtacccctgaacttaaaataaaagttaaattttgaaaaattttaaaaaggggacagagagagaagctgtggccccagctgggtggttttctcttttctggctgatgtctgcatggggagagtcccttccctgccccacttcattaccacttgccttttattttgaacttttatttaaaatactggttttggatttcaaccagaattttaagacttggggtctcatctattgcatctcatcgagtaagtccctgggaaccactgtcctttagcggcactgtccttcctaaaacaccggacattctaacacggaaaatgaaagcaaaccgcatgcatttcctaggactgcccataataaagtaccccaaactgggtggccgaaaacaacacacttattctctcccagttctggagactggaagtctgcaatccaggtgtcggcaggactgctgtctcttcgaagtccccctggggagaacccttctgagcccacctgaccgccccggctcttggtggcctctggcaagcatctctccatcatctctgcctccgttttcgtgtggccttctctgcctgtgtctctccaggactccagtcgtactggatcagggacccaccctactccagttgtcctcatctttttttttttttttttttttttggagacggagtctcgctctgtcacccaggctggagttcagtggcacaatctcggctcactgcaagctctgcctcccgggttcacaccattctcctgcctcagcctcctgagtagctgggactacaggcgcccgccaccacgcccggctaattttttgtatttttagtagagacagggtttcaccgtgttagccaggatggtctcgatctcctgacctcgtgatctgcccgcctcggcctcccaaagtgctgagattacaggtgtgagccactgagcccggcccagttgtcctcatcttaacccattacttctgcaaagaccctatttccaaacaagttctaaagtactgggagttggtacttcaccatatggtttttggaagggacacagctcaccctgggccgcggatgctggctcctgttagaggactgtgctttacaggcagcgcctgtggccctgtgagaactctcgctgcaatctttgctttctcacttttacagaccaacaagccctaccacagaccaggctgggccttggctctggccacttcgtgtcgcgtgcctgctgactggcgcttgtctcctgtgttgccagcctgcttgttagagctcagaggcagggaccttgcccccacatctcctgaatctcccacctcgggcagcctggcaaggccatagagatatgaacagcctgcccttccagctcctggggtacagcccgatgctgttgacattgcctccacctcccttccttgtctgggctggggagggatttcttggctcccataagcctttgtgggcttcctagtgtgtgtgttttgtcctttttcgtcctctgggctctgggctagacagggctgctctccatgaagtccccacccaaccttactcccaggagcagcagtgattgacagacagctgggcaccaccacctgccgctcacccacagatgcagccgctgcggatgctgcccccgccccacctagagagcataacttaacccatggtgacttcgttaacaagagatgcgtagcggggccccaggaaggtggccctacacccacggtagctcttggttgggtgcctatgtttcaggctgtgctgatgagcctggaggtgcctgggctggcccatccatcggagaccccggacagcctggctacccaggaaggggagctgtcacttcccagcgctgagtccagggctgtccacgtgggccttcagcaaagcctgactgagcctgccaggtcccaggctctgctcccaggtgggtgggcatggggggcagtggtggtgtgatgggggcgcagcaggagtggggcaggtgaagctggtcctgccaggtgctgccgcccttccaggtggtacttccgataggtggtgttcggctggtgacccctgcctggaggtcgaggggaagcacagcagagccagggcagggagaagcgtgtgctgcgcgcagcccaggaaggaggggcatggagcagaaagaaacacaggtgaactggaagagcagagagggttcatgcttcctgcacacatgggaccagggcatgggcctggtggggggtcagcattcctccaagccaaaaaacacaggtgtgacagccctttttctaaaacattacagaggcagcaggagcagagatggctgcagggaagtgactgttccccaaaagcaagaaactcctgttgcctcacttgtataagccaagggaacccctcgctttctgtctctggagtcactgaatatttttgtttatgtcactttatagcagtactgatgcttaggttgatctaagttcgtttttaaaacacaaaacacgtctttaagtggaatgcacagttagtatgctcctgcgaagcggcagccccgctgccctccctggctctgcggccacctgctgaggatggttcttctaggatgagtcaggagagtggagcaaggctcagcctgcaggtccttgctgagctcagggaagcagccccgtgaggatcgggctgcgtggtctgcaggggaacctgcctgggaccctgtgagatttacctgtttcaggtgccagtgatctgctgggattctggagaggtccctcaggggagcctggcacttcctacccccttgagtttgcaaagtcacaactgagggcctgggttgggacggtgtcatgagctctccataagctttgcttatggtacaggagcagactgtctggcgcttctggagacctttaacgtgctcctgtagacagtcgggtaaactcattctggtagcacagcgtggcctccccctccacctgacatctgaggaagtggcaggctctgcatctcggtggcctcgccccagggtgcagggagcaactttgaggaaattagtgctgagcctccagtaggaaggaggactgtgctggggaggcaggtgagccccttgtggtgccgcccgcaggtcacactggcctggggcccctgcagaggaaacaggatccaccagccaggcccgctgaccatttggaagtggagcgtgcacacaggcggctgtgcggtcatcgtctggcaaacaaatgatgggaccggaccaggagcagactggctccctgtggtggggactcttggcaggcggatcggcttcttaggaattaattctcaggaagccagaaaagggggaccctgtggcaccctctgcttttgctttggtttaacatgtttcctaggaggaataattaatcttctttctctgaggcaggctgtgtgtgtgtgtgcatgggttgtatgtgtacagtgtgtgcgtggtatgtgcatttatgtgttgtacatgtgtgtatgtgtcatgtgcattgtgcatttgtgtatacatgtgtgtggtgtgtgccttgtgtttgtttttcatgtgtatgtgtgcagtgtgtgcatttatgtgttgtatacacacatgtgtgggttgtgtatgtgttgtgtgtctgcacgcacagatgttgtgtacatgtgtagatagcatctcagcctccttgggaggaagccttgagtctttttggctctgctgagtcatagctggtgggcttgctctgcagtgctgactcaccacacagaaaaacaagaccaaaaagtcccctcagtctattaaaaaaaaaaaaggatgtaagataaatatttggctattcaagataaggccactgactcattcagggaggttaggatgactgcgtgtcctcccaggaatgcagacttggagataattggtttgcagacactgtatctggaagcagaaggtcagcagaaagcctttcagatagaaggtatatgtacccctgtgagttttcctgcctcgtcgctctctttttatggccattaggtttctgttcccactgctctggaagcgtcactcagggtcaccctctggctgctcagtctggggtctaggcactggcctggcctcatcacagcactggcacgggcctccgacttttcttcccgtggccccactgctcttcccggtctccctcccacctcttgtctgttccttcttgaatccctccttcttcccacgacccaagctctctccgacgccagcaggtgcccgcatgcatagtcatagcgtcagggcctctggggaagagaaaacagcttcgttttttgagtggctactctgtgctgggactatgcccccctcatttacccctcacagctcatcccttctccgtgcacaaggtgacatgaacttcatgtagagagagggaaactgaggctgaagatggctaagtaatgtgcccagggccaccctgctgggcaaatgggggtttgcaaagtggcagtcggacccagcttgtgctaataccagagcccactttctctcctgcttccactctctgtcctgcctccccaccccaagagccctctgtcaaaatgacatctgtgaggtgagacatcacttcttccactggtattaaaagttgttcgcccagaatggaaatgtatcacttgcatttgatggtcaagttatgcctactgccttgggaacaaagaagacagtcttgatgataggacggggtgcagatgtcacctacttcccctgtggaggacggggtggagaactttggagctcctttcttcttgctccagtgtgggcagggaggggcatacagagcactgacagccctcagtgttttcagaagctggttctgggcaagtctcagcttgggaggagcctgatgtgatgctggaagtggcattgttagcacttggggcagtcagagtgaagggagacattcctcagcctaaatagatcgtgggcattggtttttgttgttgtttggtgttttttggatttcactctgttgccccagctggagtgtcgtggtgcaatcatagctcactgcagcctcatcctcctgggctcaggtgatcttcttgcctcagcctcccgaatagctgggactacaggcatacgccaccatacccggctaactttttaaaaattgttttggtagagatgggggtctcactttattacccaggctggtctcgaacttttgggctcaagcccgcctcccaccttggcctcccaaagtggtgggaccgtaggcgtgagtcactgcgcccagcctggatattgttaaacattgtctttatatacaaatgttggtttcttttccaggaacctgggcctatgcagggcacacacgccggtcagttgtatgtacctaatttcacggtagccaactatgtctgtagccgttcaagcaacctgctattttattctgttttgtcagtagaagaatggagttcaacagctttgctggtactcaatacctggaaacagacagcatgttcttaacacatgcttttttcctttggagattaagggatagtattccagtttgacaatgtagataccaggctcctgtaattcctgtggcccagggaaacagtggctctaattttcaggtcctccactgcagaatgactcattcctgtgtgatctgagcgtgatctcgcctgcatgggaagctgccctgtaagggagcaggccggtgaggaacggaaaggaccacagcagcgcccaggccgccctgccaggccaggctagagttgcgcagataaaggccccgcatctgataagtgtcgccgcctgcccctgctggcgctcaggatcgtacttcttgtccttttaaaactcccttgcactccagcgtcattggaggcctgcaggcacactctgaaatagctgtacgtgtgggtggggaggagatagatgtcttaaagtgtacggatcatttgtttctctgcaggtgctgtcacactggaagcttgtggaaaccgtgttgtgtgtgttaactgagtggtgtgtttaagaacacagtggggcagggccaggaccaagtacaagatcaggttgagtcttgcattgtcaagtacgagactggctagcacagtcagtgaggtcttttggctatcactggtgcattttatttcattcagtccttttctcatagctctcttctgcttagctatttgccaaggcaaaaatagagggctctaaggaaggttacattccagagcacactgacttctattcatacagggggtggcggaaggctgttcctgggattttcagggtgacgataaggttgtgccctagaagtgtgaattcccggagaccctgggaggccccaacccccagcagaccccctcctcagaggctggtcgacagccagcatgcccgcccagtacctggcgagaggtcagggcgcattgccggatgggggagcagaggacgccggagtccaccgtccgcccttcattctggctggtgtcgggtcacaggtggccggatcccgttacccagcccaggacgttcggtttcattgaagaatacctttccctttctgtttccttgtgccgcagatgatttacatggacgatggagtgtcatcttttgtccagatcagaggctccgttccgctgttctgggaacagccagggcttcaggtaggtcatgaaaaaacttaaatgtccccttgtgatgttgtccgccctgcccttcccttcaatagctggggaagatttcttttaacacgttcgtttcatggcatagtttccagtctttttcctcagccctgttgtgttgagctgagctatcaaagtgtgcacacgtgtgtgcatatgcatgcgtgcgtgtgtgtagaaaacacagacaccactttgttgtttctggtcgtcaaggatgctgtgtgaaaccgctgactcgggaacggtgctgcggtgcctgctgagtgggtgccgcgaagtgagcttgggtagcactgcctgaggttagaccctgagttcggtgtactgaggacgtttctgagagccgtgactctcatggagggcttcaggaaggctctgtggctgcgtaggtctggcacccggtgctgcctgttgtggggccacgtgagacttccacagctttcccgtgatttctaaaaataccccttgccgtccaaagcagggctctggtcagtgccagagagatttggcattctttctcctgggaagagcacagggtggggacacattccaagaacacatttgtcatcaatggaatgacacgctgcctccttcaccagggtctctaacaaggtgggttatgggccgagtggactggaggggcctccccactaatccccagtcttcctccctgtcccgaggggacgtgggtgccttcagaaagcctctcggccagggcctttgtcgcctctcggctcttcttaccgacagctctcgtgtgactgcatttgggttgccagccagtggctactggggcccagagtgccatctgccaggttccagggggtgtttgacaacgctggactcagggtccccagtcctgggttcagcttcttagcctgctctttgacttgaccctgtgccaggagcaggtgagtcacttgtccccatggctgtcagcacgctgcagtgacagcattggtgaagtactgggtcagcctgggcagtgagatggatgaatggaggtctcgtttaggctccacgctctggtagggagaaaagtcttgattaacattcagtctttccactagaaagagcgcaccacactgcacgagataactgacggcctccggagaaacgctcctgaggacagctgtgacacagaaactcctccggagggctgcccaaaggaggtttttggaaaaatagctttattgcaatataacttacacacccatttaaagcctacaacttggtgcttttactgcatttatggtgttgtgtaaccaccactgtaatctaatcttagaacactttgatcaccactaacaaactttgtccccgttagtggtctctcccatcccctccaagtctccctcatgccaactcgactgttcatctactgtctttatctatagatttcccattccagacgttccaaaagagtttttgaaacctgattttctttaaatatggagttttcctttggaaacttctcgagctctgtattcaggagaatgaaagaattgatcgaatgagtgtggcacaaaaaggagacagggagaccatgttgtgtttcatgtaaagtttgtaagaaatccaaaaattaggggaatggtcatgatggattcttagaatttgggaaggaccctttggaattcatccattccaccctctgactctcagttcaggggtcctccttttttttttttttttttttttttttgagatggagtctcactctgttgcccaggctggagtgcagtggtgcaatctcggctcactgcaacatctgccccccgagttcaagccgttcccctgcctcagcctccagagtagctgggactacaggtgcccactaccacacccagctaattttgttgtatttttagtagagatggagtttcaccatgttagccaggctggtcttgaactcctgacttcaggtgatccacccgcctcagcctcccaaagtgctgggattacaggcgtgagccaccgcacctagccaggccagttcagggatcctcttccaggacctccaaagggctgtcctccaggccacaactggggatggttccgactcttggtgaattcctcctgtattgcactgctgcgtctgtctgactctagagtgttttggggtgcgcgggaatatgtctgattcttctccgtgtgactcaccctcagtccttggagggagtcttctggttccctcttcttcttcttgtcttctctaaggcctcccaactcctttggccaccttccctcctgtttctaagactctcaatgttctcatctccctcatctaaaaaatgacactcctttttgtcgttcccctcttggatttcattttggtcttaccttgaccttcgtgctgcctcagatgtagcctgacccgccatgggatgactgtgccttggtctgtcaggggccaggagcagtggaccacgaggtctcagctttttggcagctgtttcaccctcttaaattcctaacatttgtgctgcaccaaagcctccatggtttcttctttttgtttcttgttttgttttgtttttgagacgaagtcttgctctgtcacccaggctggagtgcaatggcacgacctcggctcactgcaacctccacttcctgggttcaagagattctcctgcctcagcctcacaagtagctggggttacaggcacccaccaccatgcctggctaattttttttgtatttttagtagagacagggtttcatcacgttgaccaggctggttttgaacttctgacctcaagtgatctgcccgcttcggcctcccaaagtgctaggattacaggcgtgagccatcgcgcccggcctccatggtttcttcaaaacaagcttcagaaggctttagtgttccttaatcttattaaggatttgctaacctttgggcctaatacctgtgtttagcctctaaacaccactcatcatcaaagagagatgaagtcatcttcacagggggccgggagggcagcgggaagtggtggtctaccgtcaccggcttcaactgtcactatcaagcctaaggctgcttctagttatttttctccactttgaactttttctcttccttcttcacttaggttagatgaaaagtgcaaagattttggggtgagtagcttgcgtattaagctgcaatgctgtccctccttgacagctgccgttggaaacccaggagcccagcaggatggggcagggttgagcagagggtggtggatgaggatttgtctgcatgttttcctgggtaatggtaccttcagtacttcctgactccatttctagcagccgtgtacctttaataaatttcatttttacgtgtaaatgggctgtgcagtttataaatagccacattgaaattttacccttaaagcaaattgctccctggtctagctagttcgagaatctatttatgatctgtgtctgtggttgacaacgttgctcccctggtcattgtagaagcttccccccaccatatgctgtatagacacgtgccttgccaaggtgagttcagtctgtcttttgaagtttcctgcaactgaaccaaacggaggaggatgccgagtagagcagacccctcttgccctgccttcacctctttcctgccagaaaccattcgccaagtttgtggagtcgtggcgctggatgggcttgtgtgtttgtaccttccttttttccaaaaaggacatgagatggcttgtagtataacagtttcaaaaataagtgaagaggtctggatgaagggcaagagtcgaattggtgcccacgatgcatgccgtgggtcttgtgtgcgtgggaaggaacctgacgcttgttccaagcttccccgcagccaccacagaaagaaccacagtcacagccagtttatgacagtgactcagagcacgagctttgaagcgacgcagacctgggctcaaattcaaactctggctcccctgctttgtaaccatgtgtgtttgagaggctcttatctgtgccaagccttagtttacttttctgtaaaatggggctaacaatatctaccttatagggttctagagaggattaaagagcgtaatataagaatttggctgggcatgggggctcatgcctgtaattccagcaatttgggaggccaaggtggacagatcacttgaggtcaggagtttaagacaagcctggccaacatggtgaaatcccatccccactaaaaatgcaaaaattagctaggcatggtgtcaggttcctgtaatcccagttattcaggaggctgaggcaggagaatcacttgaacctgggaggcggagtttgcagtgagccaagattgtgccaccacactctagcctggtcaacagagtgcgactctgtcaaaaaaaaaaaaaaaaaaaaaaaaaaaaaaacacacagtatctagaatctaaaaagtactcaaaatggcagctgctattgatactaatagaaacaaatgataacacccaggagataaaaccaatggtggcatccggagaagcatggctcttggtgccgtgagcactgaatgagagtttcctcctgtctttgtgggaacagggacaccgtgagatgtagtaacatgaagacagcttcctggtcagtcttatctctcatccctcatagactcatcgtaaatcagtaaccccagatgaagccatttattcatcccaaacattcactgagcgtctgccaggtgtagggggcaccagggatcagatacagtccctaccttcagggagcagggggcaggacagggcagtgttgtgtggacagagccgtgttggaggaagggagaggccccgggggcagctctcccaggctgagggtgtggggtgggctgcccaagggtccagactggggaggggtgaggaagaagcactcaggcaaggaaggcagcccttgcagagggaacaatgggtgcaggtgttgtaacccttgggttcacagtgatcagggagcatcactgggtagcttcttgaagtcctgggcatgaagggaatgggaggagagataggagaggtgagcagggctgggtcaagggcctgtggatgctacactgaggagtttgcatcccataccagcagctactcaagcagtactccccaaccttgctgcacagaagactctgctggggagcttgaaaaatcctgatacccaggttgataccatacacattaagtcacaatatctggggccgggagccaggcagctgtcctttttgaagacccatgggtgactccagcatgcagaaaagtatgggaaccactcggtgctgtgctggcaagccagttttattggggtcagactgggtgcagggagctttggtttgtagcatttgtccattgctgtggtgtaaattctcccatcgtggccactttcaacctacggctccacatcactgagctcagagttgggaccagctgggtgcaccgtcggcttgcaagcctgcaggagctggctccagcacacactggacactgctaaagggctgcaagaggtagagacacaattagacagaagtctaggcagtgttagtttggaggggaaagacaccagatgggaggccgttgagctgagatttttgggtaaccttaagtctggtaggagtggtggggtgcaggggagaggtgtggaggtgctgtctgcgatccttgggcctcttgagtgctgatcgagactctgctgtgacttccacagccaggagttctccagaccccgactatcctcatggctgtctacctaacctcagtctctggtctataggattgaactaatgactttaggggccagataagagtagctggccctttgcccagaggggaggaggacggggtggaggagaagggaagctacaaaatgcagtgacagtggtggaccctgccctcagctgcagctcgtgcctgtggcttctgacacccagtgacctcaggactaggtgacaccagagaaggtggatgctggtcagtgttggagcaggacagaggggaggaaggatatgaggcccaaggaacccagacaaaagggatgcacggggtgacggaggaagggtgagctccggagagaacatgaggcccagctcccctccacttttgcccaaggcctcactgtgttgcctttccacctgcctaaaagaagcagcttagggtcatgactcagggagaggcggttagacaagtccaataatacaacttgtttaggggatggagggacccagcctgaggccctgagcccagggaagcagctgtggcaagctgagcctggtcatggtgtccctgaggctctgcaggtatggacatgcctctgctggtatgcatgcagctctgcaggtggggacacggctctgcaggtggggacatggctctgcaggtatgcacgtggctctgcaggtggggacacggctctgcaggtgtcgacatgcctctgctggtatgcacgcagctctgcaggtggggacatggctctgcaggtatgcctgcggctctgcaggtatgcatgtggctctgcaggtatgcatgcagctctgcaggtggggacatgcctctaccagtatgcacgtggctctgcaggtgtgcacccggctctgcaggtatggacacagctctgcaggtgtggacagggctctgcaggtgtgcatgcagctctacaggtgtggatgcacctctgcaggtatgcacatggcccctggagctgtcttccctgctgtaccttctaccccttcatgggcatttgtaacctaagccaaaagggaacataacaagtccagaaataagtcaaaaccagaaccactcaaacttcagcgtgtgtgcataggaatctcctggagggcttgttaaaacacagattcctggccccacccctggagagtctggctcagcagatctggggtaggcccaggacttcgcatttctaacaagcacccagaggaggtccaacgaccacactttgagaatcactggtctagacttaacagatcccttctgcccattccctgctctggtcattcacccgggggtggtgctcccgactgacttcttagttctctgaggtagaaaggtttgttgtcagcagtgatactggactagccactgcaggggatattgaccatgcctgtgacagttgggcccagccctgtccacacggaatgcttgtctaagtccaggataaaagacaagcctgaggcctcagaaaagatgtgctgcagcccctgtccgggctgtgccttctgctgtgggcagctgattccagggcatgccgtctgcttgccacattccctgagtcctcactgatgtggttgaggggaccccatcaaaggcaggtgcctcatttcactctgctttgctgcctgttccctggactcaagggcatagtttctgtcaaattaatttgcgcttgtgcaggtttgttagaaactttgaagtgcttctgggtctttccatgggggttctggttaggtgtcatcacccaggccaggggattcagcgtctcccatccctttcccacctttccatgacacccaatggcatgttgactcggagggcgctcagtaactgaggaatggactgctgactgatagtgcagtttatatgttaacgggggagctatagagcctggggattggagcctgctaggtccagtcatctgtgcaacagtttctacctaattaaaagaagaggctttgggttatgactcagggagagacagttagacatgtccagtaatagaacttgtcacgacggagagccaggctcctcagccctggcctgccaagcttgtattctcttcttactgtgctcccatggggaatgatcctataaacagctgctgctcattgctgaagccaggggagacttcttgtgatgactgacagaccacacagagcaggtagcccctctcttgggttttagccctggtgacctctcatagggtggctgaggggtacacagacccgctgacttccctcagggtgcaggatggagcaggcctctcggtagtgcgaccatgaaagttttcaaattttctgagatttcctcagccaggtgttgatggccatggggataaaggacagaggtaacacaggcagcaaaaaaataaaaaaaaaccccacaggtttggggtgagcctttcttaggagctccattagccaacagccaagatacctcattttgcactcacttcacttgtgaccaaagtgtcttaggaccaaaagggatttgggactttgttgaactgtttatataaaaaaaacctggctgggcacaatggctcaagcctgtaatctcagtactttgagaggccgaggtgggtggatcacttgagcccgggagttcaagaccaacgtgggcagcatggcgaaaccccatctctacaaaaaatacaaaaaaaaaaaaaaatagccaggtgttgtagtgtacacttgtagtcccggcaacttgggaggctgaggtgggaggatcatttgaacctgggaggttgaggctgcagtgagccgtgattgcacctctgcactccagcctgggcaacagagtaagaccctgtctcaaagaaaaaaaaaagaagaagaagaataagaagaaaagaaaaggaaaccttctccaaggaatctctaaatctattgctgagaaaccagttctctagatgggtgcttttcttgagtctgagatggggcagttgtatcacctgcagtgttgagttatacaatgatacatgaagcatgataatagctgcatctcataacatagataaatctgctgacactacttttacaacactcaaacagaagcaaaactaaagagtgcatttttaactacttattcttgaaataatttcagacctacagaaaaaatttaagaacaagagggaactcccatatgtccttcacccagattcactaaattttaaccttttgccacacacgttattattttttgaaccgtttgaaagtaggttgcatatatcacattggtgttagtccatttgccttgctgtaaaggaatacctgaggctgggtaatttataaaggaaagaggtttatttggctcatggtaatgcaggctatacaggaagcatggtgccagcatctgcttctggggagggtctcaggaagcttacagtcatggtggaagaggaaggggagccagtgtgtcatatgacgagggagggagcaaggagagggaggttgcaggttcctttaaacaactagctctcctgtgaaccagcaagaactcattcattaccatggggttgtcaccaagctattaatgagggatctgtccatatgatccaaacacctcccaccaggccccacctccaacactggaggtcacgttttaacgtgagatttggaagggacacacatccaaaccatgtcagtgtctctttacttaagtgcaaaatatactctcctacatatagtataggtacacatttgggaaatttaacattgacaaagtacttcaatctcatctgcaggcaatattccaaattgatcacttgtctcagtgatgtcctttgaagcaccttttcccgccttgagtccagcatcacatactgcattttgtggtcatgtctctagtctttaatctgcatctgttcctcggctttctgtctttcaaaacattgatgtttttggagaatgcaagccttcttttccgttaagtcgagggtccctacatttacattttcctagtgtttcattataatcacattcagtgtatggatccctgaccagaatgctacctacatgatgctgtatccttctcagggtaccagatctggaggcacacggtgtccatctgccactcattagtgatgttaattttggtcacccagtcaaggtgctattcagtttctccacttacggttaatatgttttcccttccaactaatcagcaatctatgggagacactttgagaccatgctggtatcctgccttttactaaactttcccttaagatttatcatcaacagataatttttgctgaacaattatttactatgacagttgtaaaatgatgatttttaaatgatttcctccaaatttattacttggtattctactatagagccctctcttgttccccattcacccacctacacacccacccacctgcacactgattcacccatctgtcacccattaacccatccattcatccactcattcacccacccacctgcttatccactcatcgtccacctatctacccacccatccacctatccacctacttgtctacccaccatccacccatccctctatccagccagtcatccatccatccatccagtcatccacccatccagccatccagccatcaatccacccagccatccacccatccatgcacccacccatccacccacccactcacccacttacctatccatccatctttcatctacccattcacccacccatccatccatcctcacattcacctgtccatccatccacccacctatccatctactgatgcatccactgatccatccatccacccacccattctcttatccacctttctatccatccactgatccatccatccacccacccatccatccatccccattcacccatccatctatccattcagtcgcccatctattcacccatccatccatccccccattcatccatccacccattatccatccattcagccatccacccatccattcacccattcatctatccatccactcacccacccacctacccatccacccatctatccatccactcagctatccatccatccatccatccatccatccactcagctattcatccatccacccacccatccatccactcagctattcattcatccatccatccacccacctacccatccacccagctattcatccatccatccatccatccatctattcacccatctagttatcatcagtatagattcatgaatttctattttattcatcaggttaaaatccattactgtcctcatacagtttgatgttcagattgtcccagatttggccagcaaaagcccctttaagctgactccagcaacaatatgtattttaaatgtattttctaaaactaagttgagtattaaataaatagttctattaataataaggcaaatttgatcattaggatgactcagattttagggggaaattagtgtccctgaaggcataaaggagactgagaagcagtttctgtctccacagttggcttcactgacctctgtgctatcagagagcttaggatctgacatctgcctcatcatcttaccctggatctgctttctgtggaagaattgcagcagacatggtcatgttgcagttaggactgggcagcagcaaagccagactcgaggcacctagacctgagtttggagcactgttagctgaatccagagagctcagccttcctgagccctgaagagaccacagaggtggcctagtgggtgccacatgcagcctggctgggagtaagaaggagaatgggaaaaaccatggcctccttggtttgcagagaaggaagaatcactgttgttacttctctttgctttaggttggctcccatcatctgagactccacagaggcctggaagccaatgcccctgctttcgacaggtagggattgtctgacaccatccaagcctgtcattgtcatccttagacatcgtcctcccatcagacacaagggagagggtgcgacgggaaagggaggaccctgaaccctgaatctaaagctgctttccctttggtcctttatgcaagaagggagatgacaaaatgggatttttactttgttctcaggtttcctgaaggtaaattaatgaatgttcaggtagcactttataattattttatcttaccagtttcttgcaatgaggcttcatctctatgccctggttaataagggatcatctaaattatagggtatttgaagctgtttgttttttgttttaaaatagtatagaataaataagtatagaaaagtataaagtgaaaaataaaagtaccctaactcccagttaccactctcagagattttactattagtagttttttacatgtcattctagaaaacaattttggcattttatgtgtgtgtgtgtgtgtgtgtgtgtgtgtgtgtatttaaatacacaaattggatcataacacatttactgttttgcagcttgcttaagaaaagcagagctatttgtaatatgtatttgaaataataacttcttaaaagatttgcttatttaatctaaatactcaatattttaaaattgtcttagtgaatatagtaaaaattctcgaaagtaatgtgttaagtgtttgagtccttctacctgaagctttattgagactttaagtttgctttcatactcttgttaaacataacacttgtcatatgagcccagatgtgaccccctgattagtgtgtgacatgtaatgcgcttttctttaaagagatatttaatcaagtatagacaagaccattgccttttccaaagcattattagtatgtcctgagcattctacatgcggagttctttcagttgacattcatctatactaaattgtcttaggaaatagtgaacatgaaaccaaaaatgaaattctacctggctgagcttggtggctcagattttagggagtcgcctgggtgacagagcgagactccatctcaaaacaaaacaaacaaaaaacaaaaatattctacccgaagctgacccaaaacaagagggaagggtcatgctgggttcgcttcaggaaccctcctatgtttaggagctttcttaaaaaatacatacatctagttgaagcacatttgcatagactgcagatttttcagaatcctggtaatgcatggtgtgtgagatgcacgtaccacagagaatgagacctctctctcctcacaagcaccccagaggctgccttgccccttggaaagcattcctaaatctaggggtacacttagatctcttctgcaaatcacaggacaagctgctgaaagggtgagtctttctacaggcagctactgtgtccaggaagtctcttctgtaatgcttcttacccacgacactgggctggaggcaggagccctcccgttcccttgcaggtgctgctgctctcatgttcattgctgactatgttcccctcattcgagataacgtttggaaataaggtgacatgtctgcctagtggccgcagtggggcaccatgagggtccccctgaaagcaggctgcccaggtcctcgatggtgtccctggactggcatgtgcattgtcctgggtgcttcccaattctcttctctgggacatcactgcgctctcaagagtcgtgcggttctctgatggatttggttgagagtaaatcctttctttcccccgcaaaaccttcacacagatagtttttcttcccagaggatgcttgttttcctttgcctgagctgcatgggtgcccctgttagccgaggcggtctcttgtcactttgctgtatgtgctccatatctgaggagggctgtttgcagcaggactttggctgcagctgcttgagtggggtcttgtcatctctgtgtggtgatgagtctcggtggaagggctaacctttcacagggcggtgcctcagtctctcctcacaggacagtgaaccccttctccttccccgccccgctctgcgggcggctgctgtgcacatcagggtgtgctgaactcttggtccctccctgaagatgagaaggatgcttccaaatagaaatctgattcctcagtatcccgaaaaactcctgttttccaagtagcttcctatgacagtaacccgtaggcaggggaagtgaaaaaaaggcctcaatgctcagggtgacccaggaagaagcccgtatgatgccgaccttgctgctggtgccagcgtccccttacaccctgggtgccagcgctcccttacgccctgggtgccagcgtccccttacctgggtcggcagggcctctcagctcaccaataacgagcattttacaataaagggaaagaaagaggaaccacgtcccacacaccaagcactgtccttgtcactttcactcgtctttttagtcctcctcgccattctccgcaggaggggaagtagccctgctttatagatgaaggagccagctcagaagggatgaatcatttgatcaggggagtttggggttgggacagcatagagtaatgatgaggaatagtgagtaataatgagtaataacagtttccttctggccctgggctttggaaccagttgagaagaaggggcaggaatgagacaggaagagatcagaaatgggccttgtttccgatgagccacattgtgggatgtggcttggatgtgtggccacggtgggctccctcaccaggggcagagcctgcacgtgtcagagccaggcctgggatgcaccttctctgggcagaccgacccaaaagaaagcccacaagggctgaagccacacacagcccgccccagggctgcctggagctgcacgtggagacgggagcccgggagggtgctcacccttaacttaggccagggagtcagcaggcaagcctaacttcaaactacccacttcaaaatccatagtctttctactactgtcccttaaagttagtaagagaatgttttctcttactgcataagaaaaaaaatgatttttttcatgatcattattagctctttaaaaaattccgctcataaacgtgtcattacagaaatttggaaaagagaaagatgtttaaagaagaaaagaacttgaatcatataaaattctaccacttttgacatcatgtgtttttttccagtgttttttctatatttaggcataaagattgcaccattaaacgataatttgacatctgctttttgcattgtatcatttccctatgttttgtttaaggcactacatttcaacatgtttaaatttgaaatgtaaggttacttttaaaaagctggtgatcaagaataaatattggaatctctccctaatatttcaacatacatatttagaaagtagcttccaatacaaggaatgttttccaaagcctgcaagttttgttgtatctccttgttgtggtttagcataatgcaatatagcacttagattgaaaacaggatgctgagttgagagctctcctgccagttgttctagttttgagaagggtgggtaccaagcaaaataagagattcatttcacacatgtgcacattgcatgtgtaagactctagcccaggcacggtggcttatgcctgtaatcccaacactttgggacgctgaggtgggaagattgcttgaagccaggagttcgagaccagcctggacaacatagcaagaccctgtctctatgaaaaataaataagtaaaaattagccagatgtggtggcatgtacctgtagtccctattacttgagaggctgagttgggaggattgcttgagcccaggagtttgaggcagcagtgagctatgatcgtgccactgcactctagcctggacaacagactgagatcctgtctcaaaaacaaaattctcttgatgaaagttcaggttaggtgttctagatataatgggaggtgctttatagaaagtgcagcatatcctttgtctgattccaaacaaatgtagaagtctacgctagctagtagtaatggcagctgggaggtgcaggttctctccacccaggctcattttccacgatttgggtcatgggggacagctggtcctggactgtggcactaagaaagcatgactcctgccccgtcttcccttgaggggcagaacagggcagagtctgcacctgtgcccgtgcccagcatcacgcccaccccgctgcctttgcaggcacatggtgcttctgaaggagcagtacgggcagcaggtggtcgtgaaccttctgggaagcagaggcggagaggaggtgctcaacagagccttcaaggtaaggccaggctgtcctctccacagctgggctgggcggcaggtggccatggtggagcgttgagcctggaggtggctcctgcagggactggagctgacagcccagccctccttcgtttcctgaggcttccccagcattccgaccagtgaacacggcagtgctcagtgactcgggccctgatacagtgagtgtaatttcttttctttttttttttttttaagacagagtttggctcttgtcgctcaggctggagtgcagtggtgcaatctcagctcactgcaacctctgcctcccaggtacaagcgattctcctccctcagcctcccaagtagctgggattacaggcacttgccaccacgcctggctaatttttgtatttttagtagagacggggtttcaccatgttgttcaggttggtcaagaactcctgacctcaggtgatccacccgcctcggcctcccaaagtgctgggattgcaggcgtgagccaccgcgcccggcctagtgagtgtaatttctgtgagctgatggttgggagaatttgctcaaagtcaaaacagagcatctcctgtccccagccatgtgtcccttaccctccctccccatggggctttgagggcttctgacctctcaaggtacccctctcagtccagcccaggagcaggcaggcctccctttctgccctggctggtcctgggtgagttcccccagccccacagggcacccggcctcagggctcaggagcaggaacttcggtggctttcccctgcttgccggctggccttcaaatttccccctcttcctcgggctttcatggcagctcctggacctgctgctgctgggctcctgtgggctccttcagacttccttggggggcttttcctggcgatcctggacagatcctgggcagggtcacagagccatgggagcaagagactccgcccacctggccaggttccatccctgtgcatggatcccaggcctccagcccccgccccctgctccccaggcgcaagacgttccagaatgagccaagggggctcctggttcctttaccagcctccatgtcccctgcctaatagagaaaaactctctcgttgtttaaagctcaaagatatcccttacagagagagctcgaagtcgcctcactgggggttagggcgatctctgagcctttccctctgcttagaaatgccacatgctcatgctcagagcaggcacttcctggttgccaattttatttggccagacctgcttttcctgtttggtttgttgctattagcaacgagctccagaagtgtctcccttcccacccatcttggcagtgatgctggctgctaatttgaaggaagaagggaaaaagctaaaaaataagaataataataagaaccccaagtccttttcccctatgccttgagttgtggcccctcccatcagtgggtgaagtgcccggcactggtgagggcgggagatggcagccacctcatgcggagaagggtgggctcctggccaggtagggaggggcactctagctgaagacctgggtcatggccctgcctggggtggccctcagccacctcagcttggcccagaccaaggttggtggcccagcagcctgcccagggcccaatggccatcagtcctgctggatgaagcactggctgtggaatgcatggcactgagccaccaggcactgttgggctcctccagcttcttgctcacagcaagacttgcttgatgatggcagcactgcattgatttacactcagacctatcacaggcagtcacgttgagtcagatcagatgacccccaagtccttctagtccttccaagtcactaggacctctggctgggcagaggctggactggcctgacctgaagccacaagggcatgagtgcagggtgagaggcctggaagccgggtggcctgggtaggcggacagtttgtccttcatcacggggctctctggggagaaagccagggagctgccaggccagggaagcctcatatggaagggagggctcttaagggcatcctggtgccatcagcagccccttgacctgcttcccatctctccccaccttcactctggctccctgaccatcctgaagtagcatcgggatgtgggacccacctgggccacttcagctggagacttggtctcttcagagcataaccaccagaggctggtgcgcggcaggatggggccggttactagggcaacggggagctggattatgagctctgcagcctgccacagcactgctatctctgagggcctggggcacctgggccacctgaagaacagagcagtccttcctcacctgtgccctccagagagccctgcaggagtatgatctctccaggaagccacacctgctctggcttcttttgctcaagggggaccttctgccctttcgcaggcaagacgctctttgtgggttttgtccccccagggcctttgtcctgtgcttcccttttggggtcaactgcctggtccactgtgagcttccagctaaagcacgtcctgcggcgagtcaccttggttagccgcacgggtcaagctctgcaaggagcttgccctcctcgtcctcccttccctctgctcccctcaccgccctcccctcctcttttcagaagctgctctgggcttcttgccacgcgggcgacacgcctatgatcaattttgacttccatcagtttgccaaaggtgggaagctagagaaattggagaccctcttgaggccacagttaaagctgcactgggaagacttcgatgtgttcacaaagggggagaacgtcagtccacggtgaggctcgctgcgcactgtgccgcgtcttctgctggggggaagcgtcagtccacggtgaggctcgctgcgtgctgtgccttctgctgggtgaggcggcagaggggccgtgcagtctaggacatgtgccctatgaggggcagcttccttccctccccactcagttacccttgtggtttcctgggtcataagcttggcgacgccgggaatcttgggttccagcttctcatctcccttcccacagtaggagacaggcttttgaatttctcaaggagatgttgagtcatggttttctggcaaaagaaatgaactaataaaggggactgcattaaaacatggagctccacgctgtgacgcaggcctgtgagagtgagggccacagtcgcggtgggatggctggcatagacttagattgctagaggagaccagggtatggacttccctgttcagagcagaggagaaaaacgaagtccagttccctcaggtcacatgcagggggtcctcattatttgcagattccatattggcttatttacctattccttaaaactgatttgtaaccccaaaatcagtatgcaaagcatttttgctggacagagtatttaaatactctggcctcgtatttaaacaagtttcctttttaagatttagtaccatgtttttcacatttgtggggtctttgttaggggcccccctttgttcggggatctcatggtttagaatggccccaagcagtgtgccgaagagctgtctagtacttctgagcacaagaaggtggtgatgtgctttatggagaaaatgcacgttaagataagctttgtccctatatgagctacagtgctgtcggccatggttcagtgttaattaagcaaatatatatattcaataaggtgtctttatatggaaacatacataaaacaaggttgtatattgatcagttgataaaaatgtgaccagaggtttgcaggaacctaaccctatatttcccctaggagcgatggttctgtgttcatgtccaattcagtgttcctacaactttatagaacataattgctataaataacaaggaccagctaaacgtaaaacgacccagctgtgcaggctactgagtgtgtgtcctggggtctgcctgcctttccagaagtgctggggatccactgggatggacactggggtttctggggggctattgatgaggaggtgaggggttccctcttagaacatgtttcctcacacctgtaatcccagcactttggaaggctgaggtgggcggatcacaaggtcaggagttcgagactagcctggccaatgtggtgaaacaccgtctgtactaaaaatacaaaaattagccgggtgtgatggcacgcacctgtagtcccagctacttggaaggctgagacaggagaatcgcttgaacctgggaggcggaggttgcagtgagccgagatcatgccattgcactccagcttgggtgacagaggtgagactctgtctcaaaaaaaaaaaaaaaaaaaaaaaaaaaaccatgtttccttgggagtcaaaagtcagacatgggcctctgtgctatggccactgcttctttgaaaacaacatataaccgtttacatttcttcttgtcctaagttttcagaaaggcactttgcggatgaactgtcttgactgcctggaccgaaccaacactgtgcagagcttcatcgcgctcgaggtgcgtccctgccacagccttttcggccatctgtgccaggtcctgtgacttcagctggacaggctgggctgagcacctttagcggcaagatgagggtggcatcaccaagacaaccttctgactatggggaaggtggacagggagacactgggacatccagagaggggttccccaggaggctgctttctctgtcgtaggcacactttctcacaccctcttgtgaaatgcatcccagacatggtggcccaaaggctcctcgggaacagcggttgtgtgtaatgattatcgtggatgcaccattggccaaaggcagtgtgaggctggccggatgaggctggatttgaagctggggagggagacctctgtctgcatggccccagctgcctggttgacctctcctggctggggggtcgggggtagggtcagcaccccctgctgtccaccactgtttgctcttcagcctctggcattgggtggggcggggcggggtgcaggggcgttcaagtgtcagggggtgagaggagggcttgggtggaccctatagataaagttggggtgagatgtgggaagtcactctctgctgtgggaactcctcatcctctggaggggcacagagtcttccaggcacagcgtaatccacaggctgccgaataaggaacctcctgggacagtggctgcagggcctctgtgggagaagccagtgacagccatcccttattcctccccaggtcctgcatctgcagctcaagaccctggggctgagttcaaaacccatcgttgaccgctttgtggagtccttcaaagccatgtggtctctgaatggccacagcctgagcaaggtgttcacaggcagcagagccctggaagggaaggccaaggtagggccccgccgagggggcagggtgggggccccagggacccccctcacggcctgcggtctgggctctcggcaggtggggaagctgaaggatggagcccggtccatgtctcgaaccatccagtccaacttcttcgacggggtgaagcaggaggccatcaagctgctgctggttggggacgtctacggcgaggaggtggcagacaaagggggcatgctgctggacagcacggcgctcctgggtagggcctgccgcagacagggcgaggcagggaggtagggtgctccccagccccactttcccaccgcctctgtgctatccagagagcgggtggcagaggtgcctgggatctgagcagtggaccatgcaccttgcagctgtcactgcctctcccgggagcctgcgctttcctgctgggcctgggagctcacgcttcctctgtctcggcttggactgtgtttccatcctgagaagcgagagacaccaggcgggctcagggagaggccgtgcactctcctaaacgcatcggtgcctttgaatgctaacctactccagaaacttcctcagctgcctgggctcttgggcccttagcaggtgatgttggctttgggagcttcccatgaagttggcctccagtttctctcttggcccctgaggaccctgtggaaacagagaaggaggatgctgtcatcccctggggatgagggcaccttctggtctcagcggcaagacatcgtgattccatcaatataggaggttcctttgggagcattttaatggcatcttcttacctgagcctgtaaacatattaggtctcatggaaaagtaggggaaacccagcatttttccttataagaatgtacaagtgtcgctttagaaatgtcaggtgtttttgaaaaatgaactagcccatgcttaaaatgggttcacggccctttccactgtcaccgtcactgggggagctctaatttggcttccgataggcacggtgatatttagtttctactctggaaacagtgccagctctgtaaaaggtgaacaaagctccatgttgtacagtgagtcttatttaatagcaaggcagacatgagttagatttggtttacatcacaagtttaaaaggtggaatatattttggctatctagaggatggagatggttctgtgtagtgactttttaaagccttaagtctggggcaaaacaaaacatatcagacatgcaggctggaaggcagaggatgcaaaggtggctgtctgggttggtaagacacttaaagttatagtgtatatggatgcatacacaatgaaatatggtcagttacagcatgcccttgcttaaattcctatgccttgttcttctacggagtggacagtgaggacacggcttttccctgtcgtgtctgagatccctatggtctgatgtcccatggcttctggcttcagttgggggtaggggtatagacggtgagtttccagtcttatgttttcacgcctttattgtagaaatgccataagggaagccccgtggtgaccgtggttttaagccttttgtcgtcttcgtaaggagcataccctggtttatctctagaggctcatgaaccatctgtctctgccaggcagcctcatctgtctttttggaggatgcctgagctttggaactgcaaagaaatgtgcctttttatgcctcctgacagtgactcccaggatcctgaaagctatgactgagcgtcagtccgaattcacaaatttcaagcggatccggattgctatggggacctggaacgtgaacggaggaaagcagttccggagcaacgtgctcaggacggcggagctgacagactggctgctcgactcgccccagctctcgggagctaccgactcccagggtgagggcagtgactttgggggagacaaaatccaattgcacctaacctgacatgtcacgcttgaccctttagtggccatcgtcttgtggaatttcatctttggtgtcttccctcctcacaatgtctaaatagcaccatggcctgactctcaagaatgctgcctcgcaagtaactgacctttttcctttcccagatgtttagaagagttagcagatggtgaatctctcttttctctttgcatacagtgatggtgaagtcttaggctttcatcagtagaatcttttcgtcaccagtcggaaggtgtggcttctagggccatgtaactgtgaggttgggagccaagcctgtcttcggtgttttgtttttgttttttgttttgttttgttgttgtttgtttttttgagacaagtttcactcttgtcacccaggctagagtgtagtgacgcaatctcggctcactgcaacctccatctccaaggttcaagcagttatcctgcctcagcctctcgagtagctgggattacaggcgcccaccaccacgcccagctaatttttgtatttttagtagagatggggttttgccatgttggccaggctggtctcgaactcctgacctcaggggatccctctgccacagcctcccaaagtgctgggattacaggcatgcgccaccgcgcctggccctgccttcagtgttgatattgaccaagaacagctcatccctgcctctccccaaaccaactctattaatctgctttaagtagtcacaaaataattcatgtgctatttaggaataaaataattccaaatgttgacacctcaccttttatcttgtaagatacactattgaatggccccagaacttaggatctgaagaataaatgattcttgtccagtcatcgttgactcgggccttggtttttttgtttgtttgttttttgttttgcttccttggactcaggaacttgtggttcaggtttttgcctgttggtgagtgacctgtggtctagctgacatgcagtggcccatgtgtacattcatgccccacagctgcctgggtagtacccagagccccatcccttcctgtgcacacgccatctgtgccctcctttctgcctccaagggcaggtggcagagtccaccattcagagccactggggctctctgtgtcggtggtagcctgggttgctgcttgtggtgcctccagaagccattcaggatgccctccggagcaggcccatcaacgcggagagtgcttagcacagccgtggctcaagagccgtccctccagtccccacgaaagtgactcctcttcttttccctgcaggaaggtgtgcatgtttttagcaagctggctggtattttgcaggggatttttttggggtagacactagcaggctccccagcagtcccactagagatacaccaggttccagagaaggaaaggagtgctgtggttactattgccaagcagatcagacagagggacggggattgttttatttaaaaaaaaaaaaaaaaaaagctttaagtcagggaaactagaggttccaggttgcccattgtggtcaacagagaaggaagtggacagcctgcctggcctctcgctgacagaggccatgtcctcctagctggaccctggggaggtgggcctctcactttctgcagcagctggagccatgactgggcttggtggctcaggagcctgggtgtcagaggtcgtgactggacagattcagtcaatggctacaaggttatattaaattctgacctcccctgttcaaagggaacagaatggacggagggcccctctgggctcactgctgcatttaagccaggcatttctgaagcagattccactggggcagttcccagcagcaatggtagccacctggagttggactcaggcagtggacagcatgactcgggagagggcactggggagccccatgaactcgtaatgcgggacttggcggttctgacttctgtcatctcttgccttgctccccagatgacagcagcccagctgacatatttgctgtggggtttgaagagatggtggaattgagcgcagggaatattgtcaatgccaggtaaggggccaggtgtgcggggccaggcagggacttcctgagtcaggtgcctggctgggagcagagcctctgaggctctccgggagccagcctgcttctgagccagctaagctgtggccctggctgtgtggggatctctcacctggctccttctctatgctcacacatgcaccaccccgttctttccctgccacttaggaagtaaaaggaagggctgatgattgctgtgttttctttgcagtgctctggcctcggccacttgttgaggctaatttatgctgccagagggagctggcatgtgtggacctggggtgcaggggaagggcggggctgggactgggagagtagttgactcatgtttcctggggagaggtgagaaagtgtgagtgccgggaagaggtactttcttcctgcacaccagggcaaaggaaaaaatcaaaaccactggatttttatttgatatgaagtcaactgggcgctccccccaccccctgctgaactggcctggctttattttaaggaactttctgaacaaataaataagactgactctgtggggctgctatgagaaggtcctgggttgggtttcaggggtcaagggagggctgctgtgatgtgtgaggcatagccaaaaacacgcagatcctccagtagaagaaggaaagcatgacactaatattggggtgcgggcagcgtgaaatcagttctgcaaacagaataggcttgggctggagcatttggtaggtgggagatagatgtacttccagctacctgtaaacagcatcctttccttttctcttccagtactaccaacaagaagatgtggggtgaacagcttcagaaagccatctcacgctctcatagatacattctgttgacttcggcacagctggtgggcgtctgtctttatatctttgtacgtccataccatgtcccgttcatcaggtaagaacattctgtttacacacatctggggaacaaggggttgttagtctttgtgttttgttctttgacttccccctcctcccccatccccttctgtaacaggaatcgggacttaccattattttagataaatgtagcaaaaccccctaggaaaaactgggctgaatagaatattgtctagcgattaaaaagccaccatgggaaatgtctaactcaggaagctgaactcttagaaagggtgttacatgattgtcatcgcccaagctcaattccgtgcaaggaaaagggttccttgttggaatcttatagacaggaaacctctgaccaagagctgagtaactcactgggaaatgccaactcttttgtccctttttaaaagaattctaagtagaacgtgtgggcctctacaactgtgacctcattgtcatttctccaaggtgcatgctttgtgagcatcagaaagggggcgagcttaggggcggcattcctcttggggtgtgggtgtgggtgtttggatgctggaggaactcatcttttccccagcttgtggttggcctcatcttaccacctgggcctacccatggcttttgaatttccaccagcctttcggcgagctggcagcaggcgttgaactgacctccccactgagcccctgggtcccgggaagggcctgtgcctgccaagagcaccacgggtacacccctgcagcacctggagactaagactatgctgcccataatcctcttctctgactttcagaagatgtttaggtccctgtccctctgcttgtgttatttgggcagcttggcagtgtcctaggttagcaggtgaaggttagtaaaggttaaaggcaagggcggggtgagggtgagaggtaaagcatttgagaaagggctcagagctgaggagagccaggtttcccaggctcggtgtcctcggcttcacgtgcctttagccctgagctgcttccgcctacaccccttccatcagtcatccccccaaccttgtctgccagcgagcagatgcaccagcaggcctcagtctgtggcatggctgtggaaatgttaacaaatgtgcttgcagcccatgtttctatggactcgtatgcgtcataagtgggcatttgaatgcaagcaggctctggcattgcataaaagtccttttgagaccatctacccagcccagcataaacagctgcccgtttcctagctcttaaagtgcattgattgctgggcacggtgtctcacgcctgtaatcccagcactttgggaggccaaggcaggcagatcacttgaggtgaggagtttgagaccagcctggccaacatggtgaaaccctgcctctactaaaaatacaaaaattagccgggcgtgatggtgggtacctgtaatcccagctactcaggaggctgaggcaggagaattgcttgaacctgggaggccacagttgcagtgagctgagatcacgctgctgcactccagccagggtgacagagcgagactctgtctcaaaataacaataataatttaaaaatgtgttgattgcccagatgacacctcccatgcatggcgtgatggctgcacaggagtggggtgggctggtgggtggtgatgtttgcgccgctcctggtggcagtgagaacctgggcggatgcaggcattgccctgtcttcggcttcatggggtgctcaagtgagcacttcccagttggggtgtgggggagatgtccaggcagcggtgggcagcaggagggaggcggcctcctgaccaggagtcgatgacggccacggtggccactgtgttgagctgatgattttggagcactcagagcagcaggtcccgagctgctgctgggcccttctctgtggcaaagcagggtcacacttctccttcaggagccgacggcatgcgcgtatccttctgttccagggacgtagccatcgacacagtgaagacgggcatggggggcaaggcggggaacaagggcgccgtcggcatccgcttccagttccacagcaccagcttctgcttcatatgtagtcacctgacggccgggcagtcccaggtgaaggagcggaatgaagactacaaggagatcacccagaaactctgcttcccaatggtgagcggcgccgtggggacagccagcacctccctgctcagctcagtcccaaatgtgactgttgataggagccaggcactggggacacaaccacagggagggccccttcctggagggctcagcgctgggggagggggagagggctatgtccctccatggaattgacctggggcagggttagccacgtgcctggagggggccagctttgcagcatttcccgttgctgtacaattcctgagtgtctgcatggccactggatttgtatgtgtgcattttctgattttctaattcaagtgatggtttagggaagaaaaccatgtccgtggtctgtcctgtccaagtggtgaagagcatttgaatccacacagcctaagactccaccttcctgagattcacagtcttcacatgtactttctgtggtggctcagataagcacacccttttgaccaatggaccctttttgactgggaacacggttcttgaccaaggagcccagatcctgcctgtcctcgaagctgcaatagcgaaccgcacactgccctctcgtggcggtccggagggtttcattctgaaactggaggattttcttttcaaatctagacgttaatgttctccttcctgtgcaaagatgctacccgggcacagcttcagcgtgtggtgcacacgaggccacctctttcccgaagtgaggatagacttcagctgttcttgctgcaaaatcttccactgtctgagaggtggtgggttgggtcacagagctcttccctgtgagaacagatccttaaaactgacgtcccattttactgggctgcacgagcactcaaggcaaaatttccttagttttcattaagaagtgccataattcctgttggtgttgtttatttcttatgttaaaaaagaaacaaacgagttgggaaattttcaattgtgtgtaatgcagtttaaaaaaaaaaaaaaagtctaacccttctcacttaaaaatagctactttggggccaggcacagtggctcacacctgtaatcccagcactttgggaggccgaggcgggcagatcacctgaggtcaggagttcgagaccagcctggccaacgtggtgaaaccccacctctactgaaaatacaaaaaaaattagccaggcgtggtggcgtgcacctgtaatcccagctactcaggaggctgagacaggagaatcgcaacccaggaggcagaggttgcagtgagctgagatcgcaccactacactccagcctcggcaacagagcgagactctgtctaaaaaaaaaaaaaaaaaagtgctactttgacatagtaaacttgggatacataataagtaattaaaggatttataatgtagttcttttctaccataaaaatattgagggacctattaacattctacacttcttttttgtttttgttttttgagacagtctcactctgccacccaggctggagtgcagtgacatgatcttggctcactgcaaactccacctcccaggttcaagcaattctcctggctcagcctcctgagtaattgggattacaggcgtgcaccaccaggcccaactagtttttgtatttttagtagagatggggtttcgccatgttggcccagctggtctcgaactcctgacatcaagtgatccgcctgcctcagcctcccaaagtgctgggattacaggtgtgagccatggtgcctggccaacattctacactggtattgtctgataccgtagtcactggccataagtagctatttaaattcaaattaattaaaattaaataacatttaaaattccttgctttccctggccacagtgagaatgatcagtatccatgtggccagtggctcctgcatcagatggcacagagaacatttcggtgctgcagaaagttctgtctgacagtgttatctagacgctcattttatttggttgggacctgtttaatcttctgtccagattattgtcatggggggagtggaaatgcctcatattataggagaagagaagctgattttggagctaggcagatgggagctgaaatcccatctgtatcatgcactagctgtgtaaccttcagcaagtgcctttgtttctgaactttgtttttttttttttaatctaagagagagctggtggtatctgctttgtgcacctggaacagagcccagcccttgcggacagttgatccacagcagctgctgtcattgtcttccccattcctggggaagagacagggaaggcaaggaccccaggagctctccggggctgagctggggccgtgggctcctaggactgggcaggatgggaaggaggagctagagagagatggagaagggtcacctgaaaaagctcaggaagttacatgaaggtgcacatcctgagcatttctgctgctcttttgaaacctcattctcctaacgctgaatgctgggtgctgcttcctaggagtagacactccaaagtaagggtgcatctgatcttcaggacggggatccatggaggaaatgctggccatgttgctctcctccgtttagggtaggagctttcttcaaaccactcagaaacactattatttaaaattaaaaagtaagccatgtaaaaattcctccatagttttatgggatgagtgaaaaacaagatgctctagtagaaaactttcttttttctaagtagcattttgagaaaaatactcctgcttgccccagtgagcttgtttttctcctctctcccaccttccttgcaagatgggctgaatgattatgattttcttttcaacttaggggagaaatgttttttctcatgattatgtattttggtgtggcgatttcaactaccgcattgatcttacttatgaagaagtcttctattttgttaaacgccaagactggaagaaacttctggaatttgatcaactacagctacagaaatcaagtggaaaagtaagttgtgctttaaaaacattttttagcagctgctccaagatggaatgacatctgtgagatgtagaggctggtgcagcaaattcagttccgtgagtggatttcactgtttccaacattgtagaaaataggtgggcttgtgaggttacagtacaggagtggctgttcatacacacttcctgtccttttttttttttttttttttttcctgaggcagagtcttgttcagtcacccaggttggagtgcagtggcactatcttggctcactgcaacctccaccttcctgggttcaagcaattcttgtgcctcagcctcccgagtagctgcgattacaggcgtgtgccgccacacctggctaatttttgtatttttagtagagacgggttttcaccatgttggccaggctggtctcgaactcctggcctcaggtgatctgtgcgcctcagcctcccaaagtgctgggattacaggcatgagccaccatgcccggtcaaccttctcctccttctaatactgttattttagtgcctgtttgcttcctagcaggatgagctgagatgaggggagtacatttaaattccatttagctgtggagaaagaagctggttaaatgtgtgagggccaggtgcggtggctcttgcctgtaatcccaacactttgggaggccgaggcgtgcggatcacctgaggtcaggagttcaagaccagcctggccaacttggtgaaaccccatctctactaaaaatccaaaaattacctgggtatggtggcaggcgcctgtaatcccagctactcaggagactgaggcaggagaatcgcttgaacctgggaggcggaagttgcagtgagccgagatcgcaccactgcactccagcttgggcaacgagcaaaactccgtctcaaaaaaaaaaaaagtgtgaggacagggcagataaggtctctcctgaagcaagatttggacgttcttcgaggtttactgtgtcttcccacttgagccccttccagtgtgtggagtgctaaagggttgccacatggacgagtgaccataccaacctcctaaagcaggttttcctgtcttcctactaccaacattctcacatcctctcagtgatgcccaagagaatgagggtgtgtttgtcccttggtcttcccatggaagcaaggccaatccaaagttaaacaaagaaaagaaggatgtgcatgggggctcacgactgtaaggcgggaggattgcctaagcccaggagtttgagaccagcctgggaaacatagggagactttgtctctacaaaaactaaaattagccaggcatgatggtgcgtgcctgtagtcccagctacttgggaggctgaggcaggaggatcacatgagccccagaggttgaagctgtagggagccgtgattgcaccactgtattccagcctgagcaaaagagcgagaccccagggggagagagagaggagagctgactttcactctgcgcttctatgtacttagctcatttagtcaacaaacatagatgaaggcctcggggttgtgggccagacatggcaccaggcatgggactgtaaagatgagcacccctgacccgtgcctcggaccctgcactgtctcctggggggcaacaagaagacagtggatagatcagacactggagtgggtggggagatagatacgagggcggtgtgtccctcagtgggatgagctgaggatcacttttttgctaattaaaagacacatatgtccagtttcagatagattttcaaatgtaatggagcttctgttactttttaagaatagggacttgccttttcagttttcgtttttgtatataacattcaggatcgaaaactacggtggcctgatgacttctttttctcccaatagatttttaaggactttcacgaaggagccattaactttggacccacctacaagtatgacgttggctcagccgcctacgatacaagcgacaaatgccgcacccccgcctggacagacagggtgctgtggtggaggaagaaacatccctttgataaaacaggtgagggggccgtgcccgttcgagagtcggcagagggtgaataagaaatgcgacggagggagagtcacgtttacccaaccccaggcgctgctacataaatcagtttcttcataaccccagatgacacaaaagtcatcccagaccttaacccctaagctttggaagttgtgctttcagggagcctctgcttctggcctctttttttcccttttcttttcttttttttttttgagacagagtttcactcttgttgcctaggctggagtgcaatggcgtgatcttggctcaccacaacctccacctcctgggttcaagccattctcctgcctcagcctcctgagtgctgggattacaggcatgcaccaccatgcccagctaattttgtatttttagtagagacggggtttctccatgttggtcaggctggtcttgaactcccaacctcaggtgatctgcccacctcggcctcccaaagtgctgggattacaggcataagccactgcgcctggcctcctctggtctctttctagagacagtgacctgcaaataggtctgctcctggctgcccctgcatcacagctcccccccacacccccacctcttttttctgggtggggaaagcggggagcatgaggttgcctccctccctgccccccatgctccccctcatgttctttatccagcctattttgttcagctacacttttacctgcttaaagccctaattccaaattggacacgagcaagacacagtaaaaataagttagtttttaaaaatcattagttgtcaagtatgttttgaacaactgttgatgcccagctaggaagtgaagtttatttaaagttagaatatctgtaactagtacataaaaaaaaaaaaaaaaaaaaaaaaaaaaacctaattacacattttgggagagcatagccaggaaattgcatctgtgaaaagaaaatacaaattttcctctagatgagtttgtgaacgcctgtgtggccccagcgctctgagaggtggggcctagaatgagtccgagtgttctcagctcctgcagctcttaccataccaattgctgccaaccttctgggattcctgggtcctggaaacccggcagcaacactgtgtctcaagcctacagtgggcatgctggcgaggactgcaggcatggtcatgactgttttgaataattatatgcgaggaatgtttttaaccaaaggccccaaagcatccgaagcctggcttcaaggtggaggagtaaggaggatgagtctgggacgtggggtggttcgtggcgcagacctctattgtggaagtgtcatgatcgcattcttggatattgactcgattctatatgggtctctcgaatggaacccctgcgagtagctggagaactcaaccttctagacagtgatctagatgttgacaccaaagtcagacacacctggtctcctggtgccctgcagtattatggtcgtgcggagctacaagcgtctgatcacaggtgaggtcctgacttccatggcgttttctcctgtgctgggcaaggcagcgtctccctctccgcaggaaaatgcatgctgtccccataaggatgtgtgtgcgcatgggggtgcattttgtgtgcatacaatacaccaaagaacaaagaatgatggaacaaatatctgtggacccaccaccaagaactaattaatcttagcattttgtcattgctccatatcataaatgacatcattgatgaaaatttcaaagatgcaacctacgtattttgcggcttttatattttcttaaatgatgtcgttgtgcaacttgcttttttgttactatttttgagatacagtcgtgttgatgttatagctctggtgcattcatttgtaactgctgtctagtatcccactaaatatatccatggaacttacaacttatccattcacctcttgatgaatattttctccaggattttatgattacaaacaccatagggtttttaaatctgggatgcacaaccttttttttttttttttttttgagagagagtcttgctctattgcccaggctggatggagtacagtggtgtgatctcagctcactgcaacctccgcttcccagattcaagcaattctcctgcctcagcctcccaagtagctgggattacaggtgcacaccaccatgcctggctaatttttgtgtttttagtagagacggggtttcaccatgttggccaggctggtcccaaactcctgacctcaggtgatccacccaccttggcctctcaaagtgttgggattacaggcgtgagccaccgcacctggccctaggatgcagggctttttaaatgctctgtgcatcatgcattgaggatagagtggaggcagcagagggagcaccgtgggcaccagcacctgtgccctgggattgctgcagaggaagactcaccctgcagaatgtctttaaagacagaggagaggatggcatttgagggtgtgaagaaggaagagtttgatcttcccaaggctgctgcctaaactctcatgtcagtttcaacttttacaaggaaagaaattaagaaaaagaaggtaagaacagttggtcaacgaaaaaaccttttttttttttttttgagacagagtcctccaggctggagtgcagtggcacaatcttggctcattgcaacctccacccccagggtataagtgattttcatgtctcagcctcccaagtagctgggattacaggcgtgcatcaccatgcccggctgatttttgtatttttagtagaaacggttttgccatgttagccaggctggtctccaactcctggcctccagtgatgtgcccgcctcagcctcccaaagtactgggattacagccaccatgcccagactctttagataattctaaattctttagatacctgttgttgcaaatacatacctagaagtgaatcttgaggaatcttcagatatgtgacatcaaggtttgctagctcaatgtattttgaaaccttaatttaaccaatatttcttgaggggcccttacatgccaggccctgttgctggcctggagaaaagcagtgaacaaaacagatgagaccatgttatcatggaattttctggacaggacaaacagacaataaacaaacatgtgtgctatgaaagaaaaaaagtagtggcaggagtcaggccagagtcgagctattttcaatcaggctgtgtaattttcgtaatataggattttctggaaatttatagagtaataaccatccctgtgtcagaattactataaggattgcattatttcctgctggactgttttcctgtttacatcattgatttttacattattcctaatgattgcgtagggtattatatgaaggtatcataactgtttccccattaagaaacagagcattttggcctggcgcagtggctcacgcctttatcccagcactttgggaggctgaggcaggcggatcacctaaagtcaggagttcaagaccagcctagccaacacagcaaaaccccatctctaccaaaaatacaaaaattagctggtcatggtggcatgcgcctgtaatcccagctacttgggaagctgaggcaggagaatcacttgagcccgggaggcggaggttgcagtgggctgagatcgcgccactgcactccagcctggacaacagagggagactctgactcaaaataaaaaaaaaaaaaaaaacgagcatttccctttttttttttccctcccatcaacaatgctgtaaatgatcaacctcatgcattaaatctttgtctgaatccctggtcatttccttagaataaagtccgagaagtgagattactaggtgaaaagagatgaacaattttggaactctatgtaaagtgccaagtaaccctctgaaaagcttgcacccctggcagagtgcagatgtctgcttccccacctccttggtggtactgaggattaccatgtcaaaaatctttgctgatggctggttattttccaagtactgggatacatctttaaggtgccacactttattttccccctcaaatcatctttagataaaaatgccaaggtgatactaaggttaaggaaagatgaagactaaaacgccagagcagggcagctagcctgcaaatccacctgctggtggccacattcgcaggttgttggtgttgactgtttacaaagagccctgggggacagcagctggggactgggggctggagatgtggacatctgtcccaggctaactggggactggaggccgggggtgtggacatctgtcccaggctaactgtcatccctcttttgttcctaacgcagacctgtgctggcgatcgtggaggtggaagttcaggaagtcgatgtgggtgctcgggagagggttttccaggaagtgtcctccttccagggccccctggatgccactgttgtagtaaaccttcaatcaccgaccttagaagagaaaaacgagtttccagaggacctgcgtactgagctcatgcagaccttggggagttatgggacaattgttcttgtcaggtaactgctcccctggctgatgtgggttccaggggatgtcgatgaggatccgtgagagctgccaggtcgttcttggcattgacttggagtatcatttattccaggatcaaccaagggcagatgctggtaacttttgcagacagtcactcggctctcagtgtcctggacgtggacggtatgaaggtacgctgtacttggccacactgtggagtggggtctgatcaatccctctttttatgtgggcatgtcttcttcctcctcttgccctgacctgtgccttttttttttttttttttttttttttttttctctgagacaaagtcttgctctgtcattcaggctggagtacagtgatgcaatcacagctcgctgcagccttgaactgccaggcttaagcaatcctcccatctcagcctctcaagtagctgggaccgcaggcacgtgccaccacacccagctaattttttttaaattttgtagagagaggatctcactctgtagccccggctggagtgcattgggacagttatggctcactataacctcagcctcctgggctccagtcatcctcccgcctcgatctcccaatgtgttgagattacaggcatgagctttcatgcctggccaccaatctgtctttatgtatagacgccatatgcgggagggagtttggattcttcactctggttctaaggtgtctcatgtccggctctagctacttgcaaaatagggcggaagggtgggcgcagtggcttatgcttgtaatcccagcactttgtcaggccaaggtgggtagatcacccaaggtcaggagatcgagaccagcctggccaacatggcgaaatcctgtctctagtaaaaatacaaaaattagccaggcgctgggtgtggtggcttacgcctgtaatctcagcactttgggaggctgaggcgggcaaatcatgaggtcaggatttcgagaccagcctggccaacatagtgaaaccccgtctccactaaaaatacaaaaattagccaggcatagtggcaggtgcctgtaatcccagctacttgggaggctgaggcaggagaatcacttgaacccaggaggcagaggttgcagtgagccgagatcgcaccattgcactccagcccaggcaacagtgtgagactctgtctccaaaaaaaaaaaaaaaaaaaaaaaaagtagccagacatggtggcgcgtgcctctagtcccagctactcaggaggctgaggcaggagaatcgcttgaacctgggaggcagaggttacagtgagctgagatcgtgccactgcactccagcctgggtgacagcgagaccctgtctcaaaaaaccaaacaaacagaatggggaagaagaatgtcagtcactgtgtctcacgttggaaggcagctctaccagcagctgcagaagcttagccattttagagtgtagttctcgccgagttacttgatctgtctatgctcgcactgccatgtgggagactattccagtctttctctttagagtatgtattttggaatatgcagctcatagatagtttccgtttttatagtatcttggctttaaatctgtaccaaatgggaagctggagatgagagttcaactttttttttttgagatggagtcttgctctgtcacccaggctagagtgcagtggtgcaatctcggctcaccgcagcttccgcctcccgggttcaagcgattctcctgcctcagcctcccgagtagctgggactacaggcactcaccaccacgcccagctaatttttgtatttttagtacagatcgggtttcaccgtgttggtcaggctggtctcaaactcctgacctcaagggatctacctgcttcggcctctcagagtgctgggattacaggtgtgagccaccgcacccagcccagttcaacttttttttcaaccagatgtatgagagctatgctgagcctgcgtgaggtctggacccttggtttttcagggccaaatgtgaagattggcctcgttgagggtgtgtgggttttggtgagaagcattgtgtgatcaacaggaggggtcatgatttttatttattcctgggtggccgctctgccctcccaggtgaaaggcagagcagtgaagattagaccgaagaccaaggactggctgaaaggtttgcgagaggagatcattcggaaacgagacagcatggcccccgtgtctcccactgccaactcctgtttgctggaggaaaactttgacttcacaagtttggactatgagtcagaaggttagtgaccctgcagggagggacaggcaagccgttcttctagcaacaggcctgagcttttaaggacaccttctaaagcctcccttgcagaagtgacggaggacacccgcagggcaagccctctgtcccatgtgatgagcatgtttgtatgtgtggacgatgcatgccatgctacctgggacccgaggcatctaaacttaggctacaaacagtggctatgaggatatcagggctgtgggtgtaccaatggaactggggtaccgtccctgctggcgcctgggccctgagctgcagggcagggtgcacgtgtcctgacaggagctgaaccagtcccactgatggaagactgagcctttccccctcattgttttcacccgaattgtgattcatttccttctcccaggggatattcttgaagacgatgaagactacttggtggatgaattcaatcagcctggagtctcggacagtgaactcgggggagacgacctctctgatgtccccggccccacagcactggctcctcccagcaagtcacctgctctcaccaaaaagaagcagcatccaacgtacaaaggtagcctgacccttcttttctcaggagcctcagcgatggagtcagctcaggacagactttcctttttctcttggcgattgggcactgtgtgatatcaagtatgcaggtcccaggagagacctcaaccaggcaggccaagcgaggggtagggactgagccctgtggaggtagccagctccaacaccctgatttcctctagttagtttatttttttacaataacttgtacccccataacacaccagattcaagataattcttgtttcctctggatattcaaatggccacggttctgaactggttttatatttgtgattatttcccgcccccaacaaaactcttctgattcagccaggcgcagtggctcacacctgtaatcccagcactttgggaggccgagacaggtggatcgcttgaggtcaggagttcaagaccagcctggccaacatggtgaaaccctgtctctactaaaaatattttttaaaaattagcagggcatggtggtgcacatgcctgtaatcccagctactcaggcagctgaagcaggagaatcgcttgagctggggaggcagaggctgcaatgagccgagatcgccccactgcactccagcttgggtgacaaagtgagattccgtctcaaaacaacaacaacaaaaaaacttctgattcaatcccagtagagacataatccatatctatgtcctgagttgctggcgtatggtcacactcatataatatcatattattatacagtcatgtcatacggtcacatcattgtatcattttagacttcagagggcctgaaaggtcacattgattgaaccacacacccctagattaaataatacaactttttttttttttttgagacagggtctcactgtctcccaggctggagtgcagtgatacaatctcagctcactacaacctccacctcccaggctcaagcgatcctcccacctcagcctcccaagtagctgggactacagggttgcaccagcatgcccagataattttttgcattttttgtagagacggggtctcactatgttgtccaagctggtctcaaactcctgggctcaagtgaccctcctacctgggccttccaaagtgctggaattacaggtgtgagccactgcacctggccagtaactgttctgagtaacttttaaagcccactaatgttacgtggctggcaggtcgggtagttcatatttcagtgtcagctacattgatgctgttccattcatagccaggcatgcctctagctgtcaatcactgagccccgagttggaggacagctctaaccagcaggtgcaggagcttagccacgcattgggcccattgagctggggctgagagcagagaacagggctgaaagtggattaaggtacctctcagggagggtactttgccaggagaggtgcgaagacctccagcccctttgaccgtacgctggtccccacactgaccaataacttgcctataccgaaccatcaggagcttttaaacttatggatttttgagccctaccagagagatctggatttggtaggagtggggtgggaccctggaagcctggcgtttcaccaagctttccaggtggtttggacgcacagctaggtttggggacttctgcccaagactgaagcagcagccttcgccggagcatcgcggtggttctgcacgttgctcctgccaggggcttctgcccgggagttgaagtggctggagggatgtgctcttcccataagaaggacctttctctcgggggtggccgtcatgcaggcagcctctggagccagtgcaggtgtgagcacagatagtcctttgcatgaagaaactaatagcgcaacacgggacacgtgggtggctttgctacctggtgggcattgagagggtcttcccttgatgctgtggggtgttcagccattcccatttgtaggagaaatcctgcctttccccagttccagtctccaggacacatggggtggagctgctggatacagggagtggggtgtccgagtcaaagtgaaatggagaggcccatgctttgggggagccctagggctgctgatttgatctgtaaggaagcaggagctgtgcctcctgaaaacccctcagcctcttggaaggtgtgtgcagggcaggtcaagatggcagacccttgggagtggccagccatgggcccacagggtttgggatttgatgagtaagcaggacccctggtcctaggcactggccactgcatgccaggctgctctgctgccagagcagggagaacaccctcagcttcctcagccggtgtgttctagagtgaggaattgaaaacatctgcctgtggttggttgactcttcaggggttgtggtttgcaactgtctcctccactctgcccaagtcttgttatttcacaagaaaacacactttgaaatagctcagtgtctctcaagtctgagaaatacccattatccatggttcactgaatgttccaagcaggcactgggtgccctccccgcccccgcccctcgccggcagacagaggtgcccgtttctggacagagccttcagctgtcctacagcaggtccccctgccacagtcggcctcctgtgctcagatccgtgtctgacacgctcacgtgtggaacagaccattgtactcatgccccgccatgtcctccagatgacgcggacctggtggagctcaagcgggagctggaagccgtcggggagttccgccaccgttctccgagcaggtctctgtcggtccccaaccggcctcggccacctcaacccccgcagagacccccccctccaagtaagactctgcttgctttcagctccctggatgcctgccaggaataaccgcgcgttccctgctactgaaaacacggctccgaatccacttctccccggccttccggtccccacagggcttcctcctccttgggctccgttttgttgtaaatccaggacacgtttgacgtcagggctggttgtgtttctcatggcaaatgaaacagctcctttccaaagctgctgttcaccctggagctgtgctattgcttcaaactgctctcccttggcagcattagaggatgcagaatgggggccgcagccatgggagggacgtgagcttcgcagtcagaagtctctcctcagctgctgcgcagtcctccctctacttatgaggaatctggtaaacccaggtccccgcctggaggtgacctggtcacccctctgcgctccgaggcctcctgttccccgggctcagaacaagttcccccttatcctgggtctaggagcattttcttctggttgttcgaacaatgctttgcccgtccagccctccctgataacctgaaagcaaagctgtgatgtgcttttgatccacttgcattttcccaccactgtttacttctccctccccaaaaatgtgatgatcagacttagatcttcctaagccattacttcagaattgggctcattgtggctgacgtcacggtagtaaccaatggcaagccacaagcccagatataaaaataacccaaaaataaaatgcataagtcatgtattattgtggaaattttagagataactacaaagaagaacaaaattttaaaattcacttgatgacctacgggtcgtagttgttgaaaaaagtcttctttttccagtttcatgtatctgcagcaacatacttctttttttttttttttttttttaacaaaattaatacccattttctctggtcggttgtcttttatttaatgggttatattttctgtgtcattgaatgttctaaaacatgatttgttaatggctgcaagtatattttaacagtttattcccctgctttggaattttttttttttttttttttttttttttttttttttttttttttgagatgggctcattctgtcccccgggctggagtgcagtggtgcgatctcacagctcactgaagccttgacctccccggctcaagcaatcctcctacctcagcctgccaagtagctaggactgcaggcgcataccatcaggcttggctatttttattcatttatttatttattttgtagagacagtttcaccatgttgcccaggctggggtttttgaaatattttttccccacaaaatattttaaaaatctggtcctagcaatagtatttggaaccatttcaaaatcaattggtttttatatcagatctgaatcccccaagatgttaaagtttgcattctagtaatgcttctccagatcatctacatcaataggcacacactggtagaatcaagtgagaaactccatagagagtcaaggaaggcctggctctgtgggtgccctaagtgccgagtgagtattcggacctcaccgtgtctgtggtctgctgggacatccgcctcgtctagtcgggctcctggcagctggctgggaagttgtgccttcactgagattgagactctgccctcgttggtttttacagccggtttaatggtgaaaaagtcggcttcagatgcgtccatctcctccggcacccatggacagtattcaattttgcagacggcaagacttctaccaggagcacctcagcaacctgtgagttcttctgcatacatttcaatcccaagggttttgcccccgggatagtgtgggatctctcttctcagtgaatatatagatttatgtgtctttaaccctctacctgctcaccatctcatctccaaaccccataacccttcctcgcaggttctccatagggcttttaaatggttgtatggagtgttctagaaaaaatcacttttgatgaaaaatcccaaatatccctggtttccatactcatccatttctctctcttcccattcttgcctctgaccttggtgtatgggcagagcattgcttggtagaagggaaaatgggagaaattcaggtcgttatcctgggaaaatgatgatcattctggagtgaagttggttgagagaagaggctaaaaagagatgtaaataatgaagttggggaacacactaggaagactaacagccatagaggattgtggaggtgcctggttccagagggtaccatgagctgctggggaagagagcaggtgaaggcagggaagtagaggggagagaggggaagctgggtgctagggggaaactgctatgaccgggatgcctctggggtgctgggcctggttaagtgcttgtgcggccccagcaggtggaggggtgactggaggccagtgttttacagtagtgaaaataggtcataaaggcaacccacatgctggatgaagaagtagaaaaagcacttttaaggaaggtattttaacaactcagtgggaccatggaaagagtggcctcttattttgctttctggctttcacctggttattgaaaaaaagatagaagatggtctgtccatatgcaaaaatctgtaatcacccggctttgaagaccagggtcatcaggtctaagtagtatggcactcttggaaagagagtgctccaggaaagagaggattgcagggtgtggtggaggctggagtttgtatggtcagcatcgtctggtggagccctgcacagacccacgggtagcagatacgtcccacgaggctgtcctcctgcctctgctgatactctgctcttcctcattctgtcctcaagcccaaggctcggactggaataagtaaaccttataatgtcaagcagatcaaaaccaccaatgcccaggaggcagaagcagcaatccggtgtctcctggaagccagaggaggtaggtgctttcctgggggcaggggaaaaaccaattctccttttctttttatctccctgctaaaagtggtctagaaacgaaaataactctttttattcttctggaggcaatattaaatgaaaacatcctttagcaacattttatataaatctatactaagattgattgtccatttaaaattgtattttcaaaattctgtgtgtatataaaaatcatcccagggctattaagcggcgtctaaaggagagaccgaaaaaaaccaaaatgagtttttaaaaaaggtgaatgctgccggcatgaagtcattctgccagctttataaaacagagacagttatagtgtttgtcctaatttcaggcacaaaatctaccttttaaatcactggcaagtggaaataaagtttttagtgtcaggcagggacctctttcccaccacattattttttgttgctgttacttaaaccatgttagttaccttgggctctcccccacttcattcataatcactggtaatttacacttttagttttggccttggctttgttccagaatctcctagagaggagagtgtgcccttttcttcgtttttttttttgttttttttttttttttttttgagactgagtttcactctgtcagctggactggagtgcagtggctcaatcccaggtcactgcaacctccgcctcccaggttcgagcaaatatcctgcctcagccacctgagtagctgggactacaggcgcgcagccccatgatgagccaatttttgtattttcagtagaaatgtgatttcaccttgttggccaggctggtcttgaactcccaacctcaggtgattcatccaccttggcctcctaaagtgctgggattacaggtgtgagccaccacacctggccgagtgtgccctttaaaaaggtgtaagcaatcaccattgcttaatttgcttttagtcagcatgtttaacttctttggaattctcaaataatatttaagggggcatgagttaaaaggtcgagaactactgttgtagaatgatactgctacaaatgctttctttttttttattttagaaaaataactaaaactaggccgggcgcggtggctcacgcctgtaatcccagcactttgggaggccgaggcgggtggatcacgaggacaggaaatcgagaccatcctggctaacacggtgaaaccccgtctctactaaaaattcaaaaaattagccgggcgtgatggtgggtgactgtagtcccagctactcaggaggctgaggcaggagaatggctgagcccgggaggtggagctcgcagtgagccaagattgcaccactgcactccagcctgggtgacagagcaagactccgtctcaaaaaaagaaaaaagaaagaaagaaaaataactaaaactatggatataacaacccaagtgtccatcagctgataaatggataaacaaaatgtggtccatcaatacaatggaatattgttcagccattaaaaaaaaaaagaatggggctgggtgctgggtgcagtggctcacgcctgtaatcccagcgctttgggaggccgaggcaggcggatcacgaggttaggagatcgagaccatcctggctaacacagtgaaactccatctctactaaaaatacaaaaaaattagccgggcgtggtggcacgtgcctgttagtcccagttactcgggaggctgaggcagaagaatcatttgaactggggaggcagaggttgcagtgagccaagataacgccactgcactccagcctgggtgacagagctagactctgtctcataaaaaaaaaaaaaaaaaagaatgaagtgctgatacatactacttcatgggtggaccttgaagacattatactatgtgaaagaaagaaaaaaaggccacatagtgtaccatcccctttttatgaaatggccacagcaggcaaattcatggggtcagaaagttcttcttgctttccagggactggaaggaggcctgggtggggagtggctgctgtggggcttcttttttgtgtgatgaaaatgttctggagttagatcgtatgatggttgcacaactttgtggatacactaaaaaccaatgaatggtacacttagaaagggtgaatttcacggtatgtgaattatgtcacaataaagctgttaaaaaaaaaaaaactctagagatgtagatgttagtagaggtgtgaaatctacctacagtcccggcttaacactttcttggtcatggccccattgagattttgatgtctttggatcatctaccctgagaaatgtaagtacacatgagactttgcatatgatctcagggtctcactggtccccatccaaactatccacagaccccagatcaccacccctgctaggaaggtgagcatgaaaacctgggactgctgggtgcggtggctcacgcctgtaatcccagcactttgagaggctggggtgggaggactgcttgaatccaggagttcgagacaagtctgggcaacacaatgagaccctctctctacaaaaattttaaaattagctgggcgtggtggttcacaccagtagtcccagctacttgggaggctgaggtaagaagactgcatgagcccaggagttccagcaacatagtgagacctcatctctactaaaaattttaaaaattggctgggcgtggcagtgctcacccgtaatcccagctactcaggaggctgaaatgggagaattgctcgagcctgggaggttgagactgcagtgagccgtgatcatgccgctgcactccggcctgggtggcagagcgagagcccatcttaaaaaagaaaaaagaaaaaaagctgggactgaatctagctgattactcctgaaatacactgaattagtaaatgacacttaggatgtagactgtctaaggacgaaatcatgcagtgaattgccttgtcctttacacttcagccatgtggttttatgtttcaggtgcctccgaagaagccctaagtgccgtggccccaagggaccttgaagcatcctctgaaccagagcccacaccgggggcagccaaaccagagaccccacaggcgcccccactccttccccgtcggcccccacccagagttcctgccatcaagaagccaaccttgagaaggacaggaaaggtaaaagcctggtaacataaaacctcttactcctaagttgctcacatgtctcgatagataagaattgtggcctgtaatcccagcacattgggaagccgaggcaagcggattacgaggtcaggagttcaagaccagcctgaccaacatggtgtgaaaccccgtctctactaaaaatagaaaaattagccgggcgtggtggcgcacgcctgtaatcccagctactcaggaggctgaggcaggagaatcacttgaacccaggaggcagaggttgcagtgagccgaaatcgtgccactgcattccagcctgagcagcagagtgagactccacctcaaaaaaaaaaaaaacaaaaaaaaaaaaacagatttgcgtctcacagataaaaatctagttccctatggacatcctcacgttcatgagtcccagacacaggtgtgtctttggggaaagttttgacaactgcttcttccctcatatcctactgtgtcttggctctggctgagaagaacgaggagtccactgtctggcacattgtcagtgtgacaagaacagcttggaggtattatgcttcctaagtgttttgagtccccaaagggaaccatagtgggatgcttttccccacatgttctggtaccgcccatttgcgtgtggtctgtgttgtgtgcacatggtttcaaggcattaggaaaacagtaaccgattcccagattcgccatgttcacatgctctcgtgcggcctcagcctacgagaggttccacagcttttcttgccacttttcttgcagattgttttttgctctcgctctcaagcttctcagccttgcttactgcttcaaagacatgagtttgtaaggacagtagcagcccaaagactggcatctgtagacacatctggatcttccgtttgatctcagtgttctagtaacggaccctcggtaatcccttcctggtcatcacagcacgatgctgcttcccccctagagagtgtgaggggggcttcggcttcactcttgacagcgcttgctttgtatttcctgggttgctcttctgtcccacattggctcattgccatctgtcccttgtccatgcttccttacaaagtggacctttttcctccgcctcttccctgttcagatgctcctcgacttaaaatggggttacatcccaataaacccatcgtaagttgaaaaatagcgtgtcaaaactgcatctcatacacctaacctagcaaacgtcatggtctcgctgaccttgaacacactcagaacacatacattagcctacggctgggcaaaaaaaaaaaaaaaaaaaaaaaacacccatccaacacagcctattttataataataaaaataaaagatcaaacttcaaaattcaaagtatgctttctacggaacattagcgcttgtgcactagggtgaagtggaaaatcctcagtggaaccattgtaagtcggggaccacctgctttgtcttttcttgtaaaagccaggagcagaaatagattcattttcccaacctgctgcacaggagttaaagttaaaaggctgttggaaaagagactttcttttttcttagtttgttttctaaagaaccaaagaaacactgaaacgccaatgtttaactagtctactgatcaccttttctgaacaaaagcttcattttgcctgtgcagttgttttctttgtgatagatttgaaccagaaccaaggcagtgtcaaggtttccattctttaccaatatttaagtataaaagattcaaggagctgggcgcggtggctcacgcgtgtaatcccagcactttgggaggctgaggcgggtggatcacctgaggtcaggagttcaagaccagcctgaccaacatggtgaaaccccgtctctactacaaaatacaaaaattagccaggcatggtggcaggcgcctgcaatcccagctactcgggaggctgaagcaggagaatcgcttgaacctgggaggcggaggttacagtgagctgagattgcgccattgcactccagcctgggggacagggcgagactccttctcaaaaaaaaaaaaaaaattcaaggagaaagtatatccattagtccttcagttagcttatgttgtaacacaagttacttcaccctagcatgatacagaccatgaatcagcccaggttgcaacttcaaagagtgttttcagagaggtttgctttcaataaaggaagagcatcaccccatttcctaaaggacaaagaaaagtttgtctgattatttactgtggccctggttttaaattttccactcgttttcattggacctgctggtgtgacctgataaatgtgtgtttctcctgtgctttttctttttcttacctggtcacatttctggcaccccacacattctcaaatctcgaatttgctagaatgtcagcttggtctcatctctgttctctgctggccactctgttctctgatcctcagctgcctagttattggcttcttatttacactctttgtcccaccttttctcagcccctgtcaccggaagaacagtttgagcaacagactgtccattttacaatcgggcccccggagacaagcgttgaggcccctcctgtcgtgacagcccctcgagtccctcctgttcccaaaccaagaacatttcagcctgggaaagctgcagagaggccaagccacaggaagccagcatcagacgaagcccctcctggggcaggagcctctgtgccaccacctctggaggcgccgcctcttgtgcccaaggtacccccgaggaggaagaagtcagcccccgcagccttccacctgcaggtcctgcagagcaacagccagcttctccagggcctcacttacaatagcagtgacagcccctctgggcacccacctgccgcgggcaccgtcttcccacaaggggactttctcagcacttcatctgctacaagccccgacagcgatggcaccaaagcgatgaagccagaggcagccccacttcttggtgattatcaggaccccttctggaaccttcttcaccaccctaaactgttgaataacacttggctttctaagagctcagaccctttggactcaggaaccaggagccccaaaagagatcccatagacccagtgtcagctggcgcttcagctgccaaggcagagctgccaccagatcatgaacacaaaaccttaggtcactgggtgacaatcagtgaccaagaaaagaggacagcactgcaggtgtttgacccactggcaaaaacatgactgagcagctttgaaggctgcagtcctatagaatgcataccttcctccctctagacatccctccaccagaagagacatctatttaaaggcacactggccaaaacgtttgtgcatctgtcactctcgtgtagtttacaaaaatcgtgtctcttattcagtaagatggttactcagccaccaaaatatatttcactcaaggcttgtacatctgaagtttgctcttcaaggaatgggaaccttcctgttaaattcggtgtatggattttaagaaaggaatctagccaatgaggtccaagaagttctcacccattgaatttttaaatggctgttcagttcatgttgtacgtgatggagatttgtcttttgttttatttgcattttacagatttggtataacattttggggagccacctgaaggttgatgtataaagtaaggattagagaaagaggtcgttgtgaccattagtagctgtcctggcccacttaaacaaggttacaaaaaatcagagtcggaagcagccaaataggtcaacctaatgactagactgtacattcccatgagccttcatgtttaagtgtgtacatgtgcgttaaccttgatgatgcgtgaatcccgagggagccggtggcatacaccgttagcttaaccttagcttaaactagctgaaggctcctgtgccatgtcttagacattgcatgccctatcaattactataatcctgagccatggtgtgctactgaaaccaatttttatccaccatctagtccttattaaatgaaacctcacggatcctttgttccgcttatattccatgcataccacataaaagcacacagtgcgaaaactcttgctgatacgcgatattgattctcattgttagaatatggagagtgtttcagcctcgtctgtccggctggagcttcgggatggaaagtgctatgtgtccctgcatataagaatcaccaggccagtgtttctgggtttgcttgtctatatgtttgtctatattttttgcctatacatttttcccacgtttccaacagcacttctcacctattcaataactgaaaaagacattaccatagtgctttacatttttaaagtaatgttacaaggtctggaatccatttggagcagataccgtgttttcgctatttaataagaagttcagtagtgaaatcttactgtaccgcctgttgtatctgggagcctcgtacagaggctcgcacagcagtgatcaagtgtcatcccttacgtgactgggggatgtctgtcctaaaagctgactgctaggatagtaaggatcatcttgcctgggctatgccactgtcttgttaccaattagacatctggaatttcataattagttttcattgtcactgtcaagatatattgcagattacttaaatatggccatcaaaacaaaagttacaacacgtatctcttttcatctgaaaactaatacctggaaaaggataaaaaaaaaaaggaatccgtgacccacagagctagacagataagatgcatagttgaccagtcataaaaggcggtgtttaggtgatcaggatgccgttggtggcatttacgtgctttatatgatttttacctctgtaacaaacacaagaaataaacagaatggtccttaacagagtttgggggagagagcaagatgggttccttggagaagctgatttgccaagatgcacatcgctattaacagccagagtcataaatgaaatgaaattgaagaattcattcaaatgctcttttccctataacctcttttctcaccaaaaaggagataaatttgaaaacagataaatgtaacaaccagtcaaagaagcaggggaaaagtaagctcctccaaagttgcttgcagtgctggaaatagatctcatttttaggttttctcttcgttccagataccaaataaatgggacagagaataaaatttttgttaaaatatgtgctcatctcctaagtagctcttcagagtctgaccgtaagtaaaaacacacagaattgtgttgactgggggaggtgaatcacaaaaaagttacgaggagtttaagagttaaatattatttgatcgtggctgtcaaatttagtgaacaacatagattggatttggagttggtagtaggtatggttctcataccagaattctcttaaaaaaaaaaaaaaggacaattggaattgccttatttatttttaaaatcaatgcttactagttggtaggattcccaggtcagcagcagggttgattaaataatcttgacaatgagcagctgccatcttgggggatttcattctgtggttttttaaatgtttcgtctttgatgctaccatccagggcttcttattgtgaccttgtagcctattttgttcctgctgttctctaacatggtgcagttcacgcagactggtttaggtacttcacaactcaccattgtctctctgaccccaagcctagtcccttttacatcaccatcttctcagacttcttgcctattcttaaaatatgttttggttaatgattgaattaggacatcagcttaagcaattcctgtaacggtttaacgttgttgaagttcaaggcacataataaaattctccctgatgtgtgtgtaagtataaacaaagtaatgtatcaaagcgttcactttataatgaagtcatttcattgggaaggaaagctgcaaagattattgggggactagtgattaataaaatcctgtaatatttttgaagtgaaaatttgtactgaaattgtacatgatacctattaaatgtttttgtctttttttaaa

SEQ ID NO: 15846 - DNA, 112141 bp, Homo sapiens
cgaccctcatggccctgagcaaagggctgcggctgctggggcgcctgggggccgagggggactgtagcgtgctgctggaggcgcgcggccgcgacgactgcctgctgttcgaggccggcacggtggccacgctgggtgagtccgggccgggggcagcgacgcccggaggagagggcgcccgcattcgcccagcctcgggaagacgggtacccccccttcccgaggggatcgggcggcgctgggactgccggggcgtaggggtcgcgcgcagaggggtggctgtttgaatgaagtggggctggggactcgagagagcactctggctgggccggtggcgcacggaggccggccgcccctccacggggatctccggcccgcgccgccagaggatatggttgctggatagccggctggggcgctttgcgtattcatgaggatcccggggtgttgacttagccggcctgaccctgtgcctggcgccttttcttttgcacctgttgatgaaaccagtgattgccctttggtttgtgttggcggctccactcctggaggggatggggacaaaagccccaaaacataggctctggagaaaccgctgatggcagctttgtcccacgtaaatacttggtcgagaagcatcggtgctgcaatttatagaacttgtaaacaaatataccatgacctttatgctgtcttagatcctgccaagccagcgaatttcacctatggacttcagaagccttgaaactggcattgtgctatgggctttagtacgtgatctcacttaattctcacaattctactaaaaagctattattatccccattttgcagatgagcaaactgaggcctaaagaggctaagttgcttgccaaggtgacaccatccacctgacttttatgtggctgtttctgtaatgtcattcaatgcgtggcttcctggtatcgctaacctgggtcccttgttttgtgctaaccattataaggaaaacctgggtagcaccaaagcacgtgaaaccaggtctgattgttagacttctaaatgtggacacccgagagtaagctcccaccactaggcgtccagctgtaacagcttgccggtattcctagctaaacaaggtgcagcccggggtcactcgtacttgaggtggtcggcaaatgcagcaggctgctttgtagatgcctctagccttcttttcacatttgtatgcatcgactcccgttcggatgtatgtcttggaaggactatctctcctatttctgattccctaatcatttcattaacatgcatttatccagcttgttctcagtcacttgattactgaaacaatgtctccagtagtctcagcatcaaaagtaggcagtgaattgtagattaagttattttcagattattctaatttgtgctgtcctgaagagtctaagtttggttatttggtgtggccttgaaagaaaaccacagaaatttccattccattttagatgtctacttcataccacatttatcggaagcgaaagagtaatttcatggtacaaaactactgtttcatcaaatagattaagatgtccttcagttggattacggcaacattaagccaagttcatacacattcaagaattctttgaagcagcttagaaaaaagagattttattttttcaaaagtgaagatttaaaaatgattaatgacagtaatgtagtgcatattttccattaggagctgaagtttgggctgagatttacatcacggtggtgattacagtataccagattttagaacagagaatgtaagaaaggaattggctcgtcttcaactcatgtgcagtccacatttgtcatttaacctagcattcatttttcagtagaaaactttaaaaaaaaattttttttttttttgaaacagaggcttcttctgttgcctaggctggcatgcagtggcacagtcacagcccactgcagcctcaacttcccaggctcaagcgatcctcctgcctcagcctcctgagtagctgggactataggcacatgccaccatgcctggctaattttttctctttcttttcttttctttaaatggggtcttactatgttgcccatgctgttctcgaactcctgggctcaggtgatctttccgccttggtctcccaaagcgttgggattacaggcatgaactacttactgcgtctggcctgaaaacttaattttttaaagtctgttttgtttaagtaaaatgaaactatttttaaaaagcagctgtagcatttggtggctttgctggtccagagaatgtttgtaggagagagccttatgttactagaaagttgtttaaaactttcaacatatcctaaatgcatcactattggataaaatggctctgaacttgaaattcccatctgtgttccaaagggctagctagctgttttactttcctttcttggagaaagtgattattttttttcttttttttgagatggagcttcactcttgttgcctgggctgagtgaagtggtgcgatctcggctgactgcaacaccgccacccccacctgggttcaagtgattctcctgcctcagcctccccagtagctaggattacaggcacacgccaccatgcctggctaatttttgtatttttagtagagacggggttgtgccattttggccaggctggtttctaactcctgaccttaggtgatccacctgctttggcctcccaaagtgctaggattacaggcgtgagccaccatgcctgacccgagaaggtgaatttttacaagaaggctgcaatctctacttttgtatgggacaggacacttgtggcagctggcgtagctggtggtctaatcttgacctttcaccctttccttgaagttccgagtcgggggtagcttccttttctcttcagctgtggttttcctgtgatgggtccctcccagttagtaatgagaggctgagagacaagttgtggtaactgcttcgtgggtagtggtctttcccggcccctgagtcattctaacttccatcctgctccgctgcggatgcacatagctgctttcctaggggcgagaggagatgaggggactgggcctgatgaccacaggcgctgccccttcatagcacattttattcctgaaggatcctaactggaaaagtacctctcgccgaaggggctgggtggttccttatcattttcaggcaaggcctggagacaggggcttgaactgggctgtgatttttaggaaaaacggatggtccatgattcgttgattgctggactccttccatctgaacctgtcttcacctgtcttcacctgtcctgctctaaagtgaactcttcacactagggccgtctggcctgctagcaggattgttgaaggaattattccaaattcctgcttctaaaagaattaggttgtgaatctgaatctgtcttttatgtagatcagtgggagcaaaaattccagaggcagaaaagccaaatgtattggcactgatttaaaaggcttttatgaagtctcgggaacctgactggagggtagttggccttctcagcacaggtgggaagccccgtagccggtaccagcatccctggccaacaatccacaattagcaaacagatgttcccttatttgcacatgggacaaaaacctactcctgtctctgtctcttgtaaacttagggaaaagtgcttattgttaatggattttgtgtattttcagagtaagcgacagtgttccaaagttcaaggttctccaacagcccccaggaacggtggcctgagggtgtccctgtgtttacagtgcgggctgtgtgtgagtgaagtcgtgcctcctgccgcccagccgggctttgctgtgaacaggcagcagggagggagggatggggcaggagacttgagagaattaattaagttaattaatgggtgtccctaaattactttgagcttctggggggaaaggttctgtgtaaacaccaggcccccaggttctcccagctgctgttgtgcgaggccacgtctcgagtttagctttgtttgaattggtgagatggccccagggcagagcaggactcagtctgaactgttgcctagatcactttctcaggcattatggccagatttatttggtcacggactggaattttgatctgctagagaggaccacagagaatcaaataagtcaccattttataaatgctcctggacaaagttgaaaccacaggtaggaccaggcaagggttccggggcccctgacgtgggaaactagagcagcgacccgggaccacagtggtctgtctgcctccaggactggtttgcctcctctcctagccggaggctgtctcagcgtagtgtttacaaaatgcaaactgggatggtgtgtgcttctcccgcgggttttgtttgtttgtttgagacggagtctctttgcccagctggagtacaatggcgcaatcttggctcactgcaacccccacctcccaggttcaagggattctcctgcctcagcctcctgagtagctgggactacaggcatgcaccaccacgcccggctaatatttgtatttttagtagagaaagggtttcaccatgttggtcaggctggtctcaaactcctggccccaaatgatccgcccacctcagcctctcaaagtgctggggttacaggcaatgagccaccacgcccggccttccccgtgatttttgtagctcacctgtaagatcgtgatttcaaatcttaccaggctcttgttttggctgtgtggctcaaaaacttggcttttagcctttaattgtgaaaacgttcaaacacaaaagtagagggaaaaatgaatcccctgtctacctgccattcggcattgatagttatcaatatattgccatttttatttcacttgtccctgtattttttatgaaaacgtgaatctcctaaaatttagtttgtttaaagccaggcaagattctaatttgttgggttggcttttttttttttcttgcatttagatatagaagttcaatttttttattttattgtaaattgacaaattattatcgttttttgagatggagtcttgctctgtcgcccagctgggagtgctgtggcacaatcttggctcactgcaacctcttcctcccaggttcaagtgattctctggccttagccttccgagtagctgggactataggcgtgtgctaccatgcccggctaatttttgtatttttagtagagatggcatttcaccatgttggccaggctggtatcgaactcctgacctcaggtgatccacccgcttcggcctcccaaagtgctgggattataggcgtgagccactgtgctaggccaacagattaggatgattatatattatggggtacaaagtgatcatatatgtgtacaatgtggaatgattaaatcaagatgattaacgtagtcatcacctcaaatacttctttgtttatttatttatcttttttgaggtggagtcttgctctctcacccaggctggagtgcagtggcaccgatctcggctcactgtaacctccgcctcccaggttcaagcgattctcctgcctcagcctcctgagtagctgggactacaggcgcgtgccatcacgtccggctaatttttgtatttttagtagagatggggtttcgccgtgttggccaagctggtctcgaactcccgacttcaagtgatccgcccgcctcggcctcccaaagttctgggattacagacatgagccactgcacctgaccacttattgtttgtagggagaacatttgaaatttactctcctagtgatttcaaaatatacattattattaactatagttaccatgctatgcaagttcgaaatttacttggcagatttcgtgtggccagcagcagaaatggtggcatgaactgattctgagacattggccaagacacatttttaaaagcaaagtgaccacttgggaagggtcgaccacagcctggaagaacagggagcgctctgctggtgagctcgggaggacaaggtctgggccctttgacggcactgcctctagccccgggcaagagagggccgagggccatgtccagtggcctctatgctcccctttctggatgacattcctgctgctcaagaccctggagtgtgctaagcacatagtgcagcctgctcagccccctcccagggcctcaggcagactgtgcagccgtatgtccaccccaggcccgggcgttggggtggcaagggcatgttacaggtggaacgggacacacactagctgggactctgtgtgtgtatgcacgaggctccctgcaggggggcatgaagcccaggttgggggaagtcggggaagagaaggtggccaggctggggccgccctccccactggctacataatgaacctggccttccaggtagtcacggtggcatacttttcgaggtaggaggatagaacctattttatttaactgttttactttgttagcttgatttaaaactgaacagctgggcatacaggatgcagcactcatgagtactctggccccagaccctacagatattcaggcagacctgtcctgggcacctgtcccagcccgtgtctctctgctgtgtctctcttctggagcgttcctggggtgctcagggtcccctttgtgctttttggctgctcagtttctgttgctgggctccttcggccttcccactgaggatggggaatatattctgttttctttccacttgaattgtccttaaagccatgggtaaactggttcaggctcagacttgggaatttgatcggagtccctttagcatttctgggcagggcttgttggtgtcgtggccagctgtcctcgaggtgaaaaccaaattgggttgggagggtgcacatgacacttaaagcccccagagctgcggtgccatcaaccacacactgtggacaggaggctgtcagtgggcaggctgggtccaccttcaaagtccatacgaaacagcccagttcagggtactgcttcttttcgagatctcacgggcaggagccttctggcactgttcatgtaaatgtaagtcattctttctttctggaggaaaatttagacaggtgaatgaaaaccggagtgcttaatccgctattctacatgcagaagtttatctcaggaaacagtcccagatcactagcccattttgcttcaaggatgtttattgcaagctgttttgagtttttcactggttaaataaactttggttcaacttgatcataatagctgacatttgtggagtgtttaccacctaccaggtgctgatccaagtggcttacatttattaacttacttcatccttatgtcaaggcaagtactagtaatctccattttacacttggggaaactgaggcacaagaggcctaagaacttgcctgaggctccacctccagtggaaggctccagagaacaatatgttcagtaaaatctcattcttatgtaaaaaaatgaatatatatatatatatatatatatatatatatatatatatggaaaaagactccctttgtcctgttgtctctggcttatcttggttttcatctgacatacacttttgatcgaggaggttcccacttggggaaacagccagcccctttctgagcagagggtgtggcactacaaaggcgaaacatgatctctgggagaaacatgcttgaagcccacgctcctgggggcagagctgagcctccacacggatgtccccagcactgggagcagaggctgatgcggccccaaggtgctgaggaaagcgccccccagtgcaaaggatgctacaaggccccaggcttctcaaggaacatgaggcctggcaaacccagaacgttagactgggtcggctccaagatgcccctgggtttgagctggagaagtgtctgcgggagggtgctggggctcctgcagagcgtgtcttcctgaccctgtgggcttttctggggggggctaggaggctctgccaagttggtggatggaactgtgccttgccctggggggcactgggcaggagccagcctcggagcgtgagtctggtgctgcgccaggaggctagatgccccggccaggtcctgtgggctgcgccgtctgtgcccttggcccgcgaggctggcaggctgccactgcttgtaaagcctcctggttgaaaaggtgactcggagcagcggattcactgggagcctgtcagccacagaggcagcttgtgcttgtgccccaggcccaggccgcaggaggtgggatcaagttccacggctccagtgtgaaggtctgagcttcattctaaggcaggtttttgaggacatggggctctcgggcacctggttgtattcctgcatcctgcattcctgcccactctctcatgccttcttctccttctccttggcgtgccccaagccagccttccatctcagatggagttgtatgtttctagtgagcccacacaccccctgaggacagggcctcacccccgcacgcctgcttcttcatcacagctgctaggaaatgaagatgcatgtccccaggggcctttgaagtaggatgtggtctccctgagcagaactctgactctaaattctctcctggctctggcgttggtgtgggacttgggttgcgggagggggcaggttgttagcggctgctgctcagacccagcggaggaccgggctgctccaggctcccggcaagatgtagcaaaatggccaaatttaaggtgagcacgggctcccgtgcagtttctcacccctgctgctggctgcctgtctgtgaatgctaaggcgaggggtggttctacattgacttcttactgactggtgggagtaacccggaagaggcaaatgacttccttccctttcctcggctctgaacctagaatgttccagtgataccacctccaaactcttcacctgtgtcctttcccacctctctgccctgaggacagggaactaagtggctgctcacggtgggtaaaactgaggcttacaagacaccttgggcaatgggacagccagaccccagccctcagcacctgcctctcccatcccaagccccagtctctttttcagctgcaaagtcaatacctttgctttcagagagggagcatgtgccacgccaggagaggctttgggtgtatcacagatggagactgcctagcttaactgcgcagtctgaatgattctaaggaggggaagagagaacgcctctggagcctggcacacacatttgccggagaaagtggtgagtgcgttgtgaccaggtgagggacgaaccttaaggagattggctgagaacacctcccctcctcaccctaagtcaacaaacccgggacagcagtgcttccaaaaccttacttgttcacctcacctggagattcttgtggcaaatcgggttctgcctcgttggctctggggtgggccttgagagcctgccgttctaacaagctcccaggtgatgctgatccacgaccagctttgagtaccaggatctcgcatcagcttgggagggaggagacctgaatcctagccctggctccttaggctcttctttccagtgggggaatttagttaattgctccgggccccaatatcttaatctgaaaacaaatgaatgacaacctagttgcctttcctactctgagattccatgcgtcttaaaagaaaaaagttttaaaactaaacatgtcactgtcaccatcgctacttcacacacctaaagttataaaccactcagaaatgcaaatcttaggagatgtgatctggcaaggcaaaatcgaagatggctttgaggtctcagctaaacctagaaatctgatgctctgcattttttatgggatgcttatgaattaatgaaaatacatgagattatctctccttgagtctaccctttcctacaaccagcaaaaacttataaaaagcaattgaagcttactttgggaatgccaagggattgattaaaatatggactgtgctgattccatggctggtttagcagattcttgttaaaagccatgactttttaaaatttttatttttttgtgggtacatagtaggtatatatatttatgggatacatgagatattttgatacaggcatgtaatatgtaataaccacatcatggaaaatggggcatccatcccctcacacatttatcttttgtgttacaaaccaattatactcttttagttattttaaaatgtacagttaaattatatagtcaccatgttgtgctatcaagtaccagttcttattcattccttttatttttatttgttttactcattaaccatccccacctcctccctagacccccgccgctacccttcctagcctctggtaaccatccttctattctctatgtccatgaattcaattttgatttttagatcccacaaataagtgagaatatgcaatgtttgtctttctgtgcctggcttgtttcttttttttttttttttttttttccttttttttgagacagagtcttgctctgtcacacaggctatagtgcagtggtgcgatctcggctcactgcaacctccgccttctgggttcaacctcccaagtagctgggattacaggcacccaccaccacacccagctaatttttgtatttttagtagagacagggtttcaccatgttgtccaggctggtctcgaactcctgacctctggtgatccacccgcctcggcctcccaaagtgctgggattacaggtgtgagcaggtgtgagcaactgcactcggctggctggcttgtttcacttaacataatgacctccagttccatccatgttgttgcagataacaggatctcattcttttttatggataaatagtactccactgtgtatatgtaccacattttctttatccattcatctgttggtggacactgaagttgcttccaaatcttggctattgtgaacagtgctgcaactaacatgggagtgcagacatctgtttgatatactgatttcctttcttttgggtagatacccagcagtgggattgctggatcatatgatagctctacttttagttttttgaggaacctccaaactgttctccatagtggttgtacgcatatagtacatatagtacataacatatataacatatgtatactacataacgtatatatagtatataacatatatagtggttgtactaatttacattcccaccaactgtgtacaagggtttccttttctccacatccttgccagcatttgttattgcctgacttttggatgtaagccattgtaattggggtaagatgatctctcagtgtagttttgatttgcctttttctgacgatcagtgatgttgggcaccttttcatatgcctgtttaccatttgtatttcttcttttgagaaatgtacattcaaatcttttgctcattttttggatcggattattagatttttttcctgtagaattgtttgagctccttatatattctggttattagtcccttgtcagatgagtagtttgcaaatatttcctcccattctgtgggctgtctcttcactttgttgattgtttcctttgctgtgcaaaagctttttaacttaatatgatctcttttgttcatttttgctttggttgcctgtgcttgtggggtattgctcaatacatttttgcccaggtcaatgtcctggaggtctttcccaatgttttactgtagtagcttcatagtttgagggccatggcattcttaaaaacataactttcattcttgcatagctttttttttttttttttttttttttaagtaacctggactgtcatttggctagggaggcgggagtttgtgtgtctggaaatgtgtgggtttttttttttttttttttttttttttttttttttgggacggagtctcgctctgtctcccaggctagagggcagtgcagctacctcggctcactgcaagctccgcctccctggttcacaccattctcctgcctcagcctcccgagtagctgggactacaggcgcccgccaccacccctggctaattttttgtattttttagtagagacggggtttcaccatgttagtcaggatggtctcgatctcctgacctcttgatccacctgcctcggacttcaaaagtgctgggattacattacaggtgtgagccaccacacccagccagtgtgtggtcttttttatctgtctgtttaaactgtctgttttatatgttgcatgaaccccgctttaccatgaatcttatcaatgactgataaatattgtctattggaaacattctctttaagaggaggtgaccgttctctgcagctcctgctgattcagcaaagctgaggtcaggtggagccagctgggcagagatgagtgattagaaggctgtcattggcagtgacagtccacgtgctccagggcagaacagtgacactggctgtcacagtctgtttcaacaatggaggttgtttgtttttatttaaatgatgtgaataaagaaaggaatctttgaaaactaaggctggagctgcccaggcctgagccaggcccttgtaacaaggcccttctgggtgggggatctacctctcttttcacctggaccacctggcggtgggtggcgagctcagaaccacagctgggtggaaaatgggagggccagcagcgagctgcaggaatggaattccatgatggcatctcatgtctccagagtggacagacagaagcttgtgttttcatttcaaagggcatctgccacgccctccaggcagaccacataaatggcatttttgggtgaggcctgagggattctgtctggtggtatacactgattttaaccagaagcaatagatttgggctctttttgacaggggaagatagatgagagatgatttccatgaggatgttgaaaatattggcaattctgaagaccccagggagtcccagggggttcctggccaggagcgcccctccattgccctgcaccaccttgctttccaggctgtggctctgtgtgtctgaatctacggcatgggggcacttccttctaattcacagaagaagctatatgggccccagactgcccatcctgctaaaactggcaaaggccttttcccagcctgagcagtagtgattcagccaactgcagaagtggtatttggagctcacccttaaaacataaagcaagttatgttcagactatatacaggcaatgagaaaatatgatgaaatatgactgcgtatgaatagccccagacttctagggcctttgagtgtgtctgtcttgggcaacatcttctccttttagatttcaggctcagtttactgtcaggaaaattaagttgctgagagcgtctcagaattttggcttaaaagagaatatacacctggaacaaagacttgaggggtgctcctattaaaaaaaacaaacagtgtgtgagcttcaaaggagcaccttgaaactccagttccatcacatccactctgctgggccctcctagggcagctctctgtcttgtgcctgccttctcttctgaacactcctaaggtattttgagtgcggaggataggatcatacactcaggaaagccgagagctagatcctgaagcatctgtgcgggaaatgcccatctgtgcctgaaatgagcatctgcgagtgaagtgatcccatgtctgggatctgtttggcatgcgccaggagacagacggacacatgcatgcacacacacacacagcggggacggggagttggtgaaataagagtgggaaaatgttgacacctccgtgagccgggtgacaagctgcttggtggttcactagacagggagttataaattggccgcttttcaacatcgacagataaaaatcaatagccttcccataatgccatcattaatcaattagagtctgtaatgggaaaagcagatgccactcccccacagtttctgggaataaacaaagtgtataaggcctaaaagaagaaagctatagaacttgactgaagcccacatctgtggaaaggcatactatgttcttggagtgggaacatcaacactatagagatggcagttcctctccagttaatctggaagtgcaagtatcgatgagtaaatccaattaaattccaacaagagcctggtctaaaatgtaacaggctgattttacagtatcgctggactccccctacatccaaacttattcttaccttcattctcccattttggttaatggcagcaccatccaggcaactgctggtaataaaagcctgtgagtcattctgacgccccttccttcctcagcctcatccaacctaccagccagtagtgaatcccaccccaaaacagatggtgaatcccaccgagtcccccggtcatcgctgctacatcgagagtgcagccactgccccatgtgctttcctggtctgcttggcagcctttgaactagtctcctggctcttcccctgctccccgtatagggatctgcttgaagctcacacagccctgatcctctgcccctgcctctttctccaccctcatctcccaccatttcctgggctcactgcattcagcagcctgacttgttcctgctcagaatcttcacacccacctgcatgcactccctcccccaggtgatatggtttggatctatgtccccacccgaagtcatgttgaaatgtgatccccagtgctggagatggggcccagtgggaggtgattgggccatggtggtggtttctcatgaatggtcagcaccatcccccctggggttatcattgaaacagtgagttgccacaagatctgattgtttaaaagtgtgtggcacccaccccaccctcttggtcctgctcctgccatgtaagttgcctattcccactttgccttccaccatgagtaaaagctccccgaggcctcccaagaagcagatgctgccatgcttcccgtatagcctacagatccatgagccaattaaatctcttttctttataaattacccagtctcaggcatttctttatagcagtgcgagaacagactagtacaccaagggttggcctggctgctgctgcctccgtctccccacctaccccacccccccccacccagcttcgtgactgcagtaagaccttcctgacctctgtggctggaataccctgcagcccccacacaccaactgtctctgccccatgcctggtttcctttcttcttggcgcttatcactgaaattaccttatgtgtgtgcttacgtgggtgtcttctgttgtccactgcaaaaatgcattgtgggttgaattgtgtgccccagaaaaatacattgctgtcctaacccgggataccttgcaatcttatttggaaatagggtctttgcagatgcaatgaagatgtaagttaagatgggatcgtactggtatagggtgggcctttaatccaatgtgactggcgtgcttataagaagaaaagggacacaggcagacgcacgcagaggggagaatgtcatgtgaaggcatacagggaagacagccatatgacaatggaggcagagatgggagtgacactgccgcaagacaaggaatgcctgggctaccggaagctgggaaaagcaagggaagatgctcctacccacgccttgatcttggatttctggcctccagaactgtgagacaataaatttgctgttgtttcaagccccccgttctgtggttctttgttacagcaacccaggcaactaatacaggggcattgtgtatctcgttcagtaccttaccttaacactgcctcgtgtggaaatgaggcttggcaaacactgttgaatgacgaagcattggcaaaaaaaatagccaagattttgaaaaggatccacaaaggcagactgatttaccaggtagcacaacatattataaagccctaaccatcgtggaggctgtcagcacaaatcaacacagtagagtggaaggctcagaacagacttgtgtgagcagtgttactttgtttcttataaaggtgatgacttcagtcggtcagagaaaggtaagggtggatactcagcacctgctgttggtgtggttgatcagtgcagtgcctaagaggcccctgctctattcaactggatattcacgcaggcattcttggccggtctgctcagagaggaataggctggaaaccttggctggccagcaggatgctgcctgctgctctgcttccaggggagcgaggggtcttcctggcagtttttgcaggtggctgcacacacaggtgtccttctggtcactagctcctcccccagctgaaagccctgggtccccaaggagccagaatcccttataaaattaccagccttacagagccctgggttcacacaggggacattccatgttacaagagttaccacacctaaggaagccccatgcctggcttcttcaccgagtggttataattcacttatgggtcttccctgtccagaggcaatttgccaatcaaggtcatttttaccatgagcaatgttgtctagtaacagagttgacgttccatcttgattggggttcccagggaaccagagctagataattaaacattaaattctcatacagaagggaagaaagattttgctaagcctgtgaccaaaactatccatatggacactaagtgagagtcctatgttttatcatacattaaaataaatgcagaggtatttaagtgtaaaaaaacaactttcaaagtattagaaaatataggctatgctttcacagtgttacggcatggaaagatgttctaaggaaagcatcaaactcagaagtcataaaggaaataaacctgacagatatgggaaatatttttattgaagtgtaacatacatagagaaaaatgaacactcgaagcgttgagctccatgaatcttcacccggtgaacacacccacatagccagcacgcagatctggagagagaacgtttgcatcccaggcccctgcctcccattccccctgtgtccgaatgatagatttgactacataaaaatggaaaactccaatatatcaaaagacaccataaacgtagtgaaaagacaagcaacagcccagaaggaaagtttgtgcagccttttgtaacatagaaaaaggccaaagatggatgatcatagcatataaaagaactcctatagatcatgaagaaggaaggacaaatagttcaacagagaaattggcaaaggatataatgagcaattctccaaaggaaaaatacaaatggccaaaacaatggagccagtgtggccggctctgcccagcacggccatttgcacatggtcactgttgggtgggtgagggctgcttgccccgtctccagccccactctcttgccatctccccctgtgattcaggcatggagctcaggccccaggtggcaggcagcgcactctgctcagttaccccagctcctggcttcatggccatgccctggcacctgtctccctccccttagcctgctgacctttttcccatgggatgtttggttgtctctgtacaggctctgagccagccctatgggcttccagacaagcccagattgagcctgccctctagggagcacccctgtgtagcttccagctgagaccttgagacacaggcccagggagccaagctcagggctgcgaacatccaggtggggctcaggtgctagaggcggacaacagcctggtgcaggacccagagtggcaagaggtagtaagggggccatggtgttcagaaattggggcaggtggtgggtaaggcatcctgcttctaaaggccagggtttgggagggcaaggaagcccctggcaggagtcagggcaggcatcccgggcaggtagtgtttgttctgtgaagcaggcttccccaaggaggggccctagagcagaaagctgtgatgtgcaggtgactgggagacctgttctctttcgagccgtgcagctccggttagtggatgacagatttcaagccctgctcaggccagtgtttttcacacatgtttgacctttggttgacagcacacagcacaacagcttatggtccaggagtgcacctcggcatgcagtttgggaatcctggcgatgatgtgattaagattctggggccaggttctcaccaagccaaaaggctttttttttttttttttttttttttttttttttttttttgaggcaggagctaattctaggtacagaaaaccattggtaaagtggaggaagctgtttccagatccacggaatgacggtaactagcgtcacttgagaaggtttcttctgcccttttgtaaaaaatagcatgatgttttctcctagagacagacagggcctctgtacgtaagagcagacatgtatggagaaggccggagagtcacaaaccatatgtgcctgagatgtgccacctgtggggctgtgaataaggaagcagaatcagtgtgtttactcagagctggatttggctgtttgttccttcatctttcttggaccacatgtcctggtgttcagaggctcctgagagcctggggctcagtaggccgtctcatagcccctctaacccaggtgagaaaacaggtcccagtgggtccctaacccatgctcattttctcaccaaacaacaacaaataaatcagaaagtcctgaaaaatgaattctggcctgttttctggattctggattgaaatatggagtaggagctgacttttagtaagttgatcaactctccccgccgaccccctagccttctggaactgtcttcagtaaacacaacccccgccacccctgacctacccgcaccgcactgtggtcggcctcttctttgaacacttcccttacagcacgcactccccccaagctgggccttctcttgagaccactctgctgtccttgggagtgatggtggaggcggggtagacaccctgtccctgtctcgtggtgctcctttgggccacagctcctcttccctccgtaggaggaaccatctggaatccatcttcctccttgaccacacctctccattcattaaggagcagagttccctgctcactgggtctctctacccctcctctgtccctgtctgggtgaggtcacagagagcctcacccgcctgctctgttggcctctcacttgccgtcctctctgccccgttccctctcctgcacacctgtccgcggtatccccagctcttagtgactctagccctctcccgccctcctctgcaccctgcatgcacttgtgttgctgaatgtggccggagaaaaacacagccatcttgactgttctgtgagacttcatagatttccagggctgtgtggaatcaaaaaatcttcctgcatttccccagccatctggcctccaggatgactatttcacatctcctcaagcctttcacatctcatccccctcacacctgatgattttgcttcctatttcactgggaaaatgaaggtaactgagaactttcttttttttttttttttttttttgagatggagcctggctcttgttccccaggctggagtgcaatggcacgatctcggctcactgcaacctccacctcccgggttcaagcgatttctcctgcctcagcctcccaagtagctgggactacaggcgcccgccaccacgcccggctaattgtcttgtatttttagtagggacggggtttcatcatgttggccaggctggtctcgatcttctgacctcgtgagccgcccacctcggcctcccaaagtgctgggattacaggcatgagccaccgcgcccagccaaaggtagctaagaactttcaacagcccccacacctactccctggctctggtacagtggacagcctcccaggcttgtcccccctcccagtgaccttgacccctctcatcttttaagacctcgctcccgcagtttccccctttccttcctaactcggtcatttgcaccattataccaacaggctgtcttagctcacattaagaaaccctctcttgaccctggcctccacctcatctcttggttttcccatgtgacgaggttgtctacacaccttccctcttcccagtctcccttgaagtgactccagccaggctgtgtcctcccactcttctgaaacctttcctcaaggcctccaggaccttctggctgctcagtcttccatccaacagcatcccacagatgaagcattttcttcgcttggcttgtcttacgctctgttctcatcatattgcttcctcactgcctgtttttctccagagcctagaaccatgcctggcacacagtgggcatctagaccctttgctgagtggtgaaattgaagtgtgacagggtgcgtggcttccctgctcaggctccctcagttcccaaagctgtgctccttcctggatctcatgtagcacaaggaggcatacgtgggtcgcaccacatggcttctagaggagtatgtgtgaatgtgttcatgttcatgtggaaatagggaggcggccctgaggtgggaggagccttcccaagaggaatcacctgagagaggaagaagagctggggaggaactgaggaactggtttggcaggttcaggaagaagtgagtgaagaaactggaaaagtagccaggatcagaacctgcagccgcaggacctaatttgttaggacctaaattaggggtgattgtgcaaggcagtgcagcatggaagccccactccaggacttccctggtggctaggaaacattgctccacccctccctcttgtcaaaagagaaggtgcacacacttggagagaaatgggtatttttgtgcttctttcttgttccctgttgggtaggagggttggggctaccaggcccagtgaaaacacagcccagccctgcctgttctgcctcatcctgaagtgtaaggaactgcccattgtgctgggccctgtcactggctctgcccgaggcatatgtggcactgggcctggctttttaaggtgcaaactgttttcctggatttcttatttttaagggaaaaaactcaactacaaagactcagtggccagtcctgtgctcaagccctcttgttaggggagctggcctccctctttggccacagctcagtgcagggaggggtgtggaaagtgctgggaaagggggaggacccaccctccccacagatgggtttctggctctgactgcgggaaaccaaactttcttgtattttctctggctgggttgtgatgtgggcatggcgttggtgggaggtagtgcatttgctgagggtgatgtgttctgagtgtcccctcactccgtggctctttcatgtggcctggactttttggtgagggagcagcagtgggaggacaggagagtcctttagcgggctgatgtgtgtctgccagttggctttgtcttggctcgcagcttctgtttcagacagatgttttgatccccctttgcttagcaaccagctgcagccttgctctgtcttgggaaaaccactgtctttctgaagagctgcttcagctccaaaactgataactctggaaggagcagccaccagccagtcagaactgagctccgaattaacacatgaaggagactttggcctcttgagaccctgaaatacaagaagatggtttcatgtcatgtccaagaatgtggccacaaatgctacctcagtctcgggctgtctgcattgttaaatgacctcattatttttctgacctgtgggccgggcttcgttggcatttccttaaggcgtgttattgtggaaaatattattcaagaaagaagagcatgtggtttgcttggttactgagctggactggctctgggtgaccagagctctcacgcagagccgtgcacggctgctcccactgagaccagcctctgcctcgggatggtctgacccacggagctctgttttgggacccagaatccatgagccacatttgctgtgctgtgggacaaaccacagtttccttgggagcctctcaagtggtggctgtttctcttccacacccttggaccactggagctggagacggggagttccccagcctcctccaaggataagcctattccttaagcctccacaagccccatcattatttatttttatcataagccatgttgttcgagtagcatagacaactttctcaggttaccagggaaacaggactagaaagtcaacccacgatcaaattaccttgccgaaagggaaccagctcagttaacccttgaccccacacgccattgtcagaggcgtatgaaccagagcgactccatcttgaataggggctgggtcaaatggatctgagacctgctgggctgcattcccaggaggttaggcattcttagccacaggatgagataagaggtcagcacaagatacaggtcataaaggccttactgctaaaacaggttgtggtacagaagccggccaaaacccaccaaaaccaagatggcaatgaaagtgacgtctggccatactcactgctcattatatgctaattataatgtattagcatgctaagagacactcgcaccagcaccatgacagtttacaaatgccatggcaaaatcaggaagttaccctatatcctctaaaaaggggaagaaccctcagttcctgggaattgcctacccctttcccagaaatgaataatccaccccttatttagcatataatccagaaataatcataaaaatgggcaaccagcagctcatactgctgccctgcctatagagtagccattcttttattcctttactttcctaataaacttgctttcacttcatggacttgctctgaattctctcttgcatgagatctaagaactctctctcggggtctggatcgggacccctttccagtaacaccacgagactgcgtccctcactgcccctcgtttcggcagttgcatggttccttggtgagttttccctctttctcgctgtcatttctcactatgagtctggcgcttgttcttggtgtcttcagtggccacgtcgttgatccttcggaggaccttcgccccctctcctccagtgagtgaccccacccctgcagccactcgctcccatgccacgcccctgacccctccagcatctgtctcaaacatcccactcttctttctccactttcaccttgtcactcatcctgcaattcccagtcccagtgactattttttttttttttttttgagacagtcttgctctgtcgcccaggctggagtgcagtggcgcgatctcggctcactgcaagctccgcctcccaggttcacgccattctcctgcctcagcctccctagtagctgggactacaggtgcccgcaacgacgcccggctaattttttgtatttttaatagagatggggtttcaccatgttagccaggatggtctcaatctcctgacctcgtgatccacccaccttggccttccaaagtgctgggattagaggcgtgagccaccacgcccggcccccagtgatctttgaccccactgggatggcgacccttagaacccatggccttctcatagcccctcgtctgtctcacaccttccctctttgccatgtcagtgaccagccctgccttgcactcaccctccccacccgcccttctcttgctgggtcctccccacctggtgaaacctcagccctggttacatcctgcactccacgcctgcaccagccgctgtgcagtagaagtttctggagatgccccactaccacacgggcagagcgtaccatcaggtcacaacccctgagccaaggtgggcctttcacttgcgtttctgtgctctgtccactcccccaccctcccagatggcaactccaccctcccctttcctcagctctgctgtgcctcctccccatcctcactttcagctgatggcctcgtcctctcattccaccccaaaatttgaagccactggaagagaattcccgctggctccctgcaccaccactacccgcccaccatgtctgtcccccttcccacctgctccccgcagtgcactgtctacgtttcaggccagtgctacctgtgtgcagatgcccatggcctgctccagggcatggctttcggagctccctgctcctgccacatccgtcctgacctctctcttggctgcattggtcctgacctctctctcagctgcatcaatcctcgcctctctcctggctcatttctgccagcacaaaacttggtataaatgcccctggcctaaggaaatcttttgacccactttcctctccagcagcctctccatttctctgcttgccacacgcacacatgcacatatgcacacgcacacacatgcgcacacacgtatgcacacacgcacgatccatgcacacaatgcatgcacacacaggaaattcctcagagaatcatctgttgccactgtgtccattttctctctccctccccattcaggtttttgcccctcaactttactgaaactgttcctctctgagctgccaaagtctgactaaagtgacaaattctcagtcctcaaattatagatgcagaagcagcctctgacctgctgactgctcttgcttccttgaaacgctttcttctcctggccgccaggatgccacgcactgctgggttttcttgtatcttcttggtcacttctcagtccaccctgaccttcaaacatgctgcacccagaagtcggtgccctccactcactccctaggggatcccctccaacctcatgattattttattttattgctgggattacaggtgcacgccacactcccagctaatttttgttgttgtttgagacggagtctcactctgtcgccctggctggagtgcagtggtgcgatctcggctcactgcaaccttcgcctcctgggttcaagtgattctcctgcctcagcctcccaagtagctgtgattacaggcgcatgccaccacacccagctaaattttgtatttttagtggaggtggggtttcaccatgctggccaggctggtctcgaactcctaaacctcaggtgatgcactcacctcagcctcccaaagtgctgggattacaggcatgagccatggcaccgatctgtttatttttgagacagtgtctcactctgtcaaccaggctggattgcagtggcgcaatcatggctaactgcagcctccacctcccaggttcagatgatcctctcacctcagcctcccaagaagctgagaccacaagtgtgcacaccttgcccgactaatattttttattatatttttagagatggagtctccctatgttgtccaggttgttctcgaactcctgagctcaagtgatcctcccatctcagcctcccaaagtgctgggattagaggcaggagcccccacacccggccccatgattgtaaataactctgtctgctgggacgcctgggggatctttccaaccagatttctctgctggactccagacttgcagagctctgtcgtcagcctccacgcagggctgcaacagagccacggcatgtctggtcccagcagatgctctgcccagacctgtcctctcactctttgctgtcacgccagggccactccatcccttccattgttcaggcaatgaacatggcatcatccttgaaccctgtctttctctcatatcccataaccaatctgtccatggttccaccttcaaaatatacccagatatgtgatgatgttgaggaattgctggtaacttttttagatgtgataatggtattgtggttgtgttttgtttttgtttttgttttagacggagtttcgctcttgtcacgcaggctggagtgcagtggcgtgaccatggctccctgcaacctccgcctcccaggtttaagcaattttcctgcctcagcctcctgagtagctggagttacaggcatgcaccacctcacctggctaatttttatatttttagtagagactaaaaacagggtagtggtgtgatcacagctcactgtagtcttgacctcttgggctcaagcaatcctcctgtctcagcctcccaaatagctgggaccacaggctcccaccaccacgcctggctaatttctttaaaaatttttatagggatggagtctcactgtgttgcccagtcttgtcttgaactcctgggctcaaccagtcctcctgccctagcctcctaaagtgctgggattacagggagggagataccatgcctagctagtttcatttgttatctgcctggtgtgtgtagacatctgctttgtcacctccattgtggagagcaacatggggtttcaccatgttggccaggctggtcttgaactcctgacctcaggtgatccattccccttggcctcccaaagtgctgggattacaggcatgagccaccacgtctggccatggttgtgttttttaaaagagctcttatcttttccagagtcttactgaaatatttacagatgaaataatgtgatgcctggaatttactcacaataacctagggcagtgcttctcaagctttggcatgcattcaagtcccctggagggctcattaaaacagctttctaggtcttgagcccagagcttctgattcacaaggcctggggtgggccccgtaacttgtatttctaatgcttggtgctgctggtgtgaggagcccattttgagttgagctgatctaaggtataggagagtgagtagcctgggcgtgggctgggagaaggtggagttggtgggtacgtggtaatgaaggtacaagggtttattatgtcaccctacttttctttggaaagttccgcaactaaaaagcacgtgtgtatgtgtgtctgtctgtctgtctgtctccagaactcttcagctcttccattgctgcgccctggctcaggctagagtcctctcttgcccaggtggcgctagcacctcctaactggtctccttccttctctccttgttcctctagagtcagttctcaacagagcagccaggatgatccccagacccctgcagtggcattcagagtgacacccaaaacctttctgtgacctcaaacttctgtgcagtgtgttccccacgccacttcctccatgaaccttcagtcacactgcccgcctcgctggggcttgcactggtcaggagtgcttctgccgcaggacctttgcacgtgcccttctgggcctacagtgctcctccactctccatgcagccatctccctggcttccttcaggtccgcattcagatgtcacccttgcaatgaggccttctcagacaacaccatctaaaatgtcacttccccttccccactattcataccctactccctgctcactttttctgctccgcgcctgtcactgtctatattgcactgattgatcttatctatcctggcaggaagcttgagcagcgcccgcctcttcctggctgtgcctcggcagtgcccccaccccagcctcccaccccatcttggtctgcaccccctgccatcactcatccattcattcctcctgttcctcttggccactgccaaatgctggatggtttccatctgtttggttcactgcagtgtctctgtccctggaagggtgccagccacagaaggcacgaagatgtgtccacagagccggcggctaaaaatctggcaagaggagtcgaggaagggggctgaggaggtagaagggagggctttcctcaaaaggccagaaattcgtggccagccaaaggggaagcaaagacattctcgtgtaggaaaacttacaggaaatgcaactaaaagcgtgggagacaggaagtctgtgtatttctgagattatcaagaaaggggggatggaagttgcaaatgggcaggccaaattcagtctgcagaggtgtgcttccagcccacgcagtgcttaaaataaatggagatggttgccagcactggaaggtctggagtgccctgtctcctggaaacactgcagcctggcaccactgggctggtgagcatgactggcacctgcagcagctgcccaccagctaatggcaggtgtgtgttctctgctcacccaaagcccttccagcagcttcattttgttgttgttgtttatttgtttttgagacagggtagtggtacaatcacagctcactgcagtcttgacctcctgggctcaagcaatcctgctatctcagcctcccaagtagctgggaccacaggttcccaccaccatgcctggttactttttaaaagaatttttgtagggatggagtctccctgtgttgcccaggctggtcttgaactcctgggctgaagcaatcctcctgccttggcctcccaaagtgctaggattacaggtgcgagccaccatgcctggctagcttcatttgctaccttcctggtgtgtgtagacatctgtgttgtcacccccattttggaaagcaaaaaggatttcttcttccttcaaacataattgagaaaatacagttgtttgggggcaagtagggtgcggggtgactctggaaccggcctcctgggaagccaggcctctgggagtgctggaggtgggcagtgaggctgccaggcccctgccttctggggtggggtgcatgctcctgatacatcagaagggtcgggggaggacttggaggtgaaggcactgcaggaagagaggaagcttactggagagacggtcaatggggcagtcaggctttaaaaggacgggcccaccaagtgaaaagatgaccaagtgtttgggctgaattgtgtcctccaaaaggatatgttgaagcctaacccccgggacctcagaaggggatcttatttggagatagggttgttgcagttgtaacgctgagatgagattatactggagtagggtgggcccttaatccagtgtgactgctgttctaagaagatgtacatgtgacaatggagggacatgtggggagaggatggccacgtgatgatgggggggacatgttgggagaggatggccacgtgacaacagggggatgtcaggagaggatggcctcgtgacaacgggggaatgccaaaagaggatggcctcgtgatgacaggggacacatggggagaggatggccttgggacgacaggacatgtggggaggggatggccacgtgatgatgggaggacatgtggggagagaatggccacataatggtggggggacacatggagagagaatggccacataatggtggggggacacgtgaggagaggatggccacatgacaattgggggacaccacgcggggagaggatgaccacataacaacgaggggacatattgggagagaattgccacgcgacgacggaggaagggactggagtgaggaagtcataagccaaggaacgccaaggacagaacaagcagcaaacacaagacacagggccaggtaaggaggtccccggctccaggtatcagaggagccctgctgatgcctggatttcagctctctggcctctggacccagaagagaatgaagttctgctgcctggggcctcccagtttgtttacagtgagtctgttcatggtggagaaacatcttctcatgatgttcctgtccaccatggtcaaggcctgttttgagctcctgcattgtataagtcagaggtaaagctgtttttctcaaggggtcaataattgacagtattggaatgggacaaggtggtcctgttgggttttgtttgtttgtttttaaaatatgaggatagaaagtcgtgtttttacttgtgcttaattttcccagtggccgggatgtgaagtccacgcctgtcatctgtaatgcaccagggcaaggggtcggttttgtttgcatagcttctcccagggtcatcttcccacccctcaagtgtggatttggccacaacactttgtttagcaatttcctgtcattttgttttatttggtcaggcttatttgcatagttgaatgaatgcacaaaggcctccttgtttcgtggttcacaaagtcagaactggatcataccagggcatacgggttctgtttcaaggctttgtaaagctgctagggttgaaataggtatttttggtgtcggaattattttattgcatttatcagtttatctactgagatggggcactgagaactgctgatttacctctctgcagccctgtctgcagtacctgaaggctgggggaagacatttggcaatgcacacagcctttgtttctgcctgtgaagttggggtttcataggccacctcccaggagggccctgtaggtgcatgacagagtccgagtgtctcaccagtgggtttgtcattgcacccaagcagatgctgggggagaggatgcctcttccttctcctcacccttcatcagtgtgtgagcagaggcaggagacctgtgggctggaaggcccacatcctccttcccaggctgtgaatgtggcacttacatggcaggaggactttgcagatgtgatcaggaccttgagaggagacattatcctggatgatctggatgagtccatcgcactcacagggtccttaaaagctggaagagggaggccaggcagggagagggaaggaaatgtgaggatggaagagggatccgattgccgcgattgctgaatttgaagaggaaggaaggagccgagagccaaggaatccaggcagcctctgggagctgcaagagacaaggaaatggattctgtcctgcagccttcggagcagatgcagacctgccgacaccttcctttcagctcagcgaaatccatttcagaattttgagtgcagagctgtaaggtcatgagtctgtgctgcttaagccactgtgtttgtagtcatttgttgcggtagtaaaggagactaatatgctattttgccaccattctgagcttttgaggcaggctgatggaaaaggtgggacagtggcttcccagtacttttctaagtgatcctgagaacctaatatcccaggcacttcatattctgtaactctccaccctgctgccagcagagtctgcttagtcctcaagacgaggggcttctgctgctctcagaggttgatgatttcattgattatctttaagttactctgcactctcccttccccagagaaaacccagtcaaattcaagtgagcattggggaaaatattcattcattaaactggttcttaacctttttgggggcaccgacctcttgagattctgttgaaaatgggattttagcccccataaaaatacatatcaaaaatttgcataaattttggccaggcacagtggctcatgcctgtaatctcagcactttggaaggccgagacgggcagatcacttgaggtcgggagttcaagaccagcctggcaacatggcgaaatgccgtccctactaaaactacaaaaaatagctgggtatggtggcgcatgcctgtaatcccagctgcttgagtggctgaggtggaagaatagcttgaacccaggaggtggaggttacagtgagctgagattgcaccattgtactccagcctgggcaacacagcgagactgtcaaaaaaaaaattgcatacaattttgagaacaattttgtatacagattcccccaggagctaccccttgaagctccaatggctgccaggggcttcctctgtcaccccaggtgaagagcccttgtacagattaattcacattaaggctgatgaatggctgttttcctagtaagtctcctcgctgtttgccaggtccttaaaccatgttcagtggatcctcattatttgtggattccatatttgtaaattcatctgctctctaaaatttgtttgtcaccccaagatcagaactcatagacaccagcagagtggcaaaaatgtgttacccgatgagccttttcccagctgaaaaggatgctctgccatcttgtttcagcctcttggtgtaaacgagtgtggttttcatgatttgtttagtgccatgttttccatgttttgtgctttttcttcgtggtttcactgtttgaaagtgctgtctagtgtttccaagtgcaagaaggcagtgatgtgccttatggggaaaatatgtgtgtttgataaactgtattcaggtttgtgttctagtgccactggttgagtgttaacgaatcaacactgtacagatgattcctgacttacgatggttccttccagtatgatttttcaacttaacaacggtgtgaaagtgatatgcattcagtagaaaccatctttcaaatacccatgggaccattctgtttttcactttctgttcaatagtctatacatttcataagatattcaacactctttcagaaagtaggctttgtatttcatgatttcgcccagctgtaggctaacatgtgttctggataggtggaaggcaagctgagacatacctctatggtgtttggtaggttaggtgtattgaatgcattgtcaacttaggatattttcaacctatcctgggtttatcaggacatgaccccattgtaagttgaggaccatctgtttattcagtaaggtgtcttttaaatagaaaaacacataaaacaaggttagtattgattgattgacaaaaatgttgcaacctgaggctttcaggaacctaactctgcatttcctttaggagtgctgcttgcttcagtatctgctggtaactctatggaacatagctactgtgaataatgggaattgggtgtattttcaagttgttggcctctccagctacgctggtaatcagtcctgctctttaaatcacatcttaccatcagtcctgcctagagaaatggaggaagggaggtctctggtcttacggtctgtcccgactctctgccccaccagctatgtcccgagaaccagcctggacagagccatctgattggtgggtggtagcaggtcatgttgtgaggccctggtgcctgccttctgtcctcctgtgctcgctagaggagcatgaggcaggagcagccagtccatgctggttcctgagcgaggcagctctagggctgccagcacccactcctggggggctgagggtaggaagagcttcagaggggaggatgggactgtctgactatatttccaatcccagttgggacttgtggtctgatgaggacaagtgcctttgagggggatggggatggttgagaggaaccaggaaatcaaatgtgtcctggaaaacatggcatggtggatcttttgagttggggtgttgggatgtgtgtcagctaaaacaaggttcacctgcttcaaatgttcatccaagctttctacacttgcctctctgagtcaacatctttagagacagcaggaagtgatgaaagtcagttcacagtccatctgctctgagggcttggtatgaggggctgatgttttctgtcattttctcctttctaacatttcactttgggatcttagttcctggttgaaattccttaactgtgggagtcgaggcagcctaagaatccttttcggctgcttaagacaatgaggtagagagggaaccagctgccccttttcttacctccatgatgatgtagaaatggttccatccagcccaagggttcttctggggcccaaagctccttaagggctctgtgcataggatttgaggattagttttcttgggtggggagaaaagtccatctttatttgtataaatcctacctgaaatgcagcatttcctctaattaggaaggcaggcaacaaaaccagtatgttagctatgtctgtgactctgtcaccaatgtgggttagccgtatctctgaccctgtcaccaattgcaattacagatgtctccacatcacattagtgttgtttcagatatcttgaagtagcatttgttcccattactagttttaaattaaggtggttaatagaccccactggattttgcgatttaatatgctgataaggcacatatattgctatactataacattttttaaaaattttgataactagatttcaataagattggtatttgtgatcatatttattttcttgatttttataacagctttattgagatataatttctgtaccatacaactcattaaagtgtacaactccatgtttctaaaatatattttcaggattgtacaaccatcaccaccaccatcaccataatctaattttagaatatttttgtcccccttaaaagaagcttcgtactcattagcaattatctacattccccctttccccactctcagcccctggcaaccacaacatctactttctgtctctagaaatgtgcctgttctggacgtttcatagaaatggaatcttgtttttgagacagagtctcactctgtcacccaggctggagtgcagtggcgtaatttcggctcactgcaacctccacctcctgggttcaagccatccccctgcctcagcctcccgagtagctgggattacaggcgtgtgccaccacgcccagctaatttttgtatttttagtagagatagggttccgccacgttgcccaggctggtctcgaacttctgacctcaggtgatccgcctgccttcgcctcccaaagtgctggggttacaggttacaaagtaagccactgtgcccggccaaaatggaatctttctgaggtcttttgtgactggcttttttcatgtagcataatgttttcaaggttcatctatctttgtattttgttctgtgcacttaaaacattattctgagaaggggtctaaaggcctgccccgtcgtcaccagaagggcctgtggcatcattggagaggttagggctctccctaaccattagggctccctgcgcctaatggttcttccctctgtcagttttgcattaaaactagtacatgccttggcttgagcatggacaatcactgccaaagacccggcaggcaaggcacgcagctttccttgggatgggttggacccaggccctgggcactcagaggtactcaggcacctctgcccagtctccccaagttaccacctccacaggtgccttggagtgagtgggcatctccaggatgtagcctctagtggatgatacccgtggacagggacagcaaggtagagtaatagggccaggccccaggtgcctgcccccagctggacgccagaaccccaggaccccagctcctccagcccccaggaagctgtcagcacttccagagagcaagctgttggtgggaaggtctgaatccttgcagctctgtgattcgcgaatcataaaacctccacacttggtgtttgtgggccgagctattgtctttgtgttttctttttggagtgggtgggaagccagcttggcaagccgggtgtgaatgaacaggaatgagcaggagacgctcgctgatgccttctgtgatgtgtttcttccccagctccagaagaaaaggaagtcattaaaggacagtatggcaagctcacggacgcgtacggctgcctgggggagctgaggctgaaatctggtgagtagccgctcgctggaggagcaggcgccaggctccccggtgggcaggagcctctgtgtcggaaggggcctcagtgcaggcattctgtttgaccgctcttctctctctcttcttttttttttttttttttttttctccgagatagagttttgctcttgttgcccaggctgcagtgcaatggcgcgatctcggctcaccacaacctctgcctcctgggttcaagcaattctcctgcctcagcctcctgaatagctgggactacaggcatgcgccaccatgcccaactaattttttgtatttttagtagagacggggtttttccatgttggtcaggctggtctgaaactccgacctcaggtggtccacctgcctcagcctcccaaagtgctgggattacagccatgagccgccgtgcctggccgacctctcttctcttttaagatgtttctttatgcctcgggacctgctcctcctgcaggaacctgcaggtggggaggtcaaggtgagtgttgcctggttgtcacctgcctgtgctggggagcagggtggggttcccggcacccccaccctgtgccagagaagctcgtcttcattgcttgccggcgagggcctaagtgtttcgaaagtctggtctggggcttctgcccagggcattgtccgcagtactctagaagatgtgccaaggcgggtgggtgaagacagggaccagggcagatgcccgggggcacaggggtgggctgggagttgtcagcaggagaaaaaagccaccgatgtgtgactgtcagtcagtgtggggtgggagggagaggaagggacagtgtgatctgacttgcgaagggagagaacttccaggaagacgtgggcatctctgctcactctgagagactcgggggtgagccggtggtggccggctgtcgtgggtggtcacagccaaactcagctgttcctggagctcaggagccctggggctttaggttctaccacctgtttccttccttctctctcaggggcccccttgccatctgtgacctggctgtggacatctcttgtgacttctggggccgagacaagagcccagtcgcattcctgattctcagtcccacctggctgagatgggaatggctgtatgggttgtctgaattcgggctttccctgagccaagcgcacacctcccttccctgctcacagcagctgttttcagagactgaggatgtttaaagctgccagaaaagcacggttacgttggccattccttttctgggtgttttctgtcatggaatgtttttccctgaactgtgacgattacagtgatcatttccaaatagcatttaggaaaaatacacagtacccacatgacaaagtgcatttatgaaatgtctgtttcgtgccaagagctagccgtacattcacttatttaatcctaaaaataggctaccgtgataatgcatctttgtccccgtttacagtaacgggaacaggctcagaagcttcaagtaacttgccttaggtcagaaacttagttggggtttgaagcgcctccaaacgcttgctttttctgtggaaatgtgcgggctgccgagggttttctgcaggactttccgctctgcagcgatcttcctgaagttgcaggaaatccctgtggcccttgccttccatggtgatgaccgtgaggatggtggcctgcacctgcatgggactcacttaggaacttgttaacacggctcccgaggccacctgtgctgttgtcaccctgccttgcaggtgtggcagggatgccgcgttccatccatgctgatgcccttttttccacatggtagtatctgggcccccaggatgcctcacagtcttggcttccttcagttatagttggcagctgcttttggtccttacatgaatgactcattttgcatccgacagggactgggattcgacgaattacagtaaccggctcaaggtcacgccattctcaagtggtgccctgggttttaaactcatgccttgcggcaccagggactgccttcaaccaccaggctgttctcctttctgaaagggacaggtggctgggctcacaagggggacaggaagtgcagtaccttcccccatcccaggggaaaagtgttttttcccagggctgtgatctaagatcagctgtgggaaattggtcctaaccaggaagggtggcagccccaaagatgtcttattagagcgagccagggtgtctgcgggggtcagcagggtctaatggggcagggagtgctcagagaggagaccacctcccagggctgccctaggcgaggcctcctccctgccttcagccagtccccgccaccccacaccccacagaagggaatgaggcttcttgtggaccatgcgagaccagccctgctccgaggctttgggtgcccccaacccctgcccacctgtgagagtcaccccccggagtgggttggagtttctctgagtgtggtgtgtatgagtttgactttggcgatgtcaggataatttggtctgttttcaacacattctggaaagcaccctgagcatctgaaggatggaaggattgggctttaaatcaagttttttcagtccccattggttatcttaaggggcgtttgactttaacttgattttctttttcccctgtaagtccctgacccagaactgtgatctattttcttttgtgttttcagctgttgagcatgttgggcagcacggagtgtagctacaactgtgtgaccccacctgtgtgactgactccacctgtgtgactccagtcgtgtgaccaactacaactgtgtaactgactccaattgtgtgactaactccacctgtgtgactctgcgtgactccaactgtgactccatctgtatgactccaattgtgtgacccccacctgtgtgactctgactgtgtgacccccacctgcgtgactctgactgtgtgacccccacctgcgtgactctgactgtgtgacccccacctgcgtgactccgactgtgtgacccccacctgtgtgactccaactgtggactgactctaactatgtgactgactccaactgtgtgactaactccacctgtatgactccaactatatgattgacttcaaccgtgtgaccccacctgtgtgactccaattgtatgactgactctaactgtgtgactccaactgtgactccatctgtatgactgacctcaactgtgtgaccccacctgtgtgactccaactgtgtactgactctgtgtgactgactccacctgtatgactccaactatatgactgacttcaaccgtgtgaccccacctgtgtgactccagttgtgtgactgatttcactgcgtggctaactccactgttgcctgactccagctgcgtgacttcagctgtgtgactccatgtatgtgaccctagctgtgtgactccaactttcagttgccacgaagacaaccagctgagtcaggagtgggcctccctttcaatgtttttagctaagcatctctgcgcaaagaaagaggcttccccacaggctcttaatttgggacaagttttcccttagtttgggaaaaatttcaatctacctaaattagccttttacattagaaatcgagaaatatgcacaaaaattcataaaagcctttttccaggttccaaggtttttgtagaaagcccaaagttcccctttccttcctgaaatgccagcaggaaggggttggagctcccgtgattagccagggagtcaggcttcctgaagtttacacaatacaaagcatattaagtgagaatgtagcagaaaaaagaacttatcccaatgattatagcaatttaaattctcttgaacccaagctctcaaggcctacctgttttatagcctcaagggactctactcctatcccagactataatgaattgtgtctcctggagttgtgcagtacgcaacctgtgaagctgtacacgacagccctataaattctctagcagacagccctcctagattctagttcccacttcacagctgaactgcatttaatctctgtaggactgttttcctgtctgtaaacctgggaaaactgcctcatctctatgttgcctagttctcaggaggtccacatgggccatgcacatggtagccatgaagagtgtggagtgctcctccaacaccaggcgggctggccacaggcagtttcttagagtgtggcctggggacgctgccaccactgagaagctctgctgtctctcctctgtccctgggagggctggagggaggagggtgctgagtgagagggacctggcctgcagagggctgaggacgaggtgtgagctggaaggccaggctgtgtggcctcggggtgtggactcctggtggggggctcctctgcacaggctagcagagggctggtttcatgggcagtcacttcagaaggaggattccctggaggggagtttgaacccttagtcttttgggatgcagtgttctctagcaagtcttgaagcgaactggcctttgtcggtcttagattaatttaattcctgtgcccagtggtgggatattaccaagagagttgacacccagctccctgagggggaagctctgagatgatgcagcatttgccagtttccaaggtgtaaattcacgggccagggctgatttcaggttcccagcgtggagctgaggaaggatctgcaccaggggtgctcactgcgggtgttcactgctgtggccgccgctgcctacacctccctcatgttctgcagaagggaggcgggagaaggccctgagaccatgccgcatgggcacacagtgcttagggttctgaacctgcgggtggcgggggaggctcaagggtcatctggccgaagcttcccccttcacaggtgggaaagcctagacatctttagtcctttgtttggagctttaagtctgagggtgtctgtgtgagcagagggacagataggatggctggagggaccccagggttgggattggcacagaccaggctgggaaggtgaactcagagctgagacaacacaaggaaatgccagcccagagccttgtgggaggcctggggtggtcccggtaaacggggccttgggtctgcaagccacgtatcatgactccaacagccagctttcctggcctgataacaaattgcctaggacctgccactggctcttgcctccctccacctcactctggcagctccctctgacccatgcatggctttgctttggccagagccctggaaccaaagccctttacctggaggggacattgagactattggcgcatcctcctgggaggcccagagagggtaagagccttgcctgaggccacacaggccactggaggtgtgcagagcctggagccccactcttctgagttttgtttttccacttgctatgagatccttgatggtttcagggccctggtctctccctcagctgaggactgccaagaaccccgcaagcctagttagcttcttggctgtcagagaattgatcctgcctcacaaaagcaaatcctgtgctctaggtgagcatcgggaggggcctcacacacctggggcaggtggggaccagtggcttgtaccacactgacggtggcccgggagtcagcgaccccccacagcctggtgctaggctcaagccaggacactttccttaaaacccatagtacaggccaggcatggtggctcatacctgtaatcctagcacctcagggggccgaggcaggaggatcacttgagcctagaagttcaagaccagcctgggctatgtagcaagactatgtctctacatagtgatggtatctacagcaccatgccaggagcggtggtgcacgcctgtagtcccagctacttgggaggctgacatgggaggatcgctggaacccagaaaggggaagttgcagtgtactgagatcaagtcactgcactccagcctgggtgacagtgcaagaacctgtctctaaatttaaaaaaaaaaaaaaaagcaaacaaacaaaaaacccatggtatacagagaacacagtcaggcagtcaggctgtcaatgagattaggcaggacacagtgaggctgggattgaaggaggaggaagccatcagtgctgggtcaggtaggcagggcggggccttcccggagaggcagcgctccacacagcggtcctgaggtttgggtaaggctcttccacagaggcctctgtggttacacccgtcccaccaactgtctgggacacacaggcaggggcagttctaaggaaaagtgtccaggtccttggcttttttctatcatggagcacctgtgatggaggacagggttcttattcccctctgaggtctccctgcttccatgttagggtagagggtaggcccttctctcttctggaagctcaccgtgtgccgtgctccaggaagtaactccccctaggattccagacaaagggacagttcaaaagcttgtcaacagcattgcaataaggtcaggactaggtagcaatctgtttgcaagtcaggtgatgtccaattgtttgcttcccccataacggaaggagaatttaattggggtatcagctgacacattagtaaccattttatcagcaggttattgtcatttcttagcgctaactcagaaggactttgaagaatcgagtgacatttctacaatgaagccctttccattcccatctatttattaatgtgaacaggatcttttagtgtttgcgtctacaaaaatgaaaactagaattagaattggtgcagaacctactttcattccttcaataaatatttattcatctcattaagagatgcctttccaacacattatgactttttgtatcaaatgattatttgtcggccaggcacggtggctcatgcctgtaatcccagcactttgggaggccaaggtgggcggaccactagaggtcaggagttctagaccagcccagtcaacatggtgaaaccccatctctactaaaaatacaaaaattagctgggcatgggggctcatgcctgtaatcccggctactcaagaggctgaggcagtaaacctgaaaggcgaaagttgaacccgggagacagaggttgcagtgagcccagattgcgccactgcactctagcctgggcgacagagcaagactgtcacctcccagagaccccacctcctaaaaccatcgccttgggtgttcatacttcagcatattaatttgggggtgcacacattcagccaatagcaggtacactggttgaccacactcttaaagaggacagccaaaaaaaattatttggcagtgttttatttacattgtattgtttacattgtttgaccagttaggtatcactggaacgataaaccagaacgctctctttttaaacacttggagttgaggaacacacggctgcaggggctgatggggtgatcagaacaggacgtagaagcaccagatatgctacattaggatggaattctgaagaggggggactggaaatatgagtgaaagttccatgtggtaagaaagagcatgctcctgcaatcctgtaaataatagatggcaatgagtatcacgttactgtgtagattccatgggatactgacaagaggctcccagagttttagttttacgtgtcaatatttagaatacactgcacaatatattatttacaggcatttcaactaccgatgaaaaccttcaatggcagttttaaaatgggcagggaacgctgtctgagtccagtgtgttgctgtgacaaagttccgtagtagacggggtggcttatcagcaacagacatttatttcgcgcagttctggaggctggaagtccgagaccagcggcccgcagattggccggctgtgaggacctgcttcttgctccatagatgctgccttttctctgcatctgacatggtgggagaggtgcaggagatctctgggcacaaaccccattcatgagggctccactgccataacccagtcacctcccaaatacccccaccacctcaaaccatcaccttgggtgttcgtacttcagcatattaacttgggggtgcacacattcagtcaatagcaggtacactggttgaccacactcttttaaagggtacagcaggccaggtgcagtggttcacacctgtaatcccagcactttgggaggctgaggcaggtgaatcacctgaggtcaggagttcgagaccagcctggccaacatggtaacaccccatctctaccaaaaatacaaaaaattagccggtataatcccagcaactcgggaggctgaggcaagagaattacttgaacccaggaggcggaggtagcagtgagctgagattgcaccactccactccagcctgggcaacaagagtgaaactccatctcaaaaaaaaatagccgggcgtggtggctcacgcctgtaatcccagcactttgggaggccgaagcaggcagatcacctgaggtcgggagtttgagaccagcctgacctacatggagaaatcccatctctactaaaaatataaaattagctgggcgtggtgacgcatgcttgtaatctcagttactccagagggtgaggcaggagaatcactagaacctgggaggcagaggttgcggtgagccgagatcacaccattgcactccagcttgggcaacaagagtaaaactctgtctcaaaaaataaataaataaataatacatgcatacatacatacatacgtacatacatacatacatacagggtacagcaaactaatccgattggaaactgccggactttggggctagatggagcatgggcttaaagtgaaacctacattttggctccaacacagactagctgtgtgcttgggcgggtgattcagcttccctgggggacagtcatgcgtgtgtgaaatggcagtggtagccctgagacagcagcatgggtaagcaggctggcgacgtcatctgcaaggaggtgtaattaggagcaccagctctggggccagacttggcttgagaaacttgcccaggcactgtagctagaaagtggatttggatcccagctccccgctctgtcaccttgggcaggctgcttaacctctctgtgcgtctgtttccctccctgtgagatggggctggtaagggcgccccttgcggtgggcgggaggatggagtccgcgcctgtacagctcccctgcctccactgcgctcaccagataccggctctcctcactcccctgtaccactcccgaccccctcctccctggacccaggagccccagtgctctgtggcaatgttaagagcctctcctggctgctacagtgctcctctccccagcctcccccaggccgtggtcctgcccaggaaatgcacctgggactgttgccaggcactcaggccccccacacggaggctgttgaggaagtggtgctagaaatcagctcatgactctcacggagtgatgtcatgcaaaattttccatagctctggcagccacaggggccatcctcctgcctctccgagggcacttctgctgaactgtgcttttccctgcactgtgtcagaagaggcaggtgggtgccgggagcgctctgtggccaaggctctgatcacaagctgccaaccccggaaccccacctatcctacttgagaagctgaactctgacccctgtccctgtccccagtgtgataacttcctttgttcttaggtggttttgaggtggtttcctgaggatgtgtctggggagatgtgatgggatcaaccccctgccctgctggcagccccaccccatggcatagcagcaggcccctgggagccctgagcgctcattaaaggaacgcactttaatgacagccacacgccaccctgccacaagcagcgctcttctccctatgaagtgtggtgaggaaattggggtgagagggtggtggaactggttgttttgggggtctcttcctggagtgtggagagatcagaaccatctccagaccatggctgtagacagcggcccttgatcattcacagaagatctcgctgggcggatccttcagacctcagcggggtgggaagagtgtccttgggactagagccctgccagaccccaaaggccggtttctacccgatgatctcttgggccccgtcccgagagtgaggcacggcgccaccaggcacccccgatacgcagcgtgttgtgaagtgcccttgtgagcagcgggggatagggaacagaaaaccagctgtcagcgacagcgaggtggtgccccagagagggctgcctcattcgcctggctgcagggtccgaggtcgtcttggtagcatttggcaggaatttatttaggaagcattcagcaaaccgagtgtgtgtggtgctgggagatgacgacgaaatggccctgcccccaaggaagcccctcccctgggggcacaggtggggagggaggtcatgagctttgtgtgtgtgacaactgctgatgggaatgctattggcacgtacgaggggtgcctgtccgtgtcttgggagagcaaggaaggcttcccggaggagttgctgccaagttggcccagaaggatgaggaggagttcttctggtgaagtggggagggcagaggcaggatggtccctacggagcatgtggggacgctcgtgttcttccagaggatggaatgctgggcccgaagcctgaagtattgttagggtagagacaggcgggaggtgcgtggagaaggggtcatggaggtcttgttgggcagatggcggtgggacgtcccaggcagggggagcatcttgggcaagagcccagggtgcgaggtcatgcttatggcacattggaccagctggaggacagccagctcaggagagcagccggctggggtgtctgcccacgtgtggggcagggatgggctgcagcggggagggatttgggagcttctgtcgtagtcctgcagggagtgggagctgtgcaagaaggaagggcggagcggctgtgatccaatgactttgggaaggccactcctgtgatggagtgggggaagacagaccccaggccaggggtcctgagtcaaggcagtggctgaggaggcactggggaaggtgatttggagaggctttgggggtaggtcctgggggtctggaagggctctaggccaggaattttcagactcctgggggcatcagaatcacctggagggcttgttaaagcaaagcttgcccccagcctcaggcagctgggcggcaggaatctgcatgtctaacaggctcccaggggatgctgacttgctggccagggtcccacactttgagaagccccgcctgaagcttacaggacagggcaggttcttgagccattgagttgggcaatgccatgggaagttgcaggtgcacagacgttgccttcctggctgcggttgaacctgggctccatttgtccccttggagctccaggcggccgggccgacttcgaccctgagctctcctgtctgatttcctttccaggtggcacgtctctgagcttcctggtgttggtgacaggctgcacatctgtgggcagaattccagatgctgaaatctacaaaatcactgccactgacttttaccctcttcaggaagaggccaaggaggaggaacgcctcatagctttgaagaaaatcctcagctcgggggtgttctatttctcatggccaaacgatgggtctcgctttgacctgactgtccgcacgcagaagcagggggatgacagctctgaatgggggaactccttcttctggtgaggccctgggtcccctgcagagggtgggccctgggtctcctgcagagggtgggccctggttggcatctgaggccttgacctccacttgcaccacccccgggttatggggcacctctggagagttaggacccaggcctgctctcagcacaatgagaggaaaactaaccctgaactccctgccaccccccacccctggcccctggaatgtgttcagtgtagatttggaaaagaaacctgcgccaggcatggtgcctcatgcctgtaatcccagcactttgggaggctgaggcaggtggatcacttgagttaaggagtttgagacaagcctggccaacatggtgaaagcccatctctactaaaaatacaaaaaaaaaaaaaaaaaaaaattagctgggcgtggtggcaggtgcctgtaatcccagctactcgggaggctgaggcaggagaatcgcttaaacccaggaaacggaggttgctgtgagccaagatggtgctactacactccaccctgggtgacagagcaagactctgtctcaaagaaaaagaaagaaagaaaagaaaccctgttccataagtaaaaaacataagagccgacgtctgctgagtgcttcctcagtcccgggtgccgagctcagtgcttctgcctggattcactctttcagtcttctcaatcatggttacctccagtgtgcagccgtttaccgctgatgtttataaagcactgtgttcgggtcaccgtgctaagatctctctgctggtaataactcatcattattataaaaacctttataataattatgcggaggctctgttaccccattttacaggtagagagactgaggcacgaatagtcgagggaattttgccaaactccacacacttactaagtggcagagccaggatttgaacccaggctttctgggtccaggtcccaagctggtaatcacagtgctaaaccagtcccatcaatggggaagctgagtcaccctgcccaaagggacttgtagcaatgcactaagactagtcccggagcccaggcagaggcggctggatttctgtatgtttaagatctcctggtgctttttcactccacagcaggacagagacaagagtggacaaccctgtaaatacataaattatctattgccctttctggacataatgctgtttctgtcagattcgcactgatgcctagagatgccaggtagaagcaaaagtgaggaaagtcctgccatgggagtcgttccaatgaacctcatctaatgtaatgttttagaatccagtgtctgccttttgaagctatatcagttttcccagctctgagacgggactcgtgaggtttatttctgacctgtttgtgcctctctccctttgccagaggcagccacaggttttcatctggccttggtgctttggattccccagaagtgaattcctgatttctgccggaagaaggggaccctccccacatccctgtgtccatcccaacgctccccacccccacatcctctttggttctctggtattgtggatatttgggggcagtaatgtgcccagacttcaaaatgcacgtgaatcaaggctgggcatggtagctcacgcctgcaatcccagcactttgggaggccaaggcaggcggatcacctgaggtcagcagtttgagaccagcctggccaacatggtgaaaccctgtctctactaaagatacaaagaaaattagccaggtgtggtggcgcacacctgtaatcccagctacatgggaggctgaggcagaagaatcgtttgaacccaggaggctgagattgcagtgagccgagatcgcaccattgcactccagcctgggctacagggtgagactctgtctcaaaataaataaataaaataaaataaataaaatcgtgaatctcatgctgatctcattaaaaatgcagattctgggatggcaggtctgggctgggcccaggattctgcatttctaataagctgccagtgctgcttgtctgcagacggcaggttgagtagcagcctctggggatggcatttctgtgaatcgctggttacattttgcagggcccagcatgtgccccgcgagctgttacatgttcccctaaaggcagccaagcttaagcacagaggggctgtgtattatgaggtatctttgtgtggagtccgtgaaactattttaaaccagaactgtcaggggagcagaggtgagagctctcagcggcagtgagggtccttggaacccctaggggatccttggggtatctgaattgcaccagcacctttgcaagttctcttccctatgccagctctgtggctggaggtgtgaggggcactaacaaagcgaggcaaaggggattcacgaggtggaggctgagaggagctttggaaggaggagccccatggtgtccctttctgaagggagaggaggaagtaactctggaggtcgccaggctcctcagctgtaacacgccagggcgtggtgtttaggctcagggtggagcccccagaactgaccacaactgagtcaccacgggcagtgtggttctgggcttgatcgcctgaacccccactgttgtggcgcagcgtgaggtctggagacccacagcaggagtcagatggggtcaacgctcagcgtggctggcacataaggcagagtgagcagcagggtgaagtcatctttctgggctggtaattgatcacactgacaattgcctcccagtacaatcaggtcctgggaggaaactctttgggggtcctggatatgagtcatcctcctgccagagggccaggcagtgtcactagaaacagggctgatttaagggttgtccacttggcaaaaggtttcttctcctgagccctggtgatagtggccatagctgtgtagctggcagactctgaaatattctggaggctttgccttgatgccacatgcagatttcatatatgtgtttcggaagctggcttatcatctgaatttgagagagtgatttggaagagggacatgtgtttttgtacagcaatgcttcagcagcatttttcaagcagaggagcgctgtggctgtgcgacctcagatggggtcagacgcgggctgtgctccctgtgggggtgcatgtgactgtgcgacctcagacggggtcagacgcgggctgtgctccctgtgggggtgcatgtggctttggtcacagtcggggaggctggcctgagagcaggaagcttggagaagccccctgggacccatcagagctcacagcacagatttccagcaatgagaaaatgctgctgctgtctttgaggaaggctcaagggcaggaattgtgttgccttttttaaacaagtagggcactgtgatctagattcactcagtgccctgtaagagggcatctcctgatgatgggtcctcctccctgagagtgagtatgggccctcaggatggtaccactcaggtcccctgggtgctaaagcaagggggccaggccagctcagggatgagagaactacgtggtcgttcgcaggtgcacatggaaacgtagggcctcatgaagaaaggctcggcgtgaagagcgcgggctccaagctccatgacgccactggctggctctgtggcattagacaagcacttcacttctctgtgcctcagctgctttatctgtgaaagggggtcactgatgatacctttcacatagggtcacttcaagggtgaaatgagttaatccaccccaaagtacttagaatggggcttagtgcacaggataaatgttggctgtcaccctgtcgttatcatcatggactctagagcctacagcaatccactaggcatggagagggaatacttgaactttcattacattttattttcctcggatctttttaaaatttattttggattgctttgtagcgctctcgtcataatcatctcatggtgcatgtgtgtgtatatgtggataatttaaataactgttcccatatttaatatgatttttaatcacttattgatcatgattgtttaataataaaagatgattaattttttaccaatggggcctgcgatgaaaactgtggggcccacagggctaaccagaggcccctttgcgattccccgaaaagtgcacgctggctcactctccagctttgcttccatttagcgacagtgacgacctggtagtggctttgggaaaggactccctggccatcctcctctacgtgacacagtggtcctgctatttgggatctctttgaagcacatgaacttcccagatctgtacagcccaagtgcagagtccactggggagcagcatgcattcgctgacccgaaatgctgcaccgtgcgccccccagttcctcagccacactcgctgtccaggcagcatgtattggaggatgtcaagtgactggaattggtgtgggactgtgttttgcaggaaccagctgttgcacgtgcccttgaggcagcaccaggtgagctgctgtgactggctgctgaagatcatctgcggggtggtcaccatccgcaccgtgtatgcctcccacaagcaggccaaggcctgcctcgtctctcgcgttagctgtgagcgcacaggcactcgcttccacacccgtggcgtgaacgacgacggccatgtgtccaacttcgtggagacagagcaggtgagtgcccaggcccatctgtggcaccaaatggttccgagtggctgcagctcttgcacacgcgctttccacttggggcagaagaggccctggcatatttgtggtggtctctgatcaggcttcctcctataagtggagaacagcacgtgtaattgggctccacatgaaaatgtgacctctggtttgcatggtgtatcctttctgattcacatctcatgcagggaaaatgctgcttagccgaggtatttttaactaaacggaatcaggaatttttgccttggtcgtgaaaggtgggcagtattccaagggcagctgacagatgaacaaatagggtttgaaaatccttttaggacaaaaataagtagatcaatacaatggggggatgaaagaagaaaccattattttttattctaaatcaactgaagcttctcctggaagccagtattagcaccctagagttgtgaaatctgcgtgttaagcagccgctcccatccgttcccctagaatatagccatctgcttaatttctcctggagttttttctaaattctgttctcatttccagagatgctgtcttacaacttttaaatttttgctctaacttgcaatctgtaagataaggccaccatgtggaatacagtggtgtaagccataagaaaggaaaaccccggaaggcacatgtatggtactcctgccagggcaagctgggtgccctgtgtttactgagtgaaggcgtggctgtgcgtcccccctcgctgccgctgctgggagaggaatgccttatgcggactttggccactttaatccagcagaggtttgagcacctacctttactgtgtgggactttctgcctgctccagtgttcagagggtagatacagagatgaggaggctgctctcagagtccccactcagaggaacatcagagcagggggccctaagatgggcaacagctgcaattacttgcctgtaattctgctcagaatgtctgcactgtggatatcaacgaggctattatgtaaatatctggttaaaaatgagattgcttttggcatcttcgtcatgaagtctttgactgttcctatgtctagaatggtattgcctaggttgtcttccagggtttttatagttttgcgttttacattcaagtctttaacccatcttgagttgatttttgtatatggtgtaaggaaggggtccagtttcagtcttctgcatatggctagccagttatcccagcaccgtttattgaatagagaatccttttcccattgcttgtttttgtcaggttggtcaaagatcacatggttgtaggtgtacggccttatttctgggttgtctattctgtttcattggtctacgtatctgtttttgtaccagtgccatgctgctttggttactatagccctgtagtatagtttgaattcaggtagtgtgatgcctccagctttgttctttttgcttaggattgccttggctattcgggctcttttttggttccatatgaattttaaaatagttttttctagttctatgaagaatgtcaatggtagtttaataggaatagctttgaatccataaattgctttgggcattatgtccattttaatgatattgattcttcttatccatgaggatggaatgtttttccatttgtgtcatctccaatttctttgagcagtgttttgtaattctcattgtagagatctttcacctccctcataaactgtattgctaggtattttattcttctcacagcagttgtgaatgggattgtgttcctgatttggctctctgcttgactgttgttggtgtattgattttgtattctgagactttgccgaagctgtttatcaggttaaggagattttgggctgagactgtggtgttttctagatatagaatcatgttgattgcaaacagggatagtttgattcctctcttcctattgggatgccctttatttctttctcttgcctgattgccctggtcaaaacttctaatactattaatatgttaaataggagtgatgagagagggcatccttgtcctgtgctggttttcagcttttgcccattcagtatggtgttggctgtgggtttgtcataaatggctcttattagtttgaggattgtggatctaaccaaactaaagagcttctgcacagctgaagaaactatcaacagagtgaacagacaacctacagaatgggagaaaatttttgcaaactatgcatctgacaaaggtctaacacccagcatctataaggaacttaaacaaatttccaagaaaaaaaaaaaaaacattaaaaactgggcaaaggacataaacagacacttttcaaaagaaggcatacatgcggccagcaatcatggaaaaaagcttaacatcactgatcattagagaaatgagaatcaaagccacaatgagctaccccctcacacaagtcaaatggctattatttgacttgcgtgaatattatttgacttgtgtgaaatgagatacctcctcacacaataatggctattgttaaaaagtcgaaaaataacagatgctggcaagattgcagagaaaaaggaacgctcatacgctgttggtgggagtgtaaattagttccaccattgtggagaacaatgtggtgattcctcagagacctactcacaatagcaaagacatggaatcaacctgaatgtccatcagtggtagactggataaagaaaatgtggtttgtatacagcatggaatagtatgcagtcatgaaaaggaatgagatcgtgtcctttccagcaacacggatgcagctggaggccattaccctaagcagactaaggcaggagcagaaaaccaaacactgcatgttcttacttacaagtgggagctaaatgatgagaacacatggatacaaagaggggaacaacacacactggggcctatcagagggtggaggatggagggtaggaggagggagaggatcaggaaaaataactagtgggtgctgctaggcttaatactgggtgacaaaataacctgtacaacaaacccacataacatgcgtttacctatgtaacaaacctgcacaagtacccctgaacttaaaataaaagttaaattttgaaaaattttaaaaaggggacagagagagaagctgtggccccagctgggtggttttctcttttctggctgatgtctgcatggggagagtcccttccctgccccacttcattaccacttgccttttattttgaacttttatttaaaatactggttttggatttcaaccagaattttaagacttggggtctcatctattgcatctcatcgagtaagtccctgggaaccactgtcctttagcggcactgtccttcctaaaacaccggacattctaacacggaaaatgaaagcaaaccgcatgcatttcctaggactgcccataataaagtaccccaaactgggtggccgaaaacaacacacttattctctcccagttctggagactggaagtctgcaatccaggtgtcggcaggactgctgtctcttcgaagtccccctggggagaacccttctgagcccacctgaccgccccggctcttggtggcctctggcaagcatctctccatcatctctgcctccgttttcgtgtggccttctctgcctgtgtctctccaggactccagtcgtactggatcagggacccaccctactccagttgtcctcatctttttttttttttttttttttttggagacggagtctcgctctgtcacccaggctggagttcagtggcacaatctcggctcactgcaagctctgcctcccgggttcacaccattctcctgcctcagcctcctgagtagctgggactacaggcgcccgccaccacgcccggctaattttttgtatttttagtagagacagggtttcaccgtgttagccaggatggtctcgatctcctgacctcgtgatctgcccgcctcggcctcccaaagtgctgagattacaggtgtgagccactgagcccggcccagttgtcctcatcttaacccattacttctgcaaagaccctatttccaaacaagttctaaagtactgggagttggtacttcaccatatggtttttggaagggacacagctcaccctgggccgcggatgctggctcctgttagaggactgtgctttacaggcagcgcctgtggccctgtgagaactctcgctgcaatctttgctttctcacttttacagaccaacaagccctaccacagaccaggctgggccttggctctggccacttcgtgtcgcgtgcctgctgactggcgcttgtctcctgtgttgccagcctgcttgttagagctcagaggcagggaccttgcccccacatctcctgaatctcccacctcgggcagcctggcaaggccatagagatatgaacagcctgcccttccagctcctggggtacagcccgatgctgttgacattgcctccacctcccttccttgtctgggctggggagggatttcttggctcccataagcctttgtgggcttcctagtgtgtgtgttttgtcctttttcgtcctctgggctctgggctagacagggctgctctccatgaagtccccacccaaccttactcccaggagcagcagtgattgacagacagctgggcaccaccacctgccgctcacccacagatgcagccgctgcggatgctgcccccgccccacctagagagcataacttaacccatggtgacttcgttaacaagagatgcgtagcggggccccaggaaggtggccctacacccacggtagctcttggttgggtgcctatgtttcaggctgtgctgatgagcctggaggtgcctgggctggcccatccatcggagaccccggacagcctggctacccaggaaggggagctgtcacttcccagcgctgagtccagggctgtccacgtgggccttcagcaaagcctgactgagcctgccaggtcccaggctctgctcccaggtgggtgggcatggggggcagtggtggtgtgatgggggcgcagcaggagtggggcaggtgaagctggtcctgccaggtgctgccgcccttccaggtggtacttccgataggtggtgttcggctggtgacccctgcctggaggtcgaggggaagcacagcagagccagggcagggagaagcgtgtgctgcgcgcagcccaggaaggaggggcatggagcagaaagaaacacaggtgaactggaagagcagagagggttcatgcttcctgcacacatgggaccagggcatgggcctggtggggggtcagcattcctccaagccaaaaaacacaggtgtgacagccctttttctaaaacattacagaggcagcaggagcagagatggctgcagggaagtgactgttccccaaaagcaagaaactcctgttgcctcacttgtataagccaagggaacccctcgctttctgtctctggagtcactgaatatttttgtttatgtcactttatagcagtactgatgcttaggttgatctaagttcgtttttaaaacacaaaacacgtctttaagtggaatgcacagttagtatgctcctgcgaagcggcagccccgctgccctccctggctctgcggccacctgctgaggatggttcttctaggatgagtcaggagagtggagcaaggctcagcctgcaggtccttgctgagctcagggaagcagccccgtgaggatcgggctgcgtggtctgcaggggaacctgcctgggaccctgtgagatttacctgtttcaggtgccagtgatctgctgggattctggagaggtccctcaggggagcctggcacttcctacccccttgagtttgcaaagtcacaactgagggcctgggttgggacggtgtcatgagctctccataagctttgcttatggtacaggagcagactgtctggcgcttctggagacctttaacgtgctcctgtagacagtcgggtaaactcattctggtagcacagcgtggcctccccctccacctgacatctgaggaagtggcaggctctgcatctcggtggcctcgccccagggtgcagggagcaactttgaggaaattagtgctgagcctccagtaggaaggaggactgtgctggggaggcaggtgagccccttgtggtgccgcccgcaggtcacactggcctggggcccctgcagaggaaacaggatccaccagccaggcccgctgaccatttggaagtggagcgtgcacacaggcggctgtgcggtcatcgtctggcaaacaaatgatgggaccggaccaggagcagactggctccctgtggtggggactcttggcaggcggatcggcttcttaggaattaattctcaggaagccagaaaagggggaccctgtggcaccctctgcttttgctttggtttaacatgtttcctaggaggaataattaatcttctttctctgaggcaggctgtgtgtgtgtgtgcatgggttgtatgtgtacagtgtgtgcgtggtatgtgcatttatgtgttgtacatgtgtgtatgtgtcatgtgcattgtgcatttgtgtatacatgtgtgtggtgtgtgccttgtgtttgtttttcatgtgtatgtgtgcagtgtgtgcatttatgtgttgtatacacacatgtgtgggttgtgtatgtgttgtgtgtctgcacgcacagatgttgtgtacatgtgtagatagcatctcagcctccttgggaggaagccttgagtctttttggctctgctgagtcatagctggtgggcttgctctgcagtgctgactcaccacacagaaaaacaagaccaaaaagtcccctcagtctattaaaaaaaaaaaaggatgtaagataaatatttggctattcaagataaggccactgactcattcagggaggttaggatgactgcgtgtcctcccaggaatgcagacttggagataattggtttgcagacactgtatctggaagcagaaggtcagcagaaagcctttcagatagaaggtatatgtacccctgtgagttttcctgcctcgtcgctctctttttatggccattaggtttctgttcccactgctctggaagcgtcactcagggtcaccctctggctgctcagtctggggtctaggcactggcctggcctcatcacagcactggcacgggcctccgacttttcttcccgtggccccactgctcttcccggtctccctcccacctcttgtctgttccttcttgaatccctccttcttcccacgacccaagctctctccgacgccagcaggtgcccgcatgcatagtcatagcgtcagggcctctggggaagagaaaacagcttcgttttttgagtggctactctgtgctgggactatgcccccctcatttacccctcacagctcatcccttctccgtgcacaaggtgacatgaacttcatgtagagagagggaaactgaggctgaagatggctaagtaatgtgcccagggccaccctgctgggcaaatgggggtttgcaaagtggcagtcggacccagcttgtgctaataccagagcccactttctctcctgcttccactctctgtcctgcctccccaccccaagagccctctgtcaaaatgacatctgtgaggtgagacatcacttcttccactggtattaaaagttgttcgcccagaatggaaatgtatcacttgcatttgatggtcaagttatgcctactgccttgggaacaaagaagacagtcttgatgataggacggggtgcagatgtcacctacttcccctgtggaggacggggtggagaactttggagctcctttcttcttgctccagtgtgggcagggaggggcatacagagcactgacagccctcagtgttttcagaagctggttctgggcaagtctcagcttgggaggagcctgatgtgatgctggaagtggcattgttagcacttggggcagtcagagtgaagggagacattcctcagcctaaatagatcgtgggcattggtttttgttgttgtttggtgttttttggatttcactctgttgccccagctggagtgtcgtggtgcaatcatagctcactgcagcctcatcctcctgggctcaggtgatcttcttgcctcagcctcccgaatagctgggactacaggcatacgccaccatacccggctaactttttaaaaattgttttggtagagatgggggtctcactttattacccaggctggtctcgaacttttgggctcaagcccgcctcccaccttggcctcccaaagtggtgggaccgtaggcgtgagtcactgcgcccagcctggatattgttaaacattgtctttatatacaaatgttggtttcttttccaggaacctgggcctatgcagggcacacacgccggtcagttgtatgtacctaatttcacggtagccaactatgtctgtagccgttcaagcaacctgctattttattctgttttgtcagtagaagaatggagttcaacagctttgctggtactcaatacctggaaacagacagcatgttcttaacacatgcttttttcctttggagattaagggatagtattccagtttgacaatgtagataccaggctcctgtaattcctgtggcccagggaaacagtggctctaattttcaggtcctccactgcagaatgactcattcctgtgtgatctgagcgtgatctcgcctgcatgggaagctgccctgtaagggagcaggccggtgaggaacggaaaggaccacagcagcgcccaggccgccctgccaggccaggctagagttgcgcagataaaggccccgcatctgataagtgtcgccgcctgcccctgctggcgctcaggatcgtacttcttgtccttttaaaactcccttgcactccagcgtcattggaggcctgcaggcacactctgaaatagctgtacgtgtgggtggggaggagatagatgtcttaaagtgtacggatcatttgtttctctgcaggtgctgtcacactggaagcttgtggaaaccgtgttgtgtgtgttaactgagtggtgtgtttaagaacacagtggggcagggccaggaccaagtacaagatcaggttgagtcttgcattgtcaagtacgagactggctagcacagtcagtgaggtcttttggctatcactggtgcattttatttcattcagtccttttctcatagctctcttctgcttagctatttgccaaggcaaaaatagagggctctaaggaaggttacattccagagcacactgacttctattcatacagggggtggcggaaggctgttcctgggattttcagggtgacgataaggttgtgccctagaagtgtgaattcccggagaccctgggaggccccaacccccagcagaccccctcctcagaggctggtcgacagccagcatgcccgcccagtacctggcgagaggtcagggcgcattgccggatgggggagcagaggacgccggagtccaccgtccgcccttcattctggctggtgtcgggtcacaggtggccggatcccgttacccagcccaggacgttcggtttcattgaagaatacctttccctttctgtttccttgtgccgcagatgatttacatggacgatggagtgtcatcttttgtccagatcagaggctccgttccgctgttctgggaacagccagggcttcaggtaggtcatgaaaaaacttaaatgtccccttgtgatgttgtccgccctgcccttcccttcaatagctggggaagatttcttttaacacgttcgtttcatggcatagtttccagtctttttcctcagccctgttgtgttgagctgagctatcaaagtgtgcacacgtgtgtgcatatgcatgcgtgcgtgtgtgtagaaaacacagacaccactttgttgtttctggtcgtcaaggatgctgtgtgaaaccgctgactcgggaacggtgctgcggtgcctgctgagtgggtgccgcgaagtgagcttgggtagcactgcctgaggttagaccctgagttcggtgtactgaggacgtttctgagagccgtgactctcatggagggcttcaggaaggctctgtggctgcgtaggtctggcacccggtgctgcctgttgtggggccacgtgagacttccacagctttcccgtgatttctaaaaataccccttgccgtccaaagcagggctctggtcagtgccagagagatttggcattctttctcctgggaagagcacagggtggggacacattccaagaacacatttgtcatcaatggaatgacacgctgcctccttcaccagggtctctaacaaggtgggttatgggccgagtggactggaggggcctccccactaatccccagtcttcctccctgtcccgaggggacgtgggtgccttcagaaagcctctcggccagggcctttgtcgcctctcggctcttcttaccgacagctctcgtgtgactgcatttgggttgccagccagtggctactggggcccagagtgccatctgccaggttccagggggtgtttgacaacgctggactcagggtccccagtcctgggttcagcttcttagcctgctctttgacttgaccctgtgccaggagcaggtgagtcacttgtccccatggctgtcagcacgctgcagtgacagcattggtgaagtactgggtcagcctgggcagtgagatggatgaatggaggtctcgtttaggctccacgctctggtagggagaaaagtcttgattaacattcagtctttccactagaaagagcgcaccacactgcacgagataactgacggcctccggagaaacgctcctgaggacagctgtgacacagaaactcctccggagggctgcccaaaggaggtttttggaaaaatagctttattgcaatataacttacacacccatttaaagcctacaacttggtgcttttactgcatttatggtgttgtgtaaccaccactgtaatctaatcttagaacactttgatcaccactaacaaactttgtccccgttagtggtctctcccatcccctccaagtctccctcatgccaactcgactgttcatctactgtctttatctatagatttcccattccagacgttccaaaagagtttttgaaacctgattttctttaaatatggagttttcctttggaaacttctcgagctctgtattcaggagaatgaaagaattgatcgaatgagtgtggcacaaaaaggagacagggagaccatgttgtgtttcatgtaaagtttgtaagaaatccaaaaattaggggaatggtcatgatggattcttagaatttgggaaggaccctttggaattcatccattccaccctctgactctcagttcaggggtcctccttttttttttttttttttttttttttgagatggagtctcactctgttgcccaggctggagtgcagtggtgcaatctcggctcactgcaacatctgccccccgagttcaagccgttcccctgcctcagcctccagagtagctgggactacaggtgcccactaccacacccagctaattttgttgtatttttagtagagatggagtttcaccatgttagccaggctggtcttgaactcctgacttcaggtgatccacccgcctcagcctcccaaagtgctgggattacaggcgtgagccaccgcacctagccaggccagttcagggatcctcttccaggacctccaaagggctgtcctccaggccacaactggggatggttccgactcttggtgaattcctcctgtattgcactgctgcgtctgtctgactctagagtgttttggggtgcgcgggaatatgtctgattcttctccgtgtgactcaccctcagtccttggagggagtcttctggttccctcttcttcttcttgtcttctctaaggcctcccaactcctttggccaccttccctcctgtttctaagactctcaatgttctcatctccctcatctaaaaaatgacactcctttttgtcgttcccctcttggatttcattttggtcttaccttgaccttcgtgctgcctcagatgtagcctgacccgccatgggatgactgtgccttggtctgtcaggggccaggagcagtggaccacgaggtctcagctttttggcagctgtttcaccctcttaaattcctaacatttgtgctgcaccaaagcctccatggtttcttctttttgtttcttgttttgttttgtttttgagacgaagtcttgctctgtcacccaggctggagtgcaatggcacgacctcggctcactgcaacctccacttcctgggttcaagagattctcctgcctcagcctcacaagtagctggggttacaggcacccaccaccatgcctggctaattttttttgtatttttagtagagacagggtttcatcacgttgaccaggctggttttgaacttctgacctcaagtgatctgcccgcttcggcctcccaaagtgctaggattacaggcgtgagccatcgcgcccggcctccatggtttcttcaaaacaagcttcagaaggctttagtgttccttaatcttattaaggatttgctaacctttgggcctaatacctgtgtttagcctctaaacaccactcatcatcaaagagagatgaagtcatcttcacagggggccgggagggcagcgggaagtggtggtctaccgtcaccggcttcaactgtcactatcaagcctaaggctgcttctagttatttttctccactttgaactttttctcttccttcttcacttaggttagatgaaaagtgcaaagattttggggtgagtagcttgcgtattaagctgcaatgctgtccctccttgacagctgccgttggaaacccaggagcccagcaggatggggcagggttgagcagagggtggtggatgaggatttgtctgcatgttttcctgggtaatggtaccttcagtacttcctgactccatttctagcagccgtgtacctttaataaatttcatttttacgtgtaaatgggctgtgcagtttataaatagccacattgaaattttacccttaaagcaaattgctccctggtctagctagttcgagaatctatttatgatctgtgtctgtggttgacaacgttgctcccctggtcattgtagaagcttccccccaccatatgctgtatagacacgtgccttgccaaggtgagttcagtctgtcttttgaagtttcctgcaactgaaccaaacggaggaggatgccgagtagagcagacccctcttgccctgccttcacctctttcctgccagaaaccattcgccaagtttgtggagtcgtggcgctggatgggcttgtgtgtttgtaccttccttttttccaaaaaggacatgagatggcttgtagtataacagtttcaaaaataagtgaagaggtctggatgaagggcaagagtcgaattggtgcccacgatgcatgccgtgggtcttgtgtgcgtgggaaggaacctgacgcttgttccaagcttccccgcagccaccacagaaagaaccacagtcacagccagtttatgacagtgactcagagcacgagctttgaagcgacgcagacctgggctcaaattcaaactctggctcccctgctttgtaaccatgtgtgtttgagaggctcttatctgtgccaagccttagtttacttttctgtaaaatggggctaacaatatctaccttatagggttctagagaggattaaagagcgtaatataagaatttggctgggcatgggggctcatgcctgtaattccagcaatttgggaggccaaggtggacagatcacttgaggtcaggagtttaagacaagcctggccaacatggtgaaatcccatccccactaaaaatgcaaaaattagctaggcatggtgtcaggttcctgtaatcccagttattcaggaggctgaggcaggagaatcacttgaacctgggaggcggagtttgcagtgagccaagattgtgccaccacactctagcctggtcaacagagtgcgactctgtcaaaaaaaaaaaaaaaaaaaaaaaaaaaaaaacacacagtatctagaatctaaaaagtactcaaaatggcagctgctattgatactaatagaaacaaatgataacacccaggagataaaaccaatggtggcatccggagaagcatggctcttggtgccgtgagcactgaatgagagtttcctcctgtctttgtgggaacagggacaccgtgagatgtagtaacatgaagacagcttcctggtcagtcttatctctcatccctcatagactcatcgtaaatcagtaaccccagatgaagccatttattcatcccaaacattcactgagcgtctgccaggtgtagggggcaccagggatcagatacagtccctaccttcagggagcagggggcaggacagggcagtgttgtgtggacagagccgtgttggaggaagggagaggccccgggggcagctctcccaggctgagggtgtggggtgggctgcccaagggtccagactggggaggggtgaggaagaagcactcaggcaaggaaggcagcccttgcagagggaacaatgggtgcaggtgttgtaacccttgggttcacagtgatcagggagcatcactgggtagcttcttgaagtcctgggcatgaagggaatgggaggagagataggagaggtgagcagggctgggtcaagggcctgtggatgctacactgaggagtttgcatcccataccagcagctactcaagcagtactccccaaccttgctgcacagaagactctgctggggagcttgaaaaatcctgatacccaggttgataccatacacattaagtcacaatatctggggccgggagccaggcagctgtcctttttgaagacccatgggtgactccagcatgcagaaaagtatgggaaccactcggtgctgtgctggcaagccagttttattggggtcagactgggtgcagggagctttggtttgtagcatttgtccattgctgtggtgtaaattctcccatcgtggccactttcaacctacggctccacatcactgagctcagagttgggaccagctgggtgcaccgtcggcttgcaagcctgcaggagctggctccagcacacactggacactgctaaagggctgcaagaggtagagacacaattagacagaagtctaggcagtgttagtttggaggggaaagacaccagatgggaggccgttgagctgagatttttgggtaaccttaagtctggtaggagtggtggggtgcaggggagaggtgtggaggtgctgtctgcgatccttgggcctcttgagtgctgatcgagactctgctgtgacttccacagccaggagttctccagaccccgactatcctcatggctgtctacctaacctcagtctctggtctataggattgaactaatgactttaggggccagataagagtagctggccctttgcccagaggggaggaggacggggtggaggagaagggaagctacaaaatgcagtgacagtggtggaccctgccctcagctgcagctcgtgcctgtggcttctgacacccagtgacctcaggactaggtgacaccagagaaggtggatgctggtcagtgttggagcaggacagaggggaggaaggatatgaggcccaaggaacccagacaaaagggatgcacggggtgacggaggaagggtgagctccggagagaacatgaggcccagctcccctccacttttgcccaaggcctcactgtgttgcctttccacctgcctaaaagaagcagcttagggtcatgactcagggagaggcggttagacaagtccaataatacaacttgtttaggggatggagggacccagcctgaggccctgagcccagggaagcagctgtggcaagctgagcctggtcatggtgtccctgaggctctgcaggtatggacatgcctctgctggtatgcatgcagctctgcaggtggggacacggctctgcaggtggggacatggctctgcaggtatgcacgtggctctgcaggtggggacacggctctgcaggtgtcgacatgcctctgctggtatgcacgcagctctgcaggtggggacatggctctgcaggtatgcctgcggctctgcaggtatgcatgtggctctgcaggtatgcatgcagctctgcaggtggggacatgcctctaccagtatgcacgtggctctgcaggtgtgcacccggctctgcaggtatggacacagctctgcaggtgtggacagggctctgcaggtgtgcatgcagctctacaggtgtggatgcacctctgcaggtatgcacatggcccctggagctgtcttccctgctgtaccttctaccccttcatgggcatttgtaacctaagccaaaagggaacataacaagtccagaaataagtcaaaaccagaaccactcaaacttcagcgtgtgtgcataggaatctcctggagggcttgttaaaacacagattcctggccccacccctggagagtctggctcagcagatctggggtaggcccaggacttcgcatttctaacaagcacccagaggaggtccaacgaccacactttgagaatcactggtctagacttaacagatcccttctgcccattccctgctctggtcattcacccgggggtggtgctcccgactgacttcttagttctctgaggtagaaaggtttgttgtcagcagtgatactggactagccactgcaggggatattgaccatgcctgtgacagttgggcccagccctgtccacacggaatgcttgtctaagtccaggataaaagacaagcctgaggcctcagaaaagatgtgctgcagcccctgtccgggctgtgccttctgctgtgggcagctgattccagggcatgccgtctgcttgccacattccctgagtcctcactgatgtggttgaggggaccccatcaaaggcaggtgcctcatttcactctgctttgctgcctgttccctggactcaagggcatagtttctgtcaaattaatttgcgcttgtgcaggtttgttagaaactttgaagtgcttctgggtctttccatgggggttctggttaggtgtcatcacccaggccaggggattcagcgtctcccatccctttcccacctttccatgacacccaatggcatgttgactcggagggcgctcagtaactgaggaatggactgctgactgatagtgcagtttatatgttaacgggggagctatagagcctggggattggagcctgctaggtccagtcatctgtgcaacagtttctacctaattaaaagaagaggctttgggttatgactcagggagagacagttagacatgtccagtaatagaacttgtcacgacggagagccaggctcctcagccctggcctgccaagcttgtattctcttcttactgtgctcccatggggaatgatcctataaacagctgctgctcattgctgaagccaggggagacttcttgtgatgactgacagaccacacagagcaggtagcccctctcttgggttttagccctggtgacctctcatagggtggctgaggggtacacagacccgctgacttccctcagggtgcaggatggagcaggcctctcggtagtgcgaccatgaaagttttcaaattttctgagatttcctcagccaggtgttgatggccatggggataaaggacagaggtaacacaggcagcaaaaaaataaaaaaaaaccccacaggtttggggtgagcctttcttaggagctccattagccaacagccaagatacctcattttgcactcacttcacttgtgaccaaagtgtcttaggaccaaaagggatttgggactttgttgaactgtttatataaaaaaaacctggctgggcacaatggctcaagcctgtaatctcagtactttgagaggccgaggtgggtggatcacttgagcccgggagttcaagaccaacgtgggcagcatggcgaaaccccatctctacaaaaaatacaaaaaaaaaaaaaaatagccaggtgttgtagtgtacacttgtagtcccggcaacttgggaggctgaggtgggaggatcatttgaacctgggaggttgaggctgcagtgagccgtgattgcacctctgcactccagcctgggcaacagagtaagaccctgtctcaaagaaaaaaaaaagaagaagaagaataagaagaaaagaaaaggaaaccttctccaaggaatctctaaatctattgctgagaaaccagttctctagatgggtgcttttcttgagtctgagatggggcagttgtatcacctgcagtgttgagttatacaatgatacatgaagcatgataatagctgcatctcataacatagataaatctgctgacactacttttacaacactcaaacagaagcaaaactaaagagtgcatttttaactacttattcttgaaataatttcagacctacagaaaaaatttaagaacaagagggaactcccatatgtccttcacccagattcactaaattttaaccttttgccacacacgttattattttttgaaccgtttgaaagtaggttgcatatatcacattggtgttagtccatttgccttgctgtaaaggaatacctgaggctgggtaatttataaaggaaagaggtttatttggctcatggtaatgcaggctatacaggaagcatggtgccagcatctgcttctggggagggtctcaggaagcttacagtcatggtggaagaggaaggggagccagtgtgtcatatgacgagggagggagcaaggagagggaggttgcaggttcctttaaacaactagctctcctgtgaaccagcaagaactcattcattaccatggggttgtcaccaagctattaatgagggatctgtccatatgatccaaacacctcccaccaggccccacctccaacactggaggtcacgttttaacgtgagatttggaagggacacacatccaaaccatgtcagtgtctctttacttaagtgcaaaatatactctcctacatatagtataggtacacatttgggaaatttaacattgacaaagtacttcaatctcatctgcaggcaatattccaaattgatcacttgtctcagtgatgtcctttgaagcaccttttcccgccttgagtccagcatcacatactgcattttgtggtcatgtctctagtctttaatctgcatctgttcctcggctttctgtctttcaaaacattgatgtttttggagaatgcaagccttcttttccgttaagtcgagggtccctacatttacattttcctagtgtttcattataatcacattcagtgtatggatccctgaccagaatgctacctacatgatgctgtatccttctcagggtaccagatctggaggcacacggtgtccatctgccactcattagtgatgttaattttggtcacccagtcaaggtgctattcagtttctccacttacggttaatatgttttcccttccaactaatcagcaatctatgggagacactttgagaccatgctggtatcctgccttttactaaactttcccttaagatttatcatcaacagataatttttgctgaacaattatttactatgacagttgtaaaatgatgatttttaaatgatttcctccaaatttattacttggtattctactatagagccctctcttgttccccattcacccacctacacacccacccacctgcacactgattcacccatctgtcacccattaacccatccattcatccactcattcacccacccacctgcttatccactcatcgtccacctatctacccacccatccacctatccacctacttgtctacccaccatccacccatccctctatccagccagtcatccatccatccatccagtcatccacccatccagccatccagccatcaatccacccagccatccacccatccatgcacccacccatccacccacccactcacccacttacctatccatccatctttcatctacccattcacccacccatccatccatcctcacattcacctgtccatccatccacccacctatccatctactgatgcatccactgatccatccatccacccacccattctcttatccacctttctatccatccactgatccatccatccacccacccatccatccatccccattcacccatccatctatccattcagtcgcccatctattcacccatccatccatccccccattcatccatccacccattatccatccattcagccatccacccatccattcacccattcatctatccatccactcacccacccacctacccatccacccatctatccatccactcagctatccatccatccatccatccatccatccactcagctattcatccatccacccacccatccatccactcagctattcattcatccatccatccacccacctacccatccacccagctattcatccatccatccatccatccatctattcacccatctagttatcatcagtatagattcatgaatttctattttattcatcaggttaaaatccattactgtcctcatacagtttgatgttcagattgtcccagatttggccagcaaaagcccctttaagctgactccagcaacaatatgtattttaaatgtattttctaaaactaagttgagtattaaataaatagttctattaataataaggcaaatttgatcattaggatgactcagattttagggggaaattagtgtccctgaaggcataaaggagactgagaagcagtttctgtctccacagttggcttcactgacctctgtgctatcagagagcttaggatctgacatctgcctcatcatcttaccctggatctgctttctgtggaagaattgcagcagacatggtcatgttgcagttaggactgggcagcagcaaagccagactcgaggcacctagacctgagtttggagcactgttagctgaatccagagagctcagccttcctgagccctgaagagaccacagaggtggcctagtgggtgccacatgcagcctggctgggagtaagaaggagaatgggaaaaaccatggcctccttggtttgcagagaaggaagaatcactgttgttacttctctttgctttaggttggctcccatcatctgagactccacagaggcctggaagccaatgcccctgctttcgacaggtagggattgtctgacaccatccaagcctgtcattgtcatccttagacatcgtcctcccatcagacacaagggagagggtgcgacgggaaagggaggaccctgaaccctgaatctaaagctgctttccctttggtcctttatgcaagaagggagatgacaaaatgggatttttactttgttctcaggtttcctgaaggtaaattaatgaatgttcaggtagcactttataattattttatcttaccagtttcttgcaatgaggcttcatctctatgccctggttaataagggatcatctaaattatagggtatttgaagctgtttgttttttgttttaaaatagtatagaataaataagtatagaaaagtataaagtgaaaaataaaagtaccctaactcccagttaccactctcagagattttactattagtagttttttacatgtcattctagaaaacaattttggcattttatgtgtgtgtgtgtgtgtgtgtgtgtgtgtgtgtatttaaatacacaaattggatcataacacatttactgttttgcagcttgcttaagaaaagcagagctatttgtaatatgtatttgaaataataacttcttaaaagatttgcttatttaatctaaatactcaatattttaaaattgtcttagtgaatatagtaaaaattctcgaaagtaatgtgttaagtgtttgagtccttctacctgaagctttattgagactttaagtttgctttcatactcttgttaaacataacacttgtcatatgagcccagatgtgaccccctgattagtgtgtgacatgtaatgcgcttttctttaaagagatatttaatcaagtatagacaagaccattgccttttccaaagcattattagtatgtcctgagcattctacatgcggagttctttcagttgacattcatctatactaaattgtcttaggaaatagtgaacatgaaaccaaaaatgaaattctacctggctgagcttggtggctcagattttagggagtcgcctgggtgacagagcgagactccatctcaaaacaaaacaaacaaaaaacaaaaatattctacccgaagctgacccaaaacaagagggaagggtcatgctgggttcgcttcaggaaccctcctatgtttaggagctttcttaaaaaatacatacatctagttgaagcacatttgcatagactgcagatttttcagaatcctggtaatgcatggtgtgtgagatgcacgtaccacagagaatgagacctctctctcctcacaagcaccccagaggctgccttgccccttggaaagcattcctaaatctaggggtacacttagatctcttctgcaaatcacaggacaagctgctgaaagggtgagtctttctacaggcagctactgtgtccaggaagtctcttctgtaatgcttcttacccacgacactgggctggaggcaggagccctcccgttcccttgcaggtgctgctgctctcatgttcattgctgactatgttcccctcattcgagataacgtttggaaataaggtgacatgtctgcctagtggccgcagtggggcaccatgagggtccccctgaaagcaggctgcccaggtcctcgatggtgtccctggactggcatgtgcattgtcctgggtgcttcccaattctcttctctgggacatcactgcgctctcaagagtcgtgcggttctctgatggatttggttgagagtaaatcctttctttcccccgcaaaaccttcacacagatagtttttcttcccagaggatgcttgttttcctttgcctgagctgcatgggtgcccctgttagccgaggcggtctcttgtcactttgctgtatgtgctccatatctgaggagggctgtttgcagcaggactttggctgcagctgcttgagtggggtcttgtcatctctgtgtggtgatgagtctcggtggaagggctaacctttcacagggcggtgcctcagtctctcctcacaggacagtgaaccccttctccttccccgccccgctctgcgggcggctgctgtgcacatcagggtgtgctgaactcttggtccctccctgaagatgagaaggatgcttccaaatagaaatctgattcctcagtatcccgaaaaactcctgttttccaagtagcttcctatgacagtaacccgtaggcaggggaagtgaaaaaaaggcctcaatgctcagggtgacccaggaagaagcccgtatgatgccgaccttgctgctggtgccagcgtccccttacaccctgggtgccagcgctcccttacgccctgggtgccagcgtccccttacctgggtcggcagggcctctcagctcaccaataacgagcattttacaataaagggaaagaaagaggaaccacgtcccacacaccaagcactgtccttgtcactttcactcgtctttttagtcctcctcgccattctccgcaggaggggaagtagccctgctttatagatgaaggagccagctcagaagggatgaatcatttgatcaggggagtttggggttgggacagcatagagtaatgatgaggaatagtgagtaataatgagtaataacagtttccttctggccctgggctttggaaccagttgagaagaaggggcaggaatgagacaggaagagatcagaaatgggccttgtttccgatgagccacattgtgggatgtggcttggatgtgtggccacggtgggctccctcaccaggggcagagcctgcacgtgtcagagccaggcctgggatgcaccttctctgggcagaccgacccaaaagaaagcccacaagggctgaagccacacacagcccgccccagggctgcctggagctgcacgtggagacgggagcccgggagggtgctcacccttaacttaggccagggagtcagcaggcaagcctaacttcaaactacccacttcaaaatccatagtctttctactactgtcccttaaagttagtaagagaatgttttctcttactgcataagaaaaaaaatgatttttttcatgatcattattagctctttaaaaaattccgctcataaacgtgtcattacagaaatttggaaaagagaaagatgtttaaagaagaaaagaacttgaatcatataaaattctaccacttttgacatcatgtgtttttttccagtgttttttctatatttaggcataaagattgcaccattaaacgataatttgacatctgctttttgcattgtatcatttccctatgttttgtttaaggcactacatttcaacatgtttaaatttgaaatgtaaggttacttttaaaaagctggtgatcaagaataaatattggaatctctccctaatatttcaacatacatatttagaaagtagcttccaatacaaggaatgttttccaaagcctgcaagttttgttgtatctccttgttgtggtttagcataatgcaatatagcacttagattgaaaacaggatgctgagttgagagctctcctgccagttgttctagttttgagaagggtgggtaccaagcaaaataagagattcatttcacacatgtgcacattgcatgtgtaagactctagcccaggcacggtggcttatgcctgtaatcccaacactttgggacgctgaggtgggaagattgcttgaagccaggagttcgagaccagcctggacaacatagcaagaccctgtctctatgaaaaataaataagtaaaaattagccagatgtggtggcatgtacctgtagtccctattacttgagaggctgagttgggaggattgcttgagcccaggagtttgaggcagcagtgagctatgatcgtgccactgcactctagcctggacaacagactgagatcctgtctcaaaaacaaaattctcttgatgaaagttcaggttaggtgttctagatataatgggaggtgctttatagaaagtgcagcatatcctttgtctgattccaaacaaatgtagaagtctacgctagctagtagtaatggcagctgggaggtgcaggttctctccacccaggctcattttccacgatttgggtcatgggggacagctggtcctggactgtggcactaagaaagcatgactcctgccccgtcttcccttgaggggcagaacagggcagagtctgcacctgtgcccgtgcccagcatcacgcccaccccgctgcctttgcaggcacatggtgcttctgaaggagcagtacgggcagcaggtggtcgtgaaccttctgggaagcagaggcggagaggaggtgctcaacagagccttcaaggtaaggccaggctgtcctctccacagctgggctgggcggcaggtggccatggtggagcgttgagcctggaggtggctcctgcagggactggagctgacagcccagccctccttcgtttcctgaggcttccccagcattccgaccagtgaacacggcagtgctcagtgactcgggccctgatacagtgagtgtaatttcttttctttttttttttttttaagacagagtttggctcttgtcgctcaggctggagtgcagtggtgcaatctcagctcactgcaacctctgcctcccaggtacaagcgattctcctccctcagcctcccaagtagctgggattacaggcacttgccaccacgcctggctaatttttgtatttttagtagagacggggtttcaccatgttgttcaggttggtcaagaactcctgacctcaggtgatccacccgcctcggcctcccaaagtgctgggattgcaggcgtgagccaccgcgcccggcctagtgagtgtaatttctgtgagctgatggttgggagaatttgctcaaagtcaaaacagagcatctcctgtccccagccatgtgtcccttaccctccctccccatggggctttgagggcttctgacctctcaaggtacccctctcagtccagcccaggagcaggcaggcctccctttctgccctggctggtcctgggtgagttcccccagccccacagggcacccggcctcagggctcaggagcaggaacttcggtggctttcccctgcttgccggctggccttcaaatttccccctcttcctcgggctttcatggcagctcctggacctgctgctgctgggctcctgtgggctccttcagacttccttggggggcttttcctggcgatcctggacagatcctgggcagggtcacagagccatgggagcaagagactccgcccacctggccaggttccatccctgtgcatggatcccaggcctccagcccccgccccctgctccccaggcgcaagacgttccagaatgagccaagggggctcctggttcctttaccagcctccatgtcccctgcctaatagagaaaaactctctcgttgtttaaagctcaaagatatcccttacagagagagctcgaagtcgcctcactgggggttagggcgatctctgagcctttccctctgcttagaaatgccacatgctcatgctcagagcaggcacttcctggttgccaattttatttggccagacctgcttttcctgtttggtttgttgctattagcaacgagctccagaagtgtctcccttcccacccatcttggcagtgatgctggctgctaatttgaaggaagaagggaaaaagctaaaaaataagaataataataagaaccccaagtccttttcccctatgccttgagttgtggcccctcccatcagtgggtgaagtgcccggcactggtgagggcgggagatggcagccacctcatgcggagaagggtgggctcctggccaggtagggaggggcactctagctgaagacctgggtcatggccctgcctggggtggccctcagccacctcagcttggcccagaccaaggttggtggcccagcagcctgcccagggcccaatggccatcagtcctgctggatgaagcactggctgtggaatgcatggcactgagccaccaggcactgttgggctcctccagcttcttgctcacagcaagacttgcttgatgatggcagcactgcattgatttacactcagacctatcacaggcagtcacgttgagtcagatcagatgacccccaagtccttctagtccttccaagtcactaggacctctggctgggcagaggctggactggcctgacctgaagccacaagggcatgagtgcagggtgagaggcctggaagccgggtggcctgggtaggcggacagtttgtccttcatcacggggctctctggggagaaagccagggagctgccaggccagggaagcctcatatggaagggagggctcttaagggcatcctggtgccatcagcagccccttgacctgcttcccatctctccccaccttcactctggctccctgaccatcctgaagtagcatcgggatgtgggacccacctgggccacttcagctggagacttggtctcttcagagcataaccaccagaggctggtgcgcggcaggatggggccggttactagggcaacggggagctggattatgagctctgcagcctgccacagcactgctatctctgagggcctggggcacctgggccacctgaagaacagagcagtccttcctcacctgtgccctccagagagccctgcaggagtatgatctctccaggaagccacacctgctctggcttcttttgctcaagggggaccttctgccctttcgcaggcaagacgctctttgtgggttttgtccccccagggcctttgtcctgtgcttcccttttggggtcaactgcctggtccactgtgagcttccagctaaagcacgtcctgcggcgagtcaccttggttagccgcacgggtcaagctctgcaaggagcttgccctcctcgtcctcccttccctctgctcccctcaccgccctcccctcctcttttcagaagctgctctgggcttcttgccacgcgggcgacacgcctatgatcaattttgacttccatcagtttgccaaaggtgggaagctagagaaattggagaccctcttgaggccacagttaaagctgcactgggaagacttcgatgtgttcacaaagggggagaacgtcagtccacggtgaggctcgctgcgcactgtgccgcgtcttctgctggggggaagcgtcagtccacggtgaggctcgctgcgtgctgtgccttctgctgggtgaggcggcagaggggccgtgcagtctaggacatgtgccctatgaggggcagcttccttccctccccactcagttacccttgtggtttcctgggtcataagcttggcgacgccgggaatcttgggttccagcttctcatctcccttcccacagtaggagacaggcttttgaatttctcaaggagatgttgagtcatggttttctggcaaaagaaatgaactaataaaggggactgcattaaaacatggagctccacgctgtgacgcaggcctgtgagagtgagggccacagtcgcggtgggatggctggcatagacttagattgctagaggagaccagggtatggacttccctgttcagagcagaggagaaaaacgaagtccagttccctcaggtcacatgcagggggtcctcattatttgcagattccatattggcttatttacctattccttaaaactgatttgtaaccccaaaatcagtatgcaaagcatttttgctggacagagtatttaaatactctggcctcgtatttaaacaagtttcctttttaagatttagtaccatgtttttcacatttgtggggtctttgttaggggcccccctttgttcggggatctcatggtttagaatggccccaagcagtgtgccgaagagctgtctagtacttctgagcacaagaaggtggtgatgtgctttatggagaaaatgcacgttaagataagctttgtccctatatgagctacagtgctgtcggccatggttcagtgttaattaagcaaatatatatattcaataaggtgtctttatatggaaacatacataaaacaaggttgtatattgatcagttgataaaaatgtgaccagaggtttgcaggaacctaaccctatatttcccctaggagcgatggttctgtgttcatgtccaattcagtgttcctacaactttatagaacataattgctataaataacaaggaccagctaaacgtaaaacgacccagctgtgcaggctactgagtgtgtgtcctggggtctgcctgcctttccagaagtgctggggatccactgggatggacactggggtttctggggggctattgatgaggaggtgaggggttccctcttagaacatgtttcctcacacctgtaatcccagcactttggaaggctgaggtgggcggatcacaaggtcaggagttcgagactagcctggccaatgtggtgaaacaccgtctgtactaaaaatacaaaaattagccgggtgtgatggcacgcacctgtagtcccagctacttggaaggctgagacaggagaatcgcttgaacctgggaggcggaggttgcagtgagccgagatcatgccattgcactccagcttgggtgacagaggtgagactctgtctcaaaaaaaaaaaaaaaaaaaaaaaaaaaaccatgtttccttgggagtcaaaagtcagacatgggcctctgtgctatggccactgcttctttgaaaacaacatataaccgtttacatttcttcttgtcctaagttttcagaaaggcactttgcggatgaactgtcttgactgcctggaccgaaccaacactgtgcagagcttcatcgcgctcgaggtgcgtccctgccacagccttttcggccatctgtgccaggtcctgtgacttcagctggacaggctgggctgagcacctttagcggcaagatgagggtggcatcaccaagacaaccttctgactatggggaaggtggacagggagacactgggacatccagagaggggttccccaggaggctgctttctctgtcgtaggcacactttctcacaccctcttgtgaaatgcatcccagacatggtggcccaaaggctcctcgggaacagcggttgtgtgtaatgattatcgtggatgcaccattggccaaaggcagtgtgaggctggccggatgaggctggatttgaagctggggagggagacctctgtctgcatggccccagctgcctggttgacctctcctggctggggggtcgggggtagggtcagcaccccctgctgtccaccactgtttgctcttcagcctctggcattgggtggggcggggcggggtgcaggggcgttcaagtgtcagggggtgagaggagggcttgggtggaccctatagataaagttggggtgagatgtgggaagtcactctctgctgtgggaactcctcatcctctggaggggcacagagtcttccaggcacagcgtaatccacaggctgccgaataaggaacctcctgggacagtggctgcagggcctctgtgggagaagccagtgacagccatcccttattcctccccaggtcctgcatctgcagctcaagaccctggggctgagttcaaaacccatcgttgaccgctttgtggagtccttcaaagccatgtggtctctgaatggccacagcctgagcaaggtgttcacaggcagcagagccctggaagggaaggccaaggtagggccccgccgagggggcagggtgggggccccagggacccccctcacggcctgcggtctgggctctcggcaggtggggaagctgaaggatggagcccggtccatgtctcgaaccatccagtccaacttcttcgacggggtgaagcaggaggccatcaagctgctgctggttggggacgtctacggcgaggaggtggcagacaaagggggcatgctgctggacagcacggcgctcctgggtagggcctgccgcagacagggcgaggcagggaggtagggtgctccccagccccactttcccaccgcctctgtgctatccagagagcgggtggcagaggtgcctgggatctgagcagtggaccatgcaccttgcagctgtcactgcctctcccgggagcctgcgctttcctgctgggcctgggagctcacgcttcctctgtctcggcttggactgtgtttccatcctgagaagcgagagacaccaggcgggctcagggagaggccgtgcactctcctaaacgcatcggtgcctttgaatgctaacctactccagaaacttcctcagctgcctgggctcttgggcccttagcaggtgatgttggctttgggagcttcccatgaagttggcctccagtttctctcttggcccctgaggaccctgtggaaacagagaaggaggatgctgtcatcccctggggatgagggcaccttctggtctcagcggcaagacatcgtgattccatcaatataggaggttcctttgggagcattttaatggcatcttcttacctgagcctgtaaacatattaggtctcatggaaaagtaggggaaacccagcatttttccttataagaatgtacaagtgtcgctttagaaatgtcaggtgtttttgaaaaatgaactagcccatgcttaaaatgggttcacggccctttccactgtcaccgtcactgggggagctctaatttggcttccgataggcacggtgatatttagtttctactctggaaacagtgccagctctgtaaaaggtgaacaaagctccatgttgtacagtgagtcttatttaatagcaaggcagacatgagttagatttggtttacatcacaagtttaaaaggtggaatatattttggctatctagaggatggagatggttctgtgtagtgactttttaaagccttaagtctggggcaaaacaaaacatatcagacatgcaggctggaaggcagaggatgcaaaggtggctgtctgggttggtaagacacttaaagttatagtgtatatggatgcatacacaatgaaatatggtcagttacagcatgcccttgcttaaattcctatgccttgttcttctacggagtggacagtgaggacacggcttttccctgtcgtgtctgagatccctatggtctgatgtcccatggcttctggcttcagttgggggtaggggtatagacggtgagtttccagtcttatgttttcacgcctttattgtagaaatgccataagggaagccccgtggtgaccgtggttttaagccttttgtcgtcttcgtaaggagcataccctggtttatctctagaggctcatgaaccatctgtctctgccaggcagcctcatctgtctttttggaggatgcctgagctttggaactgcaaagaaatgtgcctttttatgcctcctgacagtgactcccaggatcctgaaagctatgactgagcgtcagtccgaattcacaaatttcaagcggatccggattgctatggggacctggaacgtgaacggaggaaagcagttccggagcaacgtgctcaggacggcggagctgacagactggctgctcgactcgccccagctctcgggagctaccgactcccagggtgagggcagtgactttgggggagacaaaatccaattgcacctaacctgacatgtcacgcttgaccctttagtggccatcgtcttgtggaatttcatctttggtgtcttccctcctcacaatgtctaaatagcaccatggcctgactctcaagaatgctgcctcgcaagtaactgacctttttcctttcccagatgtttagaagagttagcagatggtgaatctctcttttctctttgcatacagtgatggtgaagtcttaggctttcatcagtagaatcttttcgtcaccagtcggaaggtgtggcttctagggccatgtaactgtgaggttgggagccaagcctgtcttcggtgttttgtttttgttttttgttttgttttgttgttgtttgtttttttgagacaagtttcactcttgtcacccaggctagagtgtagtgacgcaatctcggctcactgcaacctccatctccaaggttcaagcagttatcctgcctcagcctctcgagtagctgggattacaggcgcccaccaccacgcccagctaatttttgtatttttagtagagatggggttttgccatgttggccaggctggtctcgaactcctgacctcaggggatccctctgccacagcctcccaaagtgctgggattacaggcatgcgccaccgcgcctggccctgccttcagtgttgatattgaccaagaacagctcatccctgcctctccccaaaccaactctattaatctgctttaagtagtcacaaaataattcatgtgctatttaggaataaaataattccaaatgttgacacctcaccttttatcttgtaagatacactattgaatggccccagaacttaggatctgaagaataaatgattcttgtccagtcatcgttgactcgggccttggtttttttgtttgtttgttttttgttttgcttccttggactcaggaacttgtggttcaggtttttgcctgttggtgagtgacctgtggtctagctgacatgcagtggcccatgtgtacattcatgccccacagctgcctgggtagtacccagagccccatcccttcctgtgcacacgccatctgtgccctcctttctgcctccaagggcaggtggcagagtccaccattcagagccactggggctctctgtgtcggtggtagcctgggttgctgcttgtggtgcctccagaagccattcaggatgccctccggagcaggcccatcaacgcggagagtgcttagcacagccgtggctcaagagccgtccctccagtccccacgaaagtgactcctcttcttttccctgcaggaaggtgtgcatgtttttagcaagctggctggtattttgcaggggatttttttggggtagacactagcaggctccccagcagtcccactagagatacaccaggttccagagaaggaaaggagtgctgtggttactattgccaagcagatcagacagagggacggggattgttttatttaaaaaaaaaaaaaaaaaaagctttaagtcagggaaactagaggttccaggttgcccattgtggtcaacagagaaggaagtggacagcctgcctggcctctcgctgacagaggccatgtcctcctagctggaccctggggaggtgggcctctcactttctgcagcagctggagccatgactgggcttggtggctcaggagcctgggtgtcagaggtcgtgactggacagattcagtcaatggctacaaggttatattaaattctgacctcccctgttcaaagggaacagaatggacggagggcccctctgggctcactgctgcatttaagccaggcatttctgaagcagattccactggggcagttcccagcagcaatggtagccacctggagttggactcaggcagtggacagcatgactcgggagagggcactggggagccccatgaactcgtaatgcgggacttggcggttctgacttctgtcatctcttgccttgctccccagatgacagcagcccagctgacatatttgctgtggggtttgaagagatggtggaattgagcgcagggaatattgtcaatgccaggtaaggggccaggtgtgcggggccaggcagggacttcctgagtcaggtgcctggctgggagcagagcctctgaggctctccgggagccagcctgcttctgagccagctaagctgtggccctggctgtgtggggatctctcacctggctccttctctatgctcacacatgcaccaccccgttctttccctgccacttaggaagtaaaaggaagggctgatgattgctgtgttttctttgcagtgctctggcctcggccacttgttgaggctaatttatgctgccagagggagctggcatgtgtggacctggggtgcaggggaagggcggggctgggactgggagagtagttgactcatgtttcctggggagaggtgagaaagtgtgagtgccgggaagaggtactttcttcctgcacaccagggcaaaggaaaaaatcaaaaccactggatttttatttgatatgaagtcaactgggcgctccccccaccccctgctgaactggcctggctttattttaaggaactttctgaacaaataaataagactgactctgtggggctgctatgagaaggtcctgggttgggtttcaggggtcaagggagggctgctgtgatgtgtgaggcatagccaaaaacacgcagatcctccagtagaagaaggaaagcatgacactaatattggggtgcgggcagcgtgaaatcagttctgcaaacagaataggcttgggctggagcatttggtaggtgggagatagatgtacttccagctacctgtaaacagcatcctttccttttctcttccagtactaccaacaagaagatgtggggtgaacagcttcagaaagccatctcacgctctcatagatacattctgttgacttcggcacagctggtgggcgtctgtctttatatctttgtacgtccataccatgtcccgttcatcaggtaagaacattctgtttacacacatctggggaacaaggggttgttagtctttgtgttttgttctttgacttccccctcctcccccatccccttctgtaacaggaatcgggacttaccattattttagataaatgtagcaaaaccccctaggaaaaactgggctgaatagaatattgtctagcgattaaaaagccaccatgggaaatgtctaactcaggaagctgaactcttagaaagggtgttacatgattgtcatcgcccaagctcaattccgtgcaaggaaaagggttccttgttggaatcttatagacaggaaacctctgaccaagagctgagtaactcactgggaaatgccaactcttttgtccctttttaaaagaattctaagtagaacgtgtgggcctctacaactgtgacctcattgtcatttctccaaggtgcatgctttgtgagcatcagaaagggggcgagcttaggggcggcattcctcttggggtgtgggtgtgggtgtttggatgctggaggaactcatcttttccccagcttgtggttggcctcatcttaccacctgggcctacccatggcttttgaatttccaccagcctttcggcgagctggcagcaggcgttgaactgacctccccactgagcccctgggtcccgggaagggcctgtgcctgccaagagcaccacgggtacacccctgcagcacctggagactaagactatgctgcccataatcctcttctctgactttcagaagatgtttaggtccctgtccctctgcttgtgttatttgggcagcttggcagtgtcctaggttagcaggtgaaggttagtaaaggttaaaggcaagggcggggtgagggtgagaggtaaagcatttgagaaagggctcagagctgaggagagccaggtttcccaggctcggtgtcctcggcttcacgtgcctttagccctgagctgcttccgcctacaccccttccatcagtcatccccccaaccttgtctgccagcgagcagatgcaccagcaggcctcagtctgtggcatggctgtggaaatgttaacaaatgtgcttgcagcccatgtttctatggactcgtatgcgtcataagtgggcatttgaatgcaagcaggctctggcattgcataaaagtccttttgagaccatctacccagcccagcataaacagctgcccgtttcctagctcttaaagtgcattgattgctgggcacggtgtctcacgcctgtaatcccagcactttgggaggccaaggcaggcagatcacttgaggtgaggagtttgagaccagcctggccaacatggtgaaaccctgcctctactaaaaatacaaaaattagccgggcgtgatggtgggtacctgtaatcccagctactcaggaggctgaggcaggagaattgcttgaacctgggaggccacagttgcagtgagctgagatcacgctgctgcactccagccagggtgacagagcgagactctgtctcaaaataacaataataatttaaaaatgtgttgattgcccagatgacacctcccatgcatggcgtgatggctgcacaggagtggggtgggctggtgggtggtgatgtttgcgccgctcctggtggcagtgagaacctgggcggatgcaggcattgccctgtcttcggcttcatggggtgctcaagtgagcacttcccagttggggtgtgggggagatgtccaggcagcggtgggcagcaggagggaggcggcctcctgaccaggagtcgatgacggccacggtggccactgtgttgagctgatgattttggagcactcagagcagcaggtcccgagctgctgctgggcccttctctgtggcaaagcagggtcacacttctccttcaggagccgacggcatgcgcgtatccttctgttccagggacgtagccatcgacacagtgaagacgggcatggggggcaaggcggggaacaagggcgccgtcggcatccgcttccagttccacagcaccagcttctgcttcatatgtagtcacctgacggccgggcagtcccaggtgaaggagcggaatgaagactacaaggagatcacccagaaactctgcttcccaatggtgagcggcgccgtggggacagccagcacctccctgctcagctcagtcccaaatgtgactgttgataggagccaggcactggggacacaaccacagggagggccccttcctggagggctcagcgctgggggagggggagagggctatgtccctccatggaattgacctggggcagggttagccacgtgcctggagggggccagctttgcagcatttcccgttgctgtacaattcctgagtgtctgcatggccactggatttgtatgtgtgcattttctgattttctaattcaagtgatggtttagggaagaaaaccatgtccgtggtctgtcctgtccaagtggtgaagagcatttgaatccacacagcctaagactccaccttcctgagattcacagtcttcacatgtactttctgtggtggctcagataagcacacccttttgaccaatggaccctttttgactgggaacacggttcttgaccaaggagcccagatcctgcctgtcctcgaagctgcaatagcgaaccgcacactgccctctcgtggcggtccggagggtttcattctgaaactggaggattttcttttcaaatctagacgttaatgttctccttcctgtgcaaagatgctacccgggcacagcttcagcgtgtggtgcacacgaggccacctctttcccgaagtgaggatagacttcagctgttcttgctgcaaaatcttccactgtctgagaggtggtgggttgggtcacagagctcttccctgtgagaacagatccttaaaactgacgtcccattttactgggctgcacgagcactcaaggcaaaatttccttagttttcattaagaagtgccataattcctgttggtgttgtttatttcttatgttaaaaaagaaacaaacgagttgggaaattttcaattgtgtgtaatgcagtttaaaaaaaaaaaaaaagtctaacccttctcacttaaaaatagctactttggggccaggcacagtggctcacacctgtaatcccagcactttgggaggccgaggcgggcagatcacctgaggtcaggagttcgagaccagcctggccaacgtggtgaaaccccacctctactgaaaatacaaaaaaaattagccaggcgtggtggcgtgcacctgtaatcccagctactcaggaggctgagacaggagaatcgcaacccaggaggcagaggttgcagtgagctgagatcgcaccactacactccagcctcggcaacagagcgagactctgtctaaaaaaaaaaaaaaaaaagtgctactttgacatagtaaacttgggatacataataagtaattaaaggatttataatgtagttcttttctaccataaaaatattgagggacctattaacattctacacttcttttttgtttttgttttttgagacagtctcactctgccacccaggctggagtgcagtgacatgatcttggctcactgcaaactccacctcccaggttcaagcaattctcctggctcagcctcctgagtaattgggattacaggcgtgcaccaccaggcccaactagtttttgtatttttagtagagatggggtttcgccatgttggcccagctggtctcgaactcctgacatcaagtgatccgcctgcctcagcctcccaaagtgctgggattacaggtgtgagccatggtgcctggccaacattctacactggtattgtctgataccgtagtcactggccataagtagctatttaaattcaaattaattaaaattaaataacatttaaaattccttgctttccctggccacagtgagaatgatcagtatccatgtggccagtggctcctgcatcagatggcacagagaacatttcggtgctgcagaaagttctgtctgacagtgttatctagacgctcattttatttggttgggacctgtttaatcttctgtccagattattgtcatggggggagtggaaatgcctcatattataggagaagagaagctgattttggagctaggcagatgggagctgaaatcccatctgtatcatgcactagctgtgtaaccttcagcaagtgcctttgtttctgaactttgtttttttttttttaatctaagagagagctggtggtatctgctttgtgcacctggaacagagcccagcccttgcggacagttgatccacagcagctgctgtcattgtcttccccattcctggggaagagacagggaaggcaaggaccccaggagctctccggggctgagctggggccgtgggctcctaggactgggcaggatgggaaggaggagctagagagagatggagaagggtcacctgaaaaagctcaggaagttacatgaaggtgcacatcctgagcatttctgctgctcttttgaaacctcattctcctaacgctgaatgctgggtgctgcttcctaggagtagacactccaaagtaagggtgcatctgatcttcaggacggggatccatggaggaaatgctggccatgttgctctcctccgtttagggtaggagctttcttcaaaccactcagaaacactattatttaaaattaaaaagtaagccatgtaaaaattcctccatagttttatgggatgagtgaaaaacaagatgctctagtagaaaactttcttttttctaagtagcattttgagaaaaatactcctgcttgccccagtgagcttgtttttctcctctctcccaccttccttgcaagatgggctgaatgattatgattttcttttcaacttaggggagaaatgttttttctcatgattatgtattttggtgtggcgatttcaactaccgcattgatcttacttatgaagaagtcttctattttgttaaacgccaagactggaagaaacttctggaatttgatcaactacagctacagaaatcaagtggaaaagtaagttgtgctttaaaaacattttttagcagctgctccaagatggaatgacatctgtgagatgtagaggctggtgcagcaaattcagttccgtgagtggatttcactgtttccaacattgtagaaaataggtgggcttgtgaggttacagtacaggagtggctgttcatacacacttcctgtccttttttttttttttttttttttcctgaggcagagtcttgttcagtcacccaggttggagtgcagtggcactatcttggctcactgcaacctccaccttcctgggttcaagcaattcttgtgcctcagcctcccgagtagctgcgattacaggcgtgtgccgccacacctggctaatttttgtatttttagtagagacgggttttcaccatgttggccaggctggtctcgaactcctggcctcaggtgatctgtgcgcctcagcctcccaaagtgctgggattacaggcatgagccaccatgcccggtcaaccttctcctccttctaatactgttattttagtgcctgtttgcttcctagcaggatgagctgagatgaggggagtacatttaaattccatttagctgtggagaaagaagctggttaaatgtgtgagggccaggtgcggtggctcttgcctgtaatcccaacactttgggaggccgaggcgtgcggatcacctgaggtcaggagttcaagaccagcctggccaacttggtgaaaccccatctctactaaaaatccaaaaattacctgggtatggtggcaggcgcctgtaatcccagctactcaggagactgaggcaggagaatcgcttgaacctgggaggcggaagttgcagtgagccgagatcgcaccactgcactccagcttgggcaacgagcaaaactccgtctcaaaaaaaaaaaaagtgtgaggacagggcagataaggtctctcctgaagcaagatttggacgttcttcgaggtttactgtgtcttcccacttgagccccttccagtgtgtggagtgctaaagggttgccacatggacgagtgaccataccaacctcctaaagcaggttttcctgtcttcctactaccaacattctcacatcctctcagtgatgcccaagagaatgagggtgtgtttgtcccttggtcttcccatggaagcaaggccaatccaaagttaaacaaagaaaagaaggatgtgcatgggggctcacgactgtaaggcgggaggattgcctaagcccaggagtttgagaccagcctgggaaacatagggagactttgtctctacaaaaactaaaattagccaggcatgatggtgcgtgcctgtagtcccagctacttgggaggctgaggcaggaggatcacatgagccccagaggttgaagctgtagggagccgtgattgcaccactgtattccagcctgagcaaaagagcgagaccccagggggagagagagaggagagctgactttcactctgcgcttctatgtacttagctcatttagtcaacaaacatagatgaaggcctcggggttgtgggccagacatggcaccaggcatgggactgtaaagatgagcacccctgacccgtgcctcggaccctgcactgtctcctggggggcaacaagaagacagtggatagatcagacactggagtgggtggggagatagatacgagggcggtgtgtccctcagtgggatgagctgaggatcacttttttgctaattaaaagacacatatgtccagtttcagatagattttcaaatgtaatggagcttctgttactttttaagaatagggacttgccttttcagttttcgtttttgtatataacattcaggatcgaaaactacggtggcctgatgacttctttttctcccaatagatttttaaggactttcacgaaggagccattaactttggacccacctacaagtatgacgttggctcagccgcctacgatacaagcgacaaatgccgcacccccgcctggacagacagggtgctgtggtggaggaagaaacatccctttgataaaacaggtgagggggccgtgcccgttcgagagtcggcagagggtgaataagaaatgcgacggagggagagtcacgtttacccaaccccaggcgctgctacataaatcagtttcttcataaccccagatgacacaaaagtcatcccagaccttaacccctaagctttggaagttgtgctttcagggagcctctgcttctggcctctttttttcccttttcttttcttttttttttttgagacagagtttcactcttgttgcctaggctggagtgcaatggcgtgatcttggctcaccacaacctccacctcctgggttcaagccattctcctgcctcagcctcctgagtgctgggattacaggcatgcaccaccatgcccagctaattttgtatttttagtagagacggggtttctccatgttggtcaggctggtcttgaactcccaacctcaggtgatctgcccacctcggcctcccaaagtgctgggattacaggcataagccactgcgcctggcctcctctggtctctttctagagacagtgacctgcaaataggtctgctcctggctgcccctgcatcacagctcccccccacacccccacctcttttttctgggtggggaaagcggggagcatgaggttgcctccctccctgccccccatgctccccctcatgttctttatccagcctattttgttcagctacacttttacctgcttaaagccctaattccaaattggacacgagcaagacacagtaaaaataagttagtttttaaaaatcattagttgtcaagtatgttttgaacaactgttgatgcccagctaggaagtgaagtttatttaaagttagaatatctgtaactagtacataaaaaaaaaaaaaaaaaaaaaaaaaaaaacctaattacacattttgggagagcatagccaggaaattgcatctgtgaaaagaaaatacaaattttcctctagatgagtttgtgaacgcctgtgtggccccagcgctctgagaggtggggcctagaatgagtccgagtgttctcagctcctgcagctcttaccataccaattgctgccaaccttctgggattcctgggtcctggaaacccggcagcaacactgtgtctcaagcctacagtgggcatgctggcgaggactgcaggcatggtcatgactgttttgaataattatatgcgaggaatgtttttaaccaaaggccccaaagcatccgaagcctggcttcaaggtggaggagtaaggaggatgagtctgggacgtggggtggttcgtggcgcagacctctattgtggaagtgtcatgatcgcattcttggatattgactcgattctatatgggtctctcgaatggaacccctgcgagtagctggagaactcaaccttctagacagtgatctagatgttgacaccaaagtcagacacacctggtctcctggtgccctgcagtattatggtcgtgcggagctacaagcgtctgatcacaggtgaggtcctgacttccatggcgttttctcctgtgctgggcaaggcagcgtctccctctccgcaggaaaatgcatgctgtccccataaggatgtgtgtgcgcatgggggtgcattttgtgtgcatacaatacaccaaagaacaaagaatgatggaacaaatatctgtggacccaccaccaagaactaattaatcttagcattttgtcattgctccatatcataaatgacatcattgatgaaaatttcaaagatgcaacctacgtattttgcggcttttatattttcttaaatgatgtcgttgtgcaacttgcttttttgttactatttttgagatacagtcgtgttgatgttatagctctggtgcattcatttgtaactgctgtctagtatcccactaaatatatccatggaacttacaacttatccattcacctcttgatgaatattttctccaggattttatgattacaaacaccatagggtttttaaatctgggatgcacaaccttttttttttttttttttttgagagagagtcttgctctattgcccaggctggatggagtacagtggtgtgatctcagctcactgcaacctccgcttcccagattcaagcaattctcctgcctcagcctcccaagtagctgggattacaggtgcacaccaccatgcctggctaatttttgtgtttttagtagagacggggtttcaccatgttggccaggctggtcccaaactcctgacctcaggtgatccacccaccttggcctctcaaagtgttgggattacaggcgtgagccaccgcacctggccctaggatgcagggctttttaaatgctctgtgcatcatgcattgaggatagagtggaggcagcagagggagcaccgtgggcaccagcacctgtgccctgggattgctgcagaggaagactcaccctgcagaatgtctttaaagacagaggagaggatggcatttgagggtgtgaagaaggaagagtttgatcttcccaaggctgctgcctaaactctcatgtcagtttcaacttttacaaggaaagaaattaagaaaaagaaggtaagaacagttggtcaacgaaaaaaccttttttttttttttttgagacagagtcctccaggctggagtgcagtggcacaatcttggctcattgcaacctccacccccagggtataagtgattttcatgtctcagcctcccaagtagctgggattacaggcgtgcatcaccatgcccggctgatttttgtatttttagtagaaacggttttgccatgttagccaggctggtctccaactcctggcctccagtgatgtgcccgcctcagcctcccaaagtactgggattacagccaccatgcccagactctttagataattctaaattctttagatacctgttgttgcaaatacatacctagaagtgaatcttgaggaatcttcagatatgtgacatcaaggtttgctagctcaatgtattttgaaaccttaatttaaccaatatttcttgaggggcccttacatgccaggccctgttgctggcctggagaaaagcagtgaacaaaacagatgagaccatgttatcatggaattttctggacaggacaaacagacaataaacaaacatgtgtgctatgaaagaaaaaaagtagtggcaggagtcaggccagagtcgagctattttcaatcaggctgtgtaattttcgtaatataggattttctggaaatttatagagtaataaccatccctgtgtcagaattactataaggattgcattatttcctgctggactgttttcctgtttacatcattgatttttacattattcctaatgattgcgtagggtattatatgaaggtatcataactgtttccccattaagaaacagagcattttggcctggcgcagtggctcacgcctttatcccagcactttgggaggctgaggcaggcggatcacctaaagtcaggagttcaagaccagcctagccaacacagcaaaaccccatctctaccaaaaatacaaaaattagctggtcatggtggcatgcgcctgtaatcccagctacttgggaagctgaggcaggagaatcacttgagcccgggaggcggaggttgcagtgggctgagatcgcgccactgcactccagcctggacaacagagggagactctgactcaaaataaaaaaaaaaaaaaaaacgagcatttccctttttttttttccctcccatcaacaatgctgtaaatgatcaacctcatgcattaaatctttgtctgaatccctggtcatttccttagaataaagtccgagaagtgagattactaggtgaaaagagatgaacaattttggaactctatgtaaagtgccaagtaaccctctgaaaagcttgcacccctggcagagtgcagatgtctgcttccccacctccttggtggtactgaggattaccatgtcaaaaatctttgctgatggctggttattttccaagtactgggatacatctttaaggtgccacactttattttccccctcaaatcatctttagataaaaatgccaaggtgatactaaggttaaggaaagatgaagactaaaacgccagagcagggcagctagcctgcaaatccacctgctggtggccacattcgcaggttgttggtgttgactgtttacaaagagccctgggggacagcagctggggactgggggctggagatgtggacatctgtcccaggctaactggggactggaggccgggggtgtggacatctgtcccaggctaactgtcatccctcttttgttcctaacgcagacctgtgctggcgatcgtggaggtggaagttcaggaagtcgatgtgggtgctcgggagagggttttccaggaagtgtcctccttccagggccccctggatgccactgttgtagtaaaccttcaatcaccgaccttagaagagaaaaacgagtttccagaggacctgcgtactgagctcatgcagaccttggggagttatgggacaattgttcttgtcaggtaactgctcccctggctgatgtgggttccaggggatgtcgatgaggatccgtgagagctgccaggtcgttcttggcattgacttggagtatcatttattccaggatcaaccaagggcagatgctggtaacttttgcagacagtcactcggctctcagtgtcctggacgtggacggtatgaaggtacgctgtacttggccacactgtggagtggggtctgatcaatccctctttttatgtgggcatgtcttcttcctcctcttgccctgacctgtgccttttttttttttttttttttttttttttttctctgagacaaagtcttgctctgtcattcaggctggagtacagtgatgcaatcacagctcgctgcagccttgaactgccaggcttaagcaatcctcccatctcagcctctcaagtagctgggaccgcaggcacgtgccaccacacccagctaattttttttaaattttgtagagagaggatctcactctgtagccccggctggagtgcattgggacagttatggctcactataacctcagcctcctgggctccagtcatcctcccgcctcgatctcccaatgtgttgagattacaggcatgagctttcatgcctggccaccaatctgtctttatgtatagacgccatatgcgggagggagtttggattcttcactctggttctaaggtgtctcatgtccggctctagctacttgcaaaatagggcggaagggtgggcgcagtggcttatgcttgtaatcccagcactttgtcaggccaaggtgggtagatcacccaaggtcaggagatcgagaccagcctggccaacatggcgaaatcctgtctctagtaaaaatacaaaaattagccaggcgctgggtgtggtggcttacgcctgtaatctcagcactttgggaggctgaggcgggcaaatcatgaggtcaggatttcgagaccagcctggccaacatagtgaaaccccgtctccactaaaaatacaaaaattagccaggcatagtggcaggtgcctgtaatcccagctacttgggaggctgaggcaggagaatcacttgaacccaggaggcagaggttgcagtgagccgagatcgcaccattgcactccagcccaggcaacagtgtgagactctgtctccaaaaaaaaaaaaaaaaaaaaaaaaagtagccagacatggtggcgcgtgcctctagtcccagctactcaggaggctgaggcaggagaatcgcttgaacctgggaggcagaggttacagtgagctgagatcgtgccactgcactccagcctgggtgacagcgagaccctgtctcaaaaaaccaaacaaacagaatggggaagaagaatgtcagtcactgtgtctcacgttggaaggcagctctaccagcagctgcagaagcttagccattttagagtgtagttctcgccgagttacttgatctgtctatgctcgcactgccatgtgggagactattccagtctttctctttagagtatgtattttggaatatgcagctcatagatagtttccgtttttatagtatcttggctttaaatctgtaccaaatgggaagctggagatgagagttcaactttttttttttgagatggagtcttgctctgtcacccaggctagagtgcagtggtgcaatctcggctcaccgcagcttccgcctcccgggttcaagcgattctcctgcctcagcctcccgagtagctgggactacaggcactcaccaccacgcccagctaatttttgtatttttagtacagatcgggtttcaccgtgttggtcaggctggtctcaaactcctgacctcaagggatctacctgcttcggcctctcagagtgctgggattacaggtgtgagccaccgcacccagcccagttcaacttttttttcaaccagatgtatgagagctatgctgagcctgcgtgaggtctggacccttggtttttcagggccaaatgtgaagattggcctcgttgagggtgtgtgggttttggtgagaagcattgtgtgatcaacaggaggggtcatgatttttatttattcctgggtggccgctctgccctcccaggtgaaaggcagagcagtgaagattagaccgaagaccaaggactggctgaaaggtttgcgagaggagatcattcggaaacgagacagcatggcccccgtgtctcccactgccaactcctgtttgctggaggaaaactttgacttcacaagtttggactatgagtcagaaggttagtgaccctgcagggagggacaggcaagccgttcttctagcaacaggcctgagcttttaaggacaccttctaaagcctcccttgcagaagtgacggaggacacccgcagggcaagccctctgtcccatgtgatgagcatgtttgtatgtgtggacgatgcatgccatgctacctgggacccgaggcatctaaacttaggctacaaacagtggctatgaggatatcagggctgtgggtgtaccaatggaactggggtaccgtccctgctggcgcctgggccctgagctgcagggcagggtgcacgtgtcctgacaggagctgaaccagtcccactgatggaagactgagcctttccccctcattgttttcacccgaattgtgattcatttccttctcccaggggatattcttgaagacgatgaagactacttggtggatgaattcaatcagcctggagtctcggacagtgaactcgggggagacgacctctctgatgtccccggccccacagcactggctcctcccagcaagtcacctgctctcaccaaaaagaagcagcatccaacgtacaaaggtagcctgacccttcttttctcaggagcctcagcgatggagtcagctcaggacagactttcctttttctcttggcgattgggcactgtgtgatatcaagtatgcaggtcccaggagagacctcaaccaggcaggccaagcgaggggtagggactgagccctgtggaggtagccagctccaacaccctgatttcctctagttagtttatttttttacaataacttgtacccccataacacaccagattcaagataattcttgtttcctctggatattcaaatggccacggttctgaactggttttatatttgtgattatttcccgcccccaacaaaactcttctgattcagccaggcgcagtggctcacacctgtaatcccagcactttgggaggccgagacaggtggatcgcttgaggtcaggagttcaagaccagcctggccaacatggtgaaaccctgtctctactaaaaatattttttaaaaattagcagggcatggtggtgcacatgcctgtaatcccagctactcaggcagctgaagcaggagaatcgcttgagctggggaggcagaggctgcaatgagccgagatcgccccactgcactccagcttgggtgacaaagtgagattccgtctcaaaacaacaacaacaaaaaaacttctgattcaatcccagtagagacataatccatatctatgtcctgagttgctggcgtatggtcacactcatataatatcatattattatacagtcatgtcatacggtcacatcattgtatcattttagacttcagagggcctgaaaggtcacattgattgaaccacacacccctagattaaataatacaactttttttttttttttgagacagggtctcactgtctcccaggctggagtgcagtgatacaatctcagctcactacaacctccacctcccaggctcaagcgatcctcccacctcagcctcccaagtagctgggactacagggttgcaccagcatgcccagataattttttgcattttttgtagagacggggtctcactatgttgtccaagctggtctcaaactcctgggctcaagtgaccctcctacctgggccttccaaagtgctggaattacaggtgtgagccactgcacctggccagtaactgttctgagtaacttttaaagcccactaatgttacgtggctggcaggtcgggtagttcatatttcagtgtcagctacattgatgctgttccattcatagccaggcatgcctctagctgtcaatcactgagccccgagttggaggacagctctaaccagcaggtgcaggagcttagccacgcattgggcccattgagctggggctgagagcagagaacagggctgaaagtggattaaggtacctctcagggagggtactttgccaggagaggtgcgaagacctccagcccctttgaccgtacgctggtccccacactgaccaataacttgcctataccgaaccatcaggagcttttaaacttatggatttttgagccctaccagagagatctggatttggtaggagtggggtgggaccctggaagcctggcgtttcaccaagctttccaggtggtttggacgcacagctaggtttggggacttctgcccaagactgaagcagcagccttcgccggagcatcgcggtggttctgcacgttgctcctgccaggggcttctgcccgggagttgaagtggctggagggatgtgctcttcccataagaaggacctttctctcgggggtggccgtcatgcaggcagcctctggagccagtgcaggtgtgagcacagatagtcctttgcatgaagaaactaatagcgcaacacgggacacgtgggtggctttgctacctggtgggcattgagagggtcttcccttgatgctgtggggtgttcagccattcccatttgtaggagaaatcctgcctttccccagttccagtctccaggacacatggggtggagctgctggatacagggagtggggtgtccgagtcaaagtgaaatggagaggcccatgctttgggggagccctagggctgctgatttgatctgtaaggaagcaggagctgtgcctcctgaaaacccctcagcctcttggaaggtgtgtgcagggcaggtcaagatggcagacccttgggagtggccagccatgggcccacagggtttgggatttgatgagtaagcaggacccctggtcctaggcactggccactgcatgccaggctgctctgctgccagagcagggagaacaccctcagcttcctcagccggtgtgttctagagtgaggaattgaaaacatctgcctgtggttggttgactcttcaggggttgtggtttgcaactgtctcctccactctgcccaagtcttgttatttcacaagaaaacacactttgaaatagctcagtgtctctcaagtctgagaaatacccattatccatggttcactgaatgttccaagcaggcactgggtgccctccccgcccccgcccctcgccggcagacagaggtgcccgtttctggacagagccttcagctgtcctacagcaggtccccctgccacagtcggcctcctgtgctcagatccgtgtctgacacgctcacgtgtggaacagaccattgtactcatgccccgccatgtcctccagatgacgcggacctggtggagctcaagcgggagctggaagccgtcggggagttccgccaccgttctccgagcaggtctctgtcggtccccaaccggcctcggccacctcaacccccgcagagacccccccctccaagtaagactctgcttgctttcagctccctggatgcctgccaggaataaccgcgcgttccctgctactgaaaacacggctccgaatccacttctccccggccttccggtccccacagggcttcctcctccttgggctccgttttgttgtaaatccaggacacgtttgacgtcagggctggttgtgtttctcatggcaaatgaaacagctcctttccaaagctgctgttcaccctggagctgtgctattgcttcaaactgctctcccttggcagcattagaggatgcagaatgggggccgcagccatgggagggacgtgagcttcgcagtcagaagtctctcctcagctgctgcgcagtcctccctctacttatgaggaatctggtaaacccaggtccccgcctggaggtgacctggtcacccctctgcgctccgaggcctcctgttccccgggctcagaacaagttcccccttatcctgggtctaggagcattttcttctggttgttcgaacaatgctttgcccgtccagccctccctgataacctgaaagcaaagctgtgatgtgcttttgatccacttgcattttcccaccactgtttacttctccctccccaaaaatgtgatgatcagacttagatcttcctaagccattacttcagaattgggctcattgtggctgacgtcacggtagtaaccaatggcaagccacaagcccagatataaaaataacccaaaaataaaatgcataagtcatgtattattgtggaaattttagagataactacaaagaagaacaaaattttaaaattcacttgatgacctacgggtcgtagttgttgaaaaaagtcttctttttccagtttcatgtatctgcagcaacatacttctttttttttttttttttttttaacaaaattaatacccattttctctggtcggttgtcttttatttaatgggttatattttctgtgtcattgaatgttctaaaacatgatttgttaatggctgcaagtatattttaacagtttattcccctgctttggaattttttttttttttttttttttttttttttttttttttttttttgagatgggctcattctgtcccccgggctggagtgcagtggtgcgatctcacagctcactgaagccttgacctccccggctcaagcaatcctcctacctcagcctgccaagtagctaggactgcaggcgcataccatcaggcttggctatttttattcatttatttatttattttgtagagacagtttcaccatgttgcccaggctggggtttttgaaatattttttccccacaaaatattttaaaaatctggtcctagcaatagtatttggaaccatttcaaaatcaattggtttttatatcagatctgaatcccccaagatgttaaagtttgcattctagtaatgcttctccagatcatctacatcaataggcacacactggtagaatcaagtgagaaactccatagagagtcaaggaaggcctggctctgtgggtgccctaagtgccgagtgagtattcggacctcaccgtgtctgtggtctgctgggacatccgcctcgtctagtcgggctcctggcagctggctgggaagttgtgccttcactgagattgagactctgccctcgttggtttttacagccggtttaatggtgaaaaagtcggcttcagatgcgtccatctcctccggcacccatggacagtattcaattttgcagacggcaagacttctaccaggagcacctcagcaacctgtgagttcttctgcatacatttcaatcccaagggttttgcccccgggatagtgtgggatctctcttctcagtgaatatatagatttatgtgtctttaaccctctacctgctcaccatctcatctccaaaccccataacccttcctcgcaggttctccatagggcttttaaatggttgtatggagtgttctagaaaaaatcacttttgatgaaaaatcccaaatatccctggtttccatactcatccatttctctctcttcccattcttgcctctgaccttggtgtatgggcagagcattgcttggtagaagggaaaatgggagaaattcaggtcgttatcctgggaaaatgatgatcattctggagtgaagttggttgagagaagaggctaaaaagagatgtaaataatgaagttggggaacacactaggaagactaacagccatagaggattgtggaggtgcctggttccagagggtaccatgagctgctggggaagagagcaggtgaaggcagggaagtagaggggagagaggggaagctgggtgctagggggaaactgctatgaccgggatgcctctggggtgctgggcctggttaagtgcttgtgcggccccagcaggtggaggggtgactggaggccagtgttttacagtagtgaaaataggtcataaaggcaacccacatgctggatgaagaagtagaaaaagcacttttaaggaaggtattttaacaactcagtgggaccatggaaagagtggcctcttattttgctttctggctttcacctggttattgaaaaaaagatagaagatggtctgtccatatgcaaaaatctgtaatcacccggctttgaagaccagggtcatcaggtctaagtagtatggcactcttggaaagagagtgctccaggaaagagaggattgcagggtgtggtggaggctggagtttgtatggtcagcatcgtctggtggagccctgcacagacccacgggtagcagatacgtcccacgaggctgtcctcctgcctctgctgatactctgctcttcctcattctgtcctcaagcccaaggctcggactggaataagtaaaccttataatgtcaagcagatcaaaaccaccaatgcccaggaggcagaagcagcaatccggtgtctcctggaagccagaggaggtaggtgctttcctgggggcaggggaaaaaccaattctccttttctttttatctccctgctaaaagtggtctagaaacgaaaataactctttttattcttctggaggcaatattaaatgaaaacatcctttagcaacattttatataaatctatactaagattgattgtccatttaaaattgtattttcaaaattctgtgtgtatataaaaatcatcccagggctattaagcggcgtctaaaggagagaccgaaaaaaaccaaaatgagtttttaaaaaaggtgaatgctgccggcatgaagtcattctgccagctttataaaacagagacagttatagtgtttgtcctaatttcaggcacaaaatctaccttttaaatcactggcaagtggaaataaagtttttagtgtcaggcagggacctctttcccaccacattattttttgttgctgttacttaaaccatgttagttaccttgggctctcccccacttcattcataatcactggtaatttacacttttagttttggccttggctttgttccagaatctcctagagaggagagtgtgcccttttcttcgtttttttttttgttttttttttttttttttttgagactgagtttcactctgtcagctggactggagtgcagtggctcaatcccaggtcactgcaacctccgcctcccaggttcgagcaaatatcctgcctcagccacctgagtagctgggactacaggcgcgcagccccatgatgagccaatttttgtattttcagtagaaatgtgatttcaccttgttggccaggctggtcttgaactcccaacctcaggtgattcatccaccttggcctcctaaagtgctgggattacaggtgtgagccaccacacctggccgagtgtgccctttaaaaaggtgtaagcaatcaccattgcttaatttgcttttagtcagcatgtttaacttctttggaattctcaaataatatttaagggggcatgagttaaaaggtcgagaactactgttgtagaatgatactgctacaaatgctttctttttttttattttagaaaaataactaaaactaggccgggcgcggtggctcacgcctgtaatcccagcactttgggaggccgaggcgggtggatcacgaggacaggaaatcgagaccatcctggctaacacggtgaaaccccgtctctactaaaaattcaaaaaattagccgggcgtgatggtgggtgactgtagtcccagctactcaggaggctgaggcaggagaatggctgagcccgggaggtggagctcgcagtgagccaagattgcaccactgcactccagcctgggtgacagagcaagactccgtctcaaaaaaagaaaaaagaaagaaagaaaaataactaaaactatggatataacaacccaagtgtccatcagctgataaatggataaacaaaatgtggtccatcaatacaatggaatattgttcagccattaaaaaaaaaaagaatggggctgggtgctgggtgcagtggctcacgcctgtaatcccagcgctttgggaggccgaggcaggcggatcacgaggttaggagatcgagaccatcctggctaacacagtgaaactccatctctactaaaaatacaaaaaaattagccgggcgtggtggcacgtgcctgttagtcccagttactcgggaggctgaggcagaagaatcatttgaactggggaggcagaggttgcagtgagccaagataacgccactgcactccagcctgggtgacagagctagactctgtctcataaaaaaaaaaaaaaaaaagaatgaagtgctgatacatactacttcatgggtggaccttgaagacattatactatgtgaaagaaagaaaaaaaggccacatagtgtaccatcccctttttatgaaatggccacagcaggcaaattcatggggtcagaaagttcttcttgctttccagggactggaaggaggcctgggtggggagtggctgctgtggggcttcttttttgtgtgatgaaaatgttctggagttagatcgtatgatggttgcacaactttgtggatacactaaaaaccaatgaatggtacacttagaaagggtgaatttcacggtatgtgaattatgtcacaataaagctgttaaaaaaaaaaaaactctagagatgtagatgttagtagaggtgtgaaatctacctacagtcccggcttaacactttcttggtcatggccccattgagattttgatgtctttggatcatctaccctgagaaatgtaagtacacatgagactttgcatatgatctcagggtctcactggtccccatccaaactatccacagaccccagatcaccacccctgctaggaaggtgagcatgaaaacctgggactgctgggtgcggtggctcacgcctgtaatcccagcactttgagaggctggggtgggaggactgcttgaatccaggagttcgagacaagtctgggcaacacaatgagaccctctctctacaaaaattttaaaattagctgggcgtggtggttcacaccagtagtcccagctacttgggaggctgaggtaagaagactgcatgagcccaggagttccagcaacatagtgagacctcatctctactaaaaattttaaaaattggctgggcgtggcagtgctcacccgtaatcccagctactcaggaggctgaaatgggagaattgctcgagcctgggaggttgagactgcagtgagccgtgatcatgccgctgcactccggcctgggtggcagagcgagagcccatcttaaaaaagaaaaaagaaaaaaagctgggactgaatctagctgattactcctgaaatacactgaattagtaaatgacacttaggatgtagactgtctaaggacgaaatcatgcagtgaattgccttgtcctttacacttcagccatgtggttttatgtttcaggtgcctccgaagaagccctaagtgccgtggccccaagggaccttgaagcatcctctgaaccagagcccacaccgggggcagccaaaccagagaccccacaggcgcccccactccttccccgtcggcccccacccagagttcctgccatcaagaagccaaccttgagaaggacaggaaaggtaaaagcctggtaacataaaacctcttactcctaagttgctcacatgtctcgatagataagaattgtggcctgtaatcccagcacattgggaagccgaggcaagcggattacgaggtcaggagttcaagaccagcctgaccaacatggtgtgaaaccccgtctctactaaaaatagaaaaattagccgggcgtggtggcgcacgcctgtaatcccagctactcaggaggctgaggcaggagaatcacttgaacccaggaggcagaggttgcagtgagccgaaatcgtgccactgcattccagcctgagcagcagagtgagactccacctcaaaaaaaaaaaaaacaaaaaaaaaaaaacagatttgcgtctcacagataaaaatctagttccctatggacatcctcacgttcatgagtcccagacacaggtgtgtctttggggaaagttttgacaactgcttcttccctcatatcctactgtgtcttggctctggctgagaagaacgaggagtccactgtctggcacattgtcagtgtgacaagaacagcttggaggtattatgcttcctaagtgttttgagtccccaaagggaaccatagtgggatgcttttccccacatgttctggtaccgcccatttgcgtgtggtctgtgttgtgtgcacatggtttcaaggcattaggaaaacagtaaccgattcccagattcgccatgttcacatgctctcgtgcggcctcagcctacgagaggttccacagcttttcttgccacttttcttgcagattgttttttgctctcgctctcaagcttctcagccttgcttactgcttcaaagacatgagtttgtaaggacagtagcagcccaaagactggcatctgtagacacatctggatcttccgtttgatctcagtgttctagtaacggaccctcggtaatcccttcctggtcatcacagcacgatgctgcttcccccctagagagtgtgagg

SEQ ID NO: 15847 - DNA, 84030 bp, Homo sapiens; identical to SEQ ID NO: 1278

SEQ ID NO: 15848 - DNA, 139537 bp, Homo sapiens; identical to SEQ ID NO: 1279

SEQ ID NO: 15849 - DNA, 102593 bp, Homo sapiens
cggcggggccgacgagtccggaggggctgccgcgggaggtgagtccggcgacgccgcaagcggccccgacgcccccgacgcccccgacgcctggccccgagcccctcctcggcctcccccgggccactcttcccttgcctcagccccgcagggtctccatgcccgtccgccccgtctccctcgcccgcggtctcgcccgcgcggagtggcggacactaaatgccacaacacacggagcgcctggctcgccgcccgcagaatccggcggtccgcagcggggaacaggggccgcccgcccctcctcaggcctccgctgcgcgtcccgcgccctcggcccccggccccaccctgcatcccggctgccggtctggccgcgggctctgctccttcgccttaagattgacgtcgtgttctgtcccccactcgcagcccgcgtcccttacatccgcccaccggcgcctggccccaggccttgacactcatccagttggtgttcagtgttcgatgagtggataagtgaatgactcctttcccaatcctatttgaaggcatgggaggcagaataggtagtaagtgttaaaggatggggtgtcctggagtcagagccgggcaggtcccagcggccccttcctagctctgtgctggggcaagtgccctacctcactccgctccagtttcatcaccagtggaatggagatgagaatagtttctacctctggcttggtaagaggattaaatgggtcagtgcatgtaaagttaagcacggtgcctgccgctgtacatttcagtaaaggggagcccctgctgtcatctgtgctagcctgcgttctcgccctctagtcccttctgatatgtctctgacttctcatgactttagtttctccttctctacctccatttctcttccctgcacttttttcttcctctcttattgggattcaggaattttattctgttctgtgacttatgttccatgtgttggcagaatgtgggataccagcctgggtgcatccttttctcatctattggagtgaccagttgcacttgtggactgcctccttgcagccaaggtcttgtagacagagttctgggaaatctcaaaacgcaaatcccaggcataggtagaatctgggaatgaagccactgtagctccttgtgatcaccagcgattcctggtcttttaggctgcaggactttgtgttttctcacacccagctataatgtaccttgataaacctctgaccttatttttgttgttgttgttgttaacctgacttacgtcccatattggtggttatttggccatcgtgtgccagcactgtgccaggctggctctagggatgctgtggtgaaccagacagacccttcctgaggtcactgcctcagaaagatcatggtctggcccatgaactttaaaagggagaactaagtgcaggtgtaggggacacacaaattgaattttcaggactgccttggaaaaccagtggtggggaagatggaatgaggataaccctcttctgaaggagtgactaggaagtagcttttgttaggcatcagctatattatacccacgtgtctttttcaatagaagactggcatctactggatttttttttccaattttttcttaaagaagttacacttaagtttggggagaatttcatttcatattagccgctgtaggagttgaaaaaaatggctactggaacttagtgggaagaaaaggaaggaaacaggcatcaggcagaggcagttgattgaacttgggaagatgaggaatagatcaggaaagggttataatgaaaagctttggtgtcaagcacgaagagatttctagattcagtaatgcacagagagatcagtaaaattagaagggagtagttgatggctttgcgaattgctaaggtagaagggagctgttactcaagatgcatgttcaatttaaaatgaatgtattctttggacctggacataagagttctattgactttttgccactattttatatttagggctgtcatacttgggtgaatctagcacagtgctttgagagagagattcattcaacaaacgtgtattgagcattgattgtaccatactctttattggtcttttaaagcaccacaaagtatacagactagaagaacataggtgaagatgagaaagagtccattgaaggggagagaaaacagataatgatggtgctgtgcgataactgccatcatggagttctgtgaaagcagagaaagaccaaccaagtatctgagggaatttatgaaggcttcctggtggcggaggactagttcttacagggcacatgtgggggaatagggaagagtggaaagggactttgttctgcagagacatacaggttatggtgtgtgcagggactgtgatggaaagctgatggatgcacaaacaaaacgtggcctgtctacacaatggaaggctgttcagcaataaaaaggaacgaagtactgatttgtgctacaacatggaggaaccttgagaacattaggctaagtgaaagcaaccagacacaaaataccacatattatatgattcaattttgatgaaatctccagaataggcgaactgtagacagagaggagatcagtggttgcccagggctgagagaagaagcgtgtagaggggtgattgctaaagggtagggagtgcacagtgtgtggatggaagagtggcctgagatgaagttagatatagactgttttgtcatagtgtctaatttccatgcttgtgttaggctttagcttgtgaccattgggtagccaatggggatgggagcaaggaagtgacaaaattttgtctggaagataaatgactgcctcagtctcattacgttcctccttaataatttaatactcaaataattaatagatgtcgtagccagatttcaaacatagattctacaatagggatacaaattgttgcttcctagggattttggagagaatcctgaaaccattagtgtacccagagcactctgataacatggttattgtacagcgaagtggatgacttagactctatattagtcctagctccagtttgagaaatcatccatctgggtggcagttgggtgttagtagtcagcagtgaaggctagctgccaccttccagggttatgagattgacagggctagtggggaaaggaagcatcgtaacttgaaggatgccatagggtggtgttttgtatttttttaactgaaatagtcatgactaaggaagcattattcattatatttttatttatttatttatttttgagatgaaatatcactctgtcacccaggctggagtgcagtggcacgatcttggttcactgcagcctccacctcccaggttcaagtgattctcctgcctcagcctcccaagtagctgggattacaggtgtgcgccaccacacctggctaatttttgtattttttagtagagatgggtttcgccatgttggccagactggtctcgaactcctggcctcaagcaatcctcccacctcggcctcccaaagtgctgggattacaggcgtgagccatcatgcccagcccaattttaaaaattggattgagactattgttttgcagtaagacctgaagttaacaaatctttactgagcatctactctgtgccaaagctattattagatactaggatttaccttggtaagcaagagagaattcatgttgcttacattcttgtaggagagatgatttttaaatggtttagcaaataaagcaattagaggttgtaatgaggattatgaagcacatatgatagaggaaagaagggacagttgggtactcttgagtgatctggtcagagaaggcctttctgtggtggtgatatttaagctgagaccccacagttgagaagaagccagataaatggagtgagatcatttattctgcatagaggaaataattatgacacctgagtgggacagagtgggtcagtggagctagaacttggaggacaagtggagacgggtagagaggtgacaggggagctgcaaagggcttagaccacacggggcatttggtttttattcttagagcactgggcaaccagtgaggagttttgagtagaatgggtagtatggtctgatttctctttgaaggagctgatattttcctttgttttttggggggtaacagctttattgagatataatttacatgccacacagttcacccatttatatacaattcaatggtttttactgtattcacagctatgcaaccgtcactacgtcaattttagaactttctcatcaccctaaaaggaaactccgtacccttcagcaatacaccctaaccccttcttctcccagccctgggcaaccactgacctactctgcctacagcttgcctattctagacattttgtatacatggaatcatataatatatggtgttttgtgcctggttgctttcacttagcataatattctcaggattcctccgtgttgtagcatgaatcagtacttcattcctttttattgctgaacaggcttccattgtgtggatagatcacattttgtttgtccattcatcagttgatggacagttaggttgttttgacattttggctattatgagtggtgatattatgaacatttatctacaaattctttgtagatatgttatcatttctattgggcataaacctaggaatagaacttctgggtcacatggtaactctgtaaccttttgaagaactgcccactggtggctgcaccattttatttttcaccagcaatgtatacagttttttccacatccttgctaacacttgttcataccctagtgggtatgaagtggtatctccttgtggtttcgatttgcatttccctgatgagtaatggtgctgaacatctttttatgtgcttattggccttttttttttttttttttttttttttttttggaaataaagtctcgctctgttgcccaggctggagtgcagtggtgcgatcttggctcactacaacctccacctctcgggttcaggtgattcttgttccttcggcctcctgagtagctgggattacagatgtgcgccactatgcccacctaatttttgtgtttttggtagagacagggtttcaccatgttggccaggctggtcttgaactcccaacctcaggtgatccacctgcgttggcctcccaaagtgctgggattacagatgtgagccaccgtgcctggccttactgggcatttgtgtgtcttctttggagaaatgtttcttagactttgcccattgtaaaattgtcttttgttgttgttttgagatgaagtcttgctgtgttgatcaggctggtctcaaattcctgggttcaatcgatcttcccaccccagcctcccaagtagctgagactatagccacgtgccactgcacccagcttttaaaattgtctttttattattgagttataagagctctttatatattctgggtaaaatctctttatcagatatataaccaggagatattttcttccattttgtgggttttttttttttatttttgtcggtggtgtggattagatgtatttttactttcttgatggtgccctttggagcacaagcgtttttcatttcagtgaagtcaaagagctaattttgatggctgaatgagcctggcttctgggggcaggtgtggaagaccatggcagcagtgtaggcgagggatatgatagcttgtactgtggcatggccacagagttggtgaggaggcgccaggcttgagggaggcttggagatagggctgatggactgagttgagagattgttgtacgggtgagggaaacagaggaattgagggtgaatactaggatttcagcttgaacaacacttttgattcaaaatgtgattatgctgttacctgccggacaattgtgacagtttctaatacctgctggagcctagcaagggcagccctgcgctccctccctgggttctgaagttgcttttggtaggattatcactgagtgtgccaaggagatggtcagggattctgaccttttgtaatacccactaagacctcctaagccaccacaaataaacatattatctgagtagaatagtgcacttgctctgcaaatgcacttttgaggcaaatctcttgactcccttctagctagactgcagtctcaaagcccttcttgtgtagagcctgcgagctgtcagtggatagcatcaaatcaagcggatggattcttgaaagctaaatgtcatcatttgacagagctactatgaggaaaaatatttttatttttaaaaaagttttattgatcgattgatttgagatggggtcttgctctgtcacctaggctggagtgcagtggcttgatcatggctcactgcagcctcgaactcccgggctcaatggatcctccaggttcagtcgatcctccgggctcaattgattcttgtgcctcagcctcctgagtagatggtactacaggcacgcaccaccacacctggctacttttttgtattttttgtagagacagagttttgtcatgttgcccaggctgatgtcaaacccctgggctcggccaagtgcagtggctcacgcctgtaatcccagcactttgggaggccgaggcgggtggatcacaagatcaggagattgagaccatcctggctaacacggtgaaaccccgtctctactaaaaaaaacaaaaaaacaaaaaaacaaaaaattagccaggcgtggtggcaggtgcctgtagtcccagctactcaggaggctgaggcagaatggcatgaacccgggaggcggagcttgcagtgagccgagatcgcatcactgtactccagcctgggcgacagagtgagactctgtctcaaaaaaataaataaacaaacaagcaaacaaacaaacccttgggctcaagtgatctgcccacctcaacctcccaaagtactgggattacagatgtgagccactgtgcctggctgaggaataacttttttttttttgagacagagtttcgctcttgttgcccaggctggagtgcaatggcacaatcttggttcactggaacctctgcctcctgggttcaagcgattctcctgcctcagcctcctgagtagctgagattacgggcacctcccaccatgcccagctaatttttgtgttttaatagagatgaggtttcaccaagttggtcatgctggtctcaaactcctgacctcaggtgatccacccacctcaggctcccaaagtgctgggattacacgcgtgaaccaccacacccggccggtaataagatttttaaaggaggaaataacattaggcaatacttactggtgaagagctcagtacttccgcttgcttgctaggagatctcatgagctaaagcagatacgaaagtgcctgccagagatagggagtagaaggtgtgaaggccaggacgtgagaggccaggcctgttgtaattagaagcaattcagtgtggctggaggacaagtgagagatcctcgggtggcagaggccagatcaccaaggttcttgtaagccagcaacacttgggctttagcaggaggaagatggggaccactgcagagtgttaagcaagggagtgatgacatcagctttgcacatcaggaaaatccctctgtttgccacgtggatgacggggagggagaggcgggcagatgagctgggcaccagagagagctgcaggtgagaggtaatggtggcccgagctaggggtgacacactgaggtgtgtgggagatgtactgaatggagaatcggggacatggagaggagaggaggagggatcagggatgatgctccttttctggcttggtcagcatggcccaggcaactggtagaagatacaagataggtaagtgtctttgacattgttcatttactctgtgtttatagctaggatgtaagttttactaatcccatttcagatggtaattggagatctagagaggttgagcagttattccagggtgcctcaggtagttttaggagcattgggatttgaacttgggtctttttcacttcagtatcattagccactcattgtgcagttcttcctcggtggaaagagggtcagttctgtggctgtgggtctgagacctgggggttgggtgaggtggaacatggagttgggtgaacattgggtaaggaggaggagcagaaagtcttagcagaaatgtttgctgtgtctgcattgtttttcccaaacctagcgcaggacagtgagacagcggctctatgccttttcctcagcccgtcctagacactgtttctgccaggaggacagttttgctgggagttggcctcaacctgctcctcctatctgaatggtgggtgaaggacagacaagcctggtgctaagctcatccagaggcccccagatagggaaatagcatggattctcttctgcccgctggggacttcttgggcacctggcccccaggcatggctgtcctgactcatctgggtgctatggcttacgggcctctagatatcctttggaaaaacgtgtgaggcataaattgatatgaacattcttcaaggcagtttggcaatacatttttttttaattcaacatttccacctcttgcagtgtactccaagaatatacttggatatatttctgttgtttttgatggcaaaattaaaatcttttggttgagaaaattttggtttatccatacagtgtgttctctgcagtttttctgtatagtcactaaaaatcacattctaggggaatatttaatgacatggaaaatactcatgatttattaagtgaaaaagtctgtgtgtgtgcatatatgtttatatacatatatctgtagctatctgtgtacatggcatatctcagtatgatgagattgtgacttttctttacttctttgtccttttattttgagatagggtctcactctgtcacccaggctggagtacagtggtataatcagctcactgcagccttgatctcctgggctcaagcgattctctgtgtaccaccacacctggctaatttttgtattttttgcagagtcaggatcttgccatgtttcccaggctggtctcaaatttctggcctcaagtgatctacccaccttggcctcccaaagtgctaggattacaggtgtgacctactgcacccagctgcctttgtacttttcttttcttttttttttttgagattgagtttcactcttgttgcccaggctggagtgcaatggcacaatcttggctcaccacaacctctgccttctgggttcaagcgattctcctgcctcagcctcccaagtggctgggattacaggcatgcgccaccacgcccaggtaattttgtatttttagtagagatggggtttttccatgttggtcaggctggttttgaactcccaacctcaggtgatccgccctgactcagtctcctgaagtgctggggtttacaggtgtgagacaccgcgcccagccttctttgtgcttttctatattaacaaatttttgaggccgggcatggtggttcatacctgtaatcccagcaagtctgggcgtggtagctcaagcctgtaatcctagcactttgggaggccaaggtgggtggatcacctgagatcaggagttcaagaccagcatgatcaacatggtgaaaccccatctctattaaaaatacaaaaattagccaggcctggtggcaggcacctgtaatcccagctactcgggaggctgaggcacaagaatcacttgaacccaggaggcggaggttgcagtgagccaagatcatgccactgcactccagcatgggcgacggagcaagtctcaaaaaaaaaagcaactttttgatagtgagcatttataactgttataaaaagaaacctttatttttaaaaagttaaataaattatggcacatcaatgtgtgtatgagtatgtatgtatgcactctttaaggaaacaaagccttttactatttctgtgccttggaaagaagaataagaagtttctgcatccatgaagtggaggtaacattcatgtctaatgtttggggattgcaggaaaaaaaaatggaagtaactatgatgcctacttcatgtttgttttttttttctttctttttggtgaggatttaatgggtttgtgtgctaagaacagtttgtattaagtacagacggttttcaacttacagagtttcaacttactattttttgactttaagattgagcgaaaacgataccattcagtagaaactgtatttccagtaaccatacaaccattctgtttttcactttcaatatggtattaaataaattacatgagatatgcaacactttgtgataaaataggctttgattagatgattttgcccagctgtaggctaacataagtattctaagcacatttaagttaggctaggctaagctaagatgttcggcaggttaggtgtattaaatgtattgtgacttatcttttcagcttatgacggttttattgggacataaccccattgtaagttgaggagcatctgtaaaaacattagctattcccattattattactgcaaaagagggtggattgggttcttaagtatcacagaggaatgcaattattattattattgttatttacttacctttaagaaagttctcatacgtggatatgttctgcctgtattggctattgtgactgtcagatgaaatgggaatctaaggctgggcgcgatggctcacacctgtaatcccagcactttgggagactcagatgggcagatcatgaggtcaggagttcgagaccagcctggccaatatggggaaacccccatctctactaaaaaatataaaaattatccgggcttggtggcacacgcctgtagtcccacctactcgggaggctgaggcagaagaacccaggaggcgagtgttgcagtgagccgagatcgcaccaccgcactccagcttgggggacagagcgagattctgtctcaaaaaaaaaaaaaaaaaagaaaagaaatagaatctaaaaatgcttggaaaactggatatgctatacagatttagggaattattattccagcattgaattggggtcatattgaagaaaaaatgatactttgctgctcttccattccattttttagaattttatatttaatattttttcttttgctctacacattcagagaaacttctctagtaatgaactatagaaatgatcccagaaagcacagcctttgttcttctgttcttgtcactcattccttccttgcatattttccttttatttatttattcatttaagagacagtgtctcactctgtcactcgggctagagtgcagtgacacagtcatagctcactgcagcctcaaattcctaggctcaagtgatcttcctggctgagtgcagtggctcatacctgtaatcccagcacttggggaagctgaggaggaaggatcacttgagcccaggagttggagaccagcctaggcaacatagtgaaaccctctctattttttaaaatgaaatatttgttttaaaagcgtgatcttcccacctcagcctcatgagtagctaggactacaggcatgtagcaccatgcctgactaatttttaaaaatattttttgttgaggcgggagtcttgctatgttgcccaggctggttgtgaactcctggtctcaagcagttctcccaccttggcctcccaaagcactaggattacaggcataagccactgttcctgggccaaattttctgtttcatcattcattcatttatgcaacaaatacttgctgaatgcctctgatgtgcctagcccttttctccctgcggggggaagaggggtgagtgaggcagatatgggctctgctgttatgggccttacagactagtgtgtgtgtcagagtggcaggcaggcagataaccagtcagagaaaagaaaggagatgtgtggataggccggacacggtggctcacacctgtaatccaagcactttgggaggctgagatgggaggatctcttgagcccaggagcttgaggctgtagtaagccatgattgagaccagcctgggcaacacagcgagacctcatctctacaaaataatttaaaaattagccaggcatggtggcatattcctgtagtcccagctacgtgggaggtggaggcaggaggttcacttgagcccaggagtttgaggcgtcagtgagtcatgatcttgctactgctttccagcctgggtcacagagtgagactgtgtctcaaaaaaaaagaagaaaggggctgtgtagagaaagtaaaactgggagaggtgacagagagagaactcagtagggggaggagaaatcaagtacggcctcatgaaagagggcacaattgagaaggaggaagagctcagtagagaaagaacattccaagtggacggaacagccaatgcaagggccctggggtgagaacgagctggattaatttgatcagaagagggactggaagttggtcagtccactatgtagaaatagaaaacctacagttcaaagagaccataaatccatgatgcaagaagtttctgtgagaggagcttggaagtctccatagaacctgtagagctaaaatatccctccaggtgtaatcaggtacagagcatctacctggactgttacagcctgcctgtcagagctgtgactgtgctgttgtcaagagcctaggacttggagggaaaagacctagagtcaagtctcggctgtttgatcttgagtgagtctcatgaccctctggcccccagtcccttctaaaagttagggatgatgctacctgccttataaggtagggtcaggattaaatcagtgagtgagcactttgtgaaagatggcgtgcatggaagggttgcatatctttagtaagggaagctttgaagccaaagtgcaagtgggtgggtctccatgtggaacagagtaaggtgctgtgtggctggactcttgagcgctgaggaggctgtgggcatccaaccaggccagggcacctgttcttcaccatctcattaacacagccagcatatctgcatctgagattggcccactattctcctaatagagtgtctttcctgtttctcttttccatatcctgtccaacctggtgggcttcatagttcaggatgtgttcagtgaagccatgtctacactcactctaatccccactgatctctctctcctcatgaaaacccacaaattatcacctcattacttgtggatttgtgtcttttcactatttcatctgcctccctgtctagatcataagctacttgggagtaagaactgttttgttttttgtattctttccactcctccatggcattcactacaacataaatcatagaggtcagaacatactgaagtgcattttgagttaaaatgctcaaaagtgatcttagtgacacgtgtttactttccctgtttatttaagctccagctataatgtttacctgcctaaaagttccatgttgccagtattaaacatacttctttttgccatgactaggcattgaaaggattgtaatgctttgttctgtagcccccaggtttccctagatgacaaataaacattccttttcctgcgtgaagatagtctgtggaaaccttggccatggcatcgatatcagagcctgttacattcagagagttctgcccgttgtactatctcctcaatgccattccgacaaagatccagaagggtttccgctctatcgtggtctatctcacggccctcgacaccaacggggactacatcgcggtgggcagcagcatcggcatgctctatctgtactgccggcacctcaaccagatgaggaagtacaactttgaggtgagccttgctttgcttttcacctgagggggcacgagccatagctgacgcttaacatgcttgtgttctaggatgagataatttacttctgatttgccagaatatggccttaatacctcacccaaacaatactttaaaaccatctttagctgaagtggaatataactaaaaacattggtgtttttaactttttcctgcctccaaaaatctaacatcactttatttatttatttgagacagcgtctcgctctgttgtccagcctagagtgcagtgggacaatcatagctcattgtagcctcaaactcctggggtcaagtgatccttttgcttcaacttcctgagtagctaggaccacagggatgactgccacacccagctagtttttgttttgttttgtctgtagagacatggtttcactatgttgcccaggctggtcttgaactcctcggctcaagcagtcctcctgccttggcctcctaaagtactcggattacaggcatgagccaccacacctggcctaacatcactttaaaagagaatatcacctgaggtcaggagttcgagaccagccttgaccaatatggtgaaaccctgtctctactaaaaatacaaaaattagctgggcgtggtggcatgcacctgtactcccagctactcaggaggctgagacaggagaattgcttgaacctgggagatggaggttgcagtgagccaagatcacaccactgcactccagcctgggtgacagagtgagactccatcttaaaaaaaagaaagaaagaaaaaaagagaacattttagtatttaaaacttactacaacactttgaaagcagatatttttttcctaagtgtttacaggagcaggcacatgcctgtttttcaaagttttgaataatctctagttcttctcttgaaattatgatgaaaaaaggatgtatatgaatattggctcattgccagaatatgcacctcttagctgagctgaggtctcttctatagcattgggatcctgaccaatctgtttctgcagtgctgtggactcaggcatttctgtgtattgtagatattggtggagatgttatttgactgtgttgtggctggcaccaactattggtgaactgtaatgtaattcacccacttagtcaatatctgtagtttattgagtacgtcacttttgtgagagactcaaagttgactgagttgtggcttccaccacatgggactctattctgtctgtggttagggggcttttatggaccaagatacagcttttgtatctaagagaaatgtttacaaatacttgtgttttaatcagtattcaatatattaaagttttcatttaaaacgtaactaatttaagcctctgtgctcattttaaaataatcaaaatggttcatacacatacagccctttctatgtgtcagacattattctttaaaaatatattttttaaattttttaaaacattattttttccttctcactatgcttcttggacagacatatattaactcattttatcctcacaaaaactctctgaggcagatgttattatgatcttcctcatttactaaggagacagctggtgaagagagggtaggtgacttgcctgaggttggctggtagtaaatggcagcaccatcatgtgaacttgggcagactgtctctagggtctgtattaatatatatatatatttttgagacggagtttcactcttgtcgcccaggctggagtgcaatgacatgatctcggctcactgcaacctccacctcccaggttcaagcaattttcctgcctcagcctccagagcagctaggattacaggcacccgctatcacacccagctaatttttgtatttttagtagagacggtatttcaccatgttggccaggctggtcttgaactcctgacgtcaggtgatccatctgcctcagcctcccaaagtactgtgattacaggcgtgagccaccacacctgcccgtgtattaatattttttgtataaaaattagaactactgctatttcttctctttgagtaatagctcatggattcgactgatcaaattccccaaacatttaaaaccattacgtaatctttcaaactgtagttaggagtttaatagtctgaaatctctcaaatgcttcagacactttataaggaagactcgtgaatccaacgatgaaccccaacaagatctatcaaagaaatccatgcacagaggcaccctagtcacactgctaaagatcacaatcttaaaatccgtgcacagaggcgtcctagtcacactgctaaacatcacaatcttaaaatccatgcacagaggcgtcctagtcacactgctgaacatcacaatcttaaaatccatgcacagaggcgtcctagtcacactgctaaagatcgctgtcttaaaatccatgcacagaggcgtcctagtcacactgctaaagatcacagtcttaaaatccatgcacagaggcatcctagtcacactgctgaagatcaccatcttaaaatccatgcacagaggcgtcctggtcacactgctaaagatcaccatcttaaaatccatgcacagaggcgtcctggtcacactgctgaagatcacaatcttaaaatccatgcacagaggcaccctagtcacactgctgaagatcacagtcttaaaatccatgcacagaggcaccctagtcacactgctgaagatcaccatcttaaaatccatgcacagaggcatcttagtcacactgctgaagatcaccatcttaaaatccatgcacagaggcatcttagtcacactgctgaagatcaccatcttaaaatccatgcacagaggcgtcctagtcacactgctaaagatcaccatcttaaaatccatgcacagaggcgtcctagtcacactgctgaagatcacagtcttaaaatccatgcacagaggcgtcctagtcacactgctgaagatcaccatcttaaaatccatgcacagaggcaccctagtcacactgctgaagatcaccatcttaaaatccatgcacagaggcgtcctagtcacactgctgaagatcaccatcttaaaatccgtgcacagaggcgtcctagtcacactgctgaagatcacagtcttaaaatccatgcacagaggcaccctagtcacactgctgaagatcaccatcttaaaatccatgcacagaggcgtcctggtcacactgctgaagatcacagtcttaaaatccatgcacagaggcaccctagtcacactgctgaagatcaccatcttaaaatccatgcacagaggcgtcctagtcacactgctaaagatcacaatcttaaaaatagccagagaacaatgacgtattacctgtagaggaacaatgatttaaatgactgtggatttctcatcagaaactgtattagcccgttctcatgctgctatgaagaaatacccaagcctgtataatttataaaggaaagaggttttattgactcacagttacgcatggctgcggaggcctcaggaaacttacagtcatggtggaaggcacctcttcacagggctcactgtcacaagaacaggaggggggaaaccatgcccatgattcagttatctctacctggtccctcctacgacatgtggggattatgggaactacaattcaagatgaaatttgggtgaggacacagccaaaccatatcagaaacaatggaagctggaagacagtagcatttttttggttttttgtttttgttttgttttgagacggagtctcgctctgtcgcccaggctagagtgcagtggcgcgatctcggctcactgcaacctccgcctcccgggttcaagcgattctcatgcctcagcctcccaagtagctgggactacaggtgcccgccaccacaccggctaatttttttgtatttttagtagagacggggtttcaccatgttcaccaggatggtctcgatctcctgacctcgtgatctgcccgcctcggcctcccaaagtgctgggattacaggcgtgaaccactgcaccaagcttgtttttttttttttttggcagagtttcgctcttgttgcccaggctggagcgtagtgactgcaacctccacctcctgggttcaaacgattctcctgcctcagcctcccttgtagctaggattacaggcacacgccaccaagctcagctaatttttctatttttagtagagacggggtttcaccatgttgtccaggctggtgtcaaactcctgatgtcaggtgatccactcgcttcggcctcccaaaatgctgggattacagctgtgagccactgcgcctggccgatagtagcacatttttaaagtggctgagaggccgggcatggtggctcacacctgtaattccagaactttgggaggctgaggcaggtggatcacttgaggtcgggaattcgagaccaatctggccaacatggcgagagccccatctctactaaaaatacaaaaattagccgggaatagtggctcatgcctgtaatcccagctactgagaaagctgaggcatgagaatcgcttgaatctgggaggcagaggctgcagtaagctaagatcgtgccagtgcactccagcctaggcgacagagtgagactccatctgaaaaataaaatgaagttctgagagaattgtcaacccgaaattctttactcagtgaaaatacctatcaagaaaggtgaaatgaaagtattaccagatgaaggaaaacttaagagggttcgttgccaaccgacctgctctaaagtcattgctaaatgaagttctttagacagaagggaactttgtacatcaagaatgaagaatggtaaatacctgggtaataaatacaatagatgatttttcccctattgagttctttaaaatatatttgacagttgaaaacaaaaattataactgatcaagttttaacagatgtagatgtagtaatatctaagacgagtacaacataagtaagggagagtaaggtatcctatacatttgtacattcttcttgaagaggtacaatattgattctaagtagattttgaaaaattacgtataggccgggcacggtggctcacgcctgtaatcccagcactttgggaggccgaggcgggtggatcacgaggtcaggagatcgagaccatccaggctaacatggtgaaaccctgtctctactaaaaatacaaaaaatgagccaggtgtggtggcgggctcctgtaatcccagctactcaggagactgaagcaggagaattgcttgaacccaggaggcagaggttgcagtgagccaagatcgcgccattgcactccagcctgggcaatgagagtgaaactccgtcccaaaaaaaaaaaagaaagaaagttggagtggctgtattaatatcaaggttttcttctgtgcaaagaaataaccaggggtaaaaaagacattacataataacagattcgtatatgtcccttaacaacatagcttcacacaatacacgaagcagaaatggacaaatctgcaattacatgtggagacttcagtattcctctctcaataatagaagtagtagacagaaaaccaacaggatgtagaagaactgaacaacaccatcagccaacttggtctaattcacatttatagaacactcagctgaatatacattctttgcaagtgcacatggaacattcatcaatatagaccatgtcctgagttagaaaacatacctcaacacatttagagtagactaagctttccaggcccttgtgttttactttgttttttcacttttctttaaaatataatttacacaaagtttgcaaatctttttttttttcgagacggagttttgctcttgttgcccaggctggagtgcaatggtgcgatctcggctcactgcaacctccgtcccccgggttcaagtgattcttgcctcagcctcccaagtagctgggattacaggcgcctgccaccacgcccagctaattttttgtatttttagtagagatggggtttcaccacgttggccaggctggtctcgaacgccagacttcaggtgatccatccacctcggcctcccaaagtgctgggatgacaggcgtgagccactgtgcccagcctgcaaatcttaatagtaccatgtgatgaatttatatgtgtatgcctgtttaatcacccagttcaagatacagaacatttccagcaccccagaagattctcttgtgctacctcctaatcattacccctccccaaggtaactattctgacttctaacacagagtagttttgacttctacagagtagttttgctagctccttgggttttaattcactattaagtaacctctggcagtaaggtttatatgcgttagcggaatttggactccttactcaggttgcagttacaacccagttttcttttataaagcacatgtgtctcattgatcaccattgtattgtcttttttgttttttttgtttttttttttgaggcagagtctcactctgtctcccaggctggagtgcagtggagcgatctcagcccactgcaatctccgcctcctgggttcaagtgattctcctgcttcagcctcctgagtagctggaattacaggtgcccgccaccatgcctggctactttttgtatttttagtagagacagggttttaccatgttggccaggctggattcaaactcctgatcgcaagtgatccacttgcctcggcctcctaaagtgctgggattacaagcatgagccactgcgcccggtcccgtattgtcttttagaaaaactgtataactatttaaatattttcagtcaccaaactaaaaaacaaatactaaagttgaagtttattgctccccagaatgaaactacaaattacatctgatggccatttttacagtttaaccaataattagttctctatcatattatctttgtttcgttttcctttaacagaatacctaagactagtagttgttctttttttttttttttgagatggagtttcgctcttgttgcctagcctggagtgcagtggcgcaacctcggctcactgcaaactctgcctcccgattcaagcgattcttctgcctcaatctcctgagtagctgggattacaggcatgtgccaccccatctggctaattttgtatttttagtagagacagggtttctccgtgttggccaggctggtctcgaactcccgaccccaggtgatccacctgcctcggcctcccaaagtgctgggattacgggtgtgagccactgcatccggccggaagttgtttttatttttttactatttttaatttttttaaagaggtttatttggcccacaattctgtagctggaaagtccaagattgggcagctgcatctggtggggacctcatgctgcttccactcatggtgggaattggaaggggaccaggtgtgtatcaagagatcacatggtaggccgggcatggtggctcaggcctgtaatcccagcacttcaggaggccaagacaggcggatcacgaggtcaggagtttgagatcagcctggacaacatggtgaaaccccatctctactaaaaatagaaaaattagccaggcatggtggcccatgcctgtaatcccagctactcaggaggctaaggcaggagaatcacttgaacccgggaggcggagattgcagtgagccaagactgcaccactgcactccagcctgggtgatggagcaagacaccacctcaaaaaaaaatatatatatatatatgtgtgtgtgtgtgtatatatatatacacatatatatgtatatgtatgtgtgtgtatatatatatatctatatctcacatggtcacatggcaagagaggaagcaagacaggaaccaaggatgccagactcattttcttttcctttcctttttttttttttttttttttttttttgagacagagtttcactcttgttgccctggctggagtgcagtggtgcaatctcggctcactgcgacctctgcctcctaggttccagcaattctcctgcctcagccttccgagtggccaggactacaggtgtgcgccaccacatctggctaatttttgtatgtttagtagagacagggtttcaccatgttggccaggctggtctcaaactcctgacctcaggtgatccacatgcctcaccctcccaaagtgctggaattacaggcatgagccacggcacccggctctttttcttttagtatggagtgcttcacaaatttgtgtgccatcctcgtgcaaggaagccagactctttttaacaacctgctgtcttggaaactaatccagtccttggagagtgagcactcattcacccatgaggagggcattaatctattcatgagggatctacccccatggcccaaacacctcctactaggccccacctcccagcactgccactttggggatcagacttcaacataaattttggcaaagacaaaccacatctaaaccatagcagatatgataagtcacgtgagctttgaaggactgtgacatggtagaacagcatccacaggctctaccagagtttggtggaacagcatccacaggctctaccagagtttgagggagcagcatccacaggctgtaccagagattgagggaagctggtacaaattactggatccagcaccatagaaggggactctgggagaatcccatgtaaagattttagctagtccaggcatagtggcacacacctgtaatcccagcactttgggaggccgaggcggacagatagcttgagctcaggagttcgagactagccttggcaatacagcaagacccccatctctacgaaagaatacaaaaattattcaggcgtgatggcgtgtacctgtagtcccagctactcaggaggctcaggtgggaggatcatttgagcccaggaggtcgaggtcgtagtgagccgagatcgagccactgcaccctaacctgggcatcaaagtgagaccctgcctcaaaaaaaaaaaaaatttagctagttatcctttaaatgtatttcacccatacatgcatatgcctgctgtgtacctacaaaaactttttaaatctaaaatattaacatttggaaaaaaaatgtattttgctggggccaaaatccatacttggtagccctgagtatcaacagcattttttgagcgcccattatatataggatatcaaacttataattgtggagaatcacaagggaggtataaaataaatttcttgtccaggcacggtggctcacgcctataatcccagcactttggtaggccgaggcaggcagatcattttgagctcaggagtttgagagcagcctgagcaacatggcaaaaccccatctctactaaaaatataaaaattacccgggtgtggtggcgggcacctgtaatcccagctactcaggagactgaggctggagaattgcttgaacccaggaggtggaggttgcagtgagtagagattgcgccactgcactacagcctgggcgacagagcaagactctgtctcaaaaataaaataaagtgaaaattttttttttggcaagaatgtagaatttagaggtagaagatttagagcttggaaacaaagctgtatacctatatgtaaacacataggaaaaggtctgaaggaattttcacatgattacttaactctaggtagggattaagattgggatgggctgagggaggaagagtgaaagggaattacgtatttttttaactttactgaggaattactagaaatttttggtacatattacacgcataaacacagcaacacaaagatttgttttgagctttggctgccagttattagtggtttaaccccagagatgaattaaatatttatgttgttgttgttgtcattttcatcatgagagctggctgggtcttagaatcatttggtacaatccccactttttatagataaagaaattctaagattcctgcttcaaggcacgtatctctgattgcctaaccattgtgcttacttcttgtgagaggaggtaggccctctgtgcagtctgtggatttcaaggatatggaatacagatgcgtggtctctttggaatgtccaagtcgaaagttaaagatgcattaactagtttagggaaaatctaagattttatgggaagataaataaaaaagtttatgctcaaataaatccatgtatggcatgattgaaagattatgtttttaaatgaagttatgtttcctaaagaggaaagcagaccttttctgtggtaaatatagccttgcatgtgttttcaagaatggtgctttggaaaccatttttttctacagaagttagtgggagagggcagatggaaacacagattcttcctacctagtgccaaaagcactgagaaaatgttgcaaggagctaataacaagtacaaaaatgttagaaatgtgttaaatatataggtctgatatgtgtaagcatagaccaaaaagactacctgacctgagtttctaatgttctgttttgaagttaaacatatgatcccttttccttagcattcaacaagccaatgagatttcatggatttgccttcagagctgtctttttttttttttttgagacggagtcttgctctgtcccccaggctggagtgcagcggcgccatctcggctcactgcaagctctgcctcccggtttcacatcattctcctgcctcagactcccgagtagctgggaccacaggtgcctgccaccacgcctggctaattttttgtatttttaatagagacagggtttcactgtgttagccaggatggtcttgatctcctgacctcgtgatccactcgcctcagcctcccaaagtgctgggattacaggcgtgagccaccacacctggctgggtggttgcagttttaaatagcattccagggaaggtctgactgagaaggtgacagttgaacaaagacgtaaagagcatgaccaacacaccatactgacatgtctgtattccaagaaaacggaagggaaaggcactgagcctgaaacatgtcttggatatttcgcattgagaaaagtcatgcttcagaatgttacaagtatttcattggcttatactttatagacatattttaaagaggtgcagaaaggacagtttttgtctcaccatagcagccaaggtgcatttgcccagtgccttccattgtctttccctgtgggagtaacttttaggtccagtgatgaggagcctgtgatgtctgtgttctggtttgttgataacattaccatacagggcttcacgggtgtccttcttagcatggattgcttccattcattggttgctggaaaatttgctttcaaatgtttttaacagtgactcttagggaaaaaaaatacattttattagatgtccattctccctaaatttacctgagttcaactgaattccaataggtttttttttagtgttaatttaaaaaaacaagctggccaggtgtgatggctcatgcctgtaatcccagcactttgggaggccaaggtgggcggatcacttaaggtcaggagtttgagaccagcctggccagtatggtgaaaccccatctctactaaaaatacaaaaattggctgggcgcagtggctcacgcctgttaacccaacactttgggaggccgaggcaggaggatcacgaggtcaggagatcgagaccatcctggctaacatggtgaaaccctgtctctactaaaaatacaaaaaaaaggccgggtgcggtgcctcacacctgtaatcccagcactttgggaggctgaggcgggcggatcacgagatcaggagatggaggccattgggctaacatggtgaaatgctgtctctactaaaaatataaaaaattagccgggtgagatggcaggcacctgtagtcccagctactcgggaggctgaggcaggagaatggcgtgaatccaggaggcggagcttgcagtgagccgagattgcgccactgcactccagcctgggcgacagagcaagactccgtctcaaaaaaaaaaaaaaaaaaaattagctggatgtggtggcacgtgcctgtagtcccagctactcaggaggctgaggcaggagaattgcttgaacctgggaggtggaggttgcagtgagccgagattgtgccactgcactccagcctgggcaacaagagtgaaactccatctcaaaaaaataaaaataaataaataaataaataataaaaatacaaaaattagccaggtgtggtggcacacacctgtaatcccagctacttgggaggctgaggcaggagaatcatttgaacctgggaggcagaggttgcagtgagccgagattatggcactacactccagcctgggtgacagagcaagtctctgtcttaataaatacataaataaaaatgataagctgatttaaaaatgcatatgaaattgtagtgggtggaatagtcatactagtggaaaagaggaagcaaatgggagaagttgctattaggtaacaaaacttatagagctttagtaattaagggagtgtggtattagcacaagaaaagatacatagatcactggaacagattagagaagtcagaagaccaacatgtatatggatacttgagtaattgcaaaggtgatacgacaaagtctttttcagtaaatgatgtgggacagctggatatgaatgggaagaaaaatgaaactggatccctacctcacttcatatggtggttattttgagcactttaaagtattaatgccactgtctcttgactgctgagattctgctggcagtgtaattatttcctttaccgggaatttgccttgtctgtttctgctttagatcttctctaatgatagagtccctggctttaggcttcttccttcaactccagtggatattccctactttgttttgtcctatggagttaagaaaattattccagaaaagcagatatctttgtttaacttccagatcattaaaaagttgtgttagtattcaaacattaaacagatgttctttgttagtaaaaggaggaaaatagtgtaaccattcttaataattgaatgaattcatatttggtcttaaatatttcaaaatatttcagatcaattctttggtatgctagtggtttctactgaaggttaagctttgacctactaaaagcagctcataaagaaagctttgtcagacttcagttcccatgaacctgctcacaaagaacactttttcccaatgtagttttgtcttgtgtatgaaaggaaaactgcctgccaaggaggctaagaaggttagctgaatgctattgtaatggtgagatgtttgtccagaaaaccattcctgacacctttcaaatcaaaagccttttttttttccttaaactttttgattgctggatttctgtttgaggaagttatgttgctacaatgagggtagcaataaatgcctcctgggaagttggaaataaaggcaaaggagagttaaacacaatagatgagatcagaaatgggcaaagttatcttaaagagacagaatggctccctggctagaataagactgaattgtccctagatcaaaaaaagaagagaatgtgtgtggcagaaggaagaaagtggactctacactgtgttagttaggaaaaccagaaattgggccaaattgcctgtttagtgggagagatagcttttgagagctgtgatcccgctggtgtggctggctctgggcagatatttgtatctgaaatgactcatgctgtgggacccttcctgagatctaacacttacagtggtttgatcagaaattgcaccatgcttgccaagcaacttttggactaaaagttgctgcccacgtatatcaggggaagaatatatatatatatatatatagtacctatcttagcatctgatttgtatgaccattacttcaatgtaaaataataaattggctttccagcttaaacttcaatttcttgtatattatatgatcatgagacaacctccctgggctgatcaacagcaggacgctaaaaagattgagtatctgagtcaggaaggtagagggccagaccctacatgtagctaattcaccattgtgaatctgcatgttaggtaaaactatggatttgttttttgtcttttgagacagattctcaccctgttgcccaggctggagtgcagtggcatgatctcagctcactgcaacctttgcctctgggttcaagagattctcttgcctcagcctcccaaatagctgggattacaggtgtgcaccaccacgcccaaccaattttttgtatttttaatagagacgggagtttcaccatgttggcgaggctggtctcgaactcctgacctcaagtgatccgcccacctcggcctcccaaagtgctgggattacaggcatgagccactgtgccaggcctaaaactatggtttttaaagatatacacgcatgtggtaaagctatgaatcaaagcaagagaatatttcatctcaatgttaggagagtggttttggtggggtggggtatgtagtcaggcagaggcacacaagagcttcaaaggtgctgttaatggtccctttcccaagctagatggggattccatgggtgctcattttttagtaactctaatttaagctgtacatgttatatatagtcatggatatataatcattattttaaaaatgaaggcaaggaggataccataaaatgaggtacttcatatttaaccagctggcatcctaagcacctttcctgccctcccctctctgcacctggcagagttgatcacatcctccccattacccactatacatgggtgtcagtgccaatagtgctttgctcttgtattattgatgagtcttgctccttttcctaaattgtgaggcctcctgaaggcagcacccttgtcttatgaaaaagttgagcttctgaggatatgtctttggtgaattttggaaaacgtttagcctttatctctgaagataccacttttcattaccctctcttttcatttcctgctgaaacccctttttttgtttgttttttgttttgttttgttttgttttagacagagtttcactcttgttgcccaggctggagtgcaatggtgtgatcttggctcaccgcaacctctgcctcccacattcaagtgattctcctgcctcagcctcccaagtagcagggattacaggtgctcgccaccacacccagctgattttttttgtatttttagtagagacggggtttcactgtgttggccaggctggtcatgaactcctggacctcaggtgattcacctgcctcagcctcccaaagtgctgggattacaggcgtgagccactgcgcctggctgagaacccacttatgtgtagcttggacctttatgttctctcttctatgtctctaaacttctctttcatgttttgaatcttttcatctctttgttgcatggtaggtaatttcctcagatctgtcatctagttcaatacttttttttccagctgtgactaatttgctgttcattccacccagtgacattttaaattctcttggattttttcatttctatttccaatagtagttgttctttgcttacatttcagtttcctgttttatttttaaaacattttaatcatttttcttttatgttctgtgttcttcaatctaagtgaaatacttggggttgttcagtgctgttatggcttgttttacttgactcattcatgggcctgcttccctatcgtaatttctaattacgagcaatgtggctgatcctaatgtatgagaaccctgggggacctggatcgggactgctccacagatggggtttatgtttaccaatgccaggcaccttggagtgctaccaacatagaagcacttcagattaaccgtctgcatagagctttgcttggaaagagaataaattcaaactctgatgctgaatggggcaggcttatgatgacacattcttcggaaagattcttttttattcgttccaatcaatgcttgagataagacagatttccttgccagctccatttgccagcaaatcaatttttccctagcttactccttcacttagggttaggtccttgggattctggcttggcagagaatatcagctccagctccccatcatctactccgctctgaaaaccaaggctccagaggtgtgccagatagttacagggtagcctgtagcttcagggctagcttctgttttagtttgggggcattcttcttggttttggggtcctgtggattttccatactttcttgaaaattcagctgtgcatttgaaaggctttgttatatattgcactcagcattgccaggtgtttggagaggggtgttttgggatagctaggctattgtattgtgcaaaattaaagcctcatattctatttctatatgaactgtagttaagtgttaataatctgatgtctgggatgttttgattcttacatcaataactatgacatttattaataatcatattaaataacattaactcaagctcattggttacattacaaaggacactgatacattacaaagcacacatacaagcactgcacaccagtattgaggcttccagccccctctacatgatcatttatttatttatttatttttgagacggagtctcactctgttgcccagactggagtgcagtggcatgatcttggctcactgcaacctccgcctcccaggctcaagcgattctcctgcctcagcctcccaagtagctgagattacaggtgcgcaccactaccacctggctaatttttgtacttttagtagagatggggtttctccatgtgggccaggctggtatcgaactcctgacttcaaatgatccacccgcctcggcctcccaaagtgctgggattataggcatgagccaccgcgcctggtcatgatcatttttattttggaaccattcattcagaaaaatttcacagccattttgaacttgtgctatgacatggcaaaatctctagtaaatcattttaattcctgatgagttcatttttataatgataaatttctaaggaaaatattttgttttcaacttcttgccaccatgtcaagactgtacattttaaaacatattacatcacattttcccttcaaagcaatgccagtgaattctgttaatggtatcattcatctcatgttacccaactccagatcataaagtttccctcattctccttcctttccacaaacctaccaaatcctctatcgccaagtcctttgggttaattcacggagaaagtatcgagcacagaggcagaacagggcctctggagagtgtcacatttgtgtgtgaatcctgactcttgattttcactagctttgtaaccttagacaaattactaccaggcacggtggctcacacctgtaatcccagcactttgggaggctgaggcaggatcactggagtccaggagtttgagaccagcctaggcaacatagcaagatcctgtctctacaaaaaataaaaaattagctgggtgtggtggcacacacttgtattcccagctacttgtaggggctgaggtgggaggatcacttgagcctgagaggtcaaggctgcagtgagccatgatcgggccactgcactcagcctgggtgacagagcgagaccctgtctcaaaacaaaccaaaaaacaaattagttaacctgtctggagctcagtcccatatttgtaaaatgtggctaactacagcaccttcccttatagaaagctgtttgaggatccagttatgcatttaaagggcttaacacattacctggcacaggaaaacaaagacaagctgctgtcctgttttctttgttgctgccatccttctcacaaggtctcgacggagtctgtcttcatcacgatttcactgccctcatgcctgttctgtttaccccttttctagactgggcccttacttaccttagcctgagctattgtgaaacactcccagcggcttcctgacttgccccactccctccttccgccgtcctgtcctgctcctaatcgtgtttgtcagaaatgcctctgactgatacactggcaaaatcagaaatcttcaagggatccccctttttcttgctgtagcttaagatctaaatctcttaacctagatcacgatctgacactagatatatttatagtccatgaaaataccctgaaagctttcaagtaccagatgaaagtgagctccttcattaccacctcaactcactgtaggcggcttttcatgtgcaacagctaagctttaagagggctgggactgtgacctactttattttgtattgttatagcagctcacttggtacccagagcaaggaggtatatttgtttcttgcatatttggcaggttgattactatataaattactctattgaagattaaaatggtttactgaagatgtcgccatatatcttagcaaggtcaaaacagttgtgtaatttttctgaatgaatactttcaaaataaaaaagaccactcagaccagaagcctgaacatctgtgagcaatgcttatacatgtgctttttaataaaccaacatgttgggccgggcacggtggctcacgcctgtaatcccaacactttggaaggttgaggcaggtggatcacaaggtcaggagtttgagaccagcctgaccaacatggtgaaaccccgtctctactaaaaatacaaaaattagctgggcatggtggcgtctgcctgtaatcccatcgactcaggaggctgaggcaggagaattgcttgaacccgggaggcagaggttgcagtgagccgagatcacaccgtggcactccggcctgggcgacagagcgagactctgtctccaaaaaactaaactaaactaaactaaaataaaccaacatattaaactttaataggattattgatctgaaaaccaaaacatggtaggaattagtttataagtcatatttagacgcatcatcttataaccctctcagcaaaacctgtggggcaggtagattatggataacaagtgttcacttcatgaattgtccctgttgatcaggtgaagtagaacttggatctggggcagctcttgtgactccagattcttggtttttgagcaggtgttgggggaaatacctttcttgttgaagttctttagtactcttttttttttttttttgagatggagtcttgctctgttgcccaggctggagtgcagtggcgcgatctcagctcattgcaacctctgcctcatgggttcaagctgctctcctgcctcagcctcccgaacagctgggattacaggcacacaccaccacgccaggctagtttttgtatttttagtagagacggagtttcgccgtgttggccaggctggtcttgaactcctgacctcaggtgatctgcccaccttggcctcccaaaatgctgggattacaggcataagccactgcacccggcccatcttttaataagagctcagcatattcatacttgattgatcagcattttcgtcattagaaatgaggtggggtttttttgtttttgtttttttgtgttttcatttcaaagattaaaaacctagagaggaaggagagtatttggggaaaatggtggaagagggagcaccagtcatctgtctccacacctagacatcaattgtactggcaggatctgtctgatctaactattttggaactcggaagtctactgaggtttacacattcttgctgggatggcaaactgtggttaattttggtcagtttcaactcttagcacagtagcagctatgcactccccaaccccagttctgtggaaggcggctacgcgggtgttcctagagcttgcacacagcgtgggagccagaataggcaaaaagcatcttgtcctctaaatatttggggtctgtgctctgactgctgattgctgcttctgatcgtagaggtgcagacaaagagatgggtggccattgtcgttacacctcctcattattgcaagttcttccccctccaattaacaagacttccaggggatttaaagagctaatggtcctgctcccttgcttcacttttattttttcccatttgggagccagatgttagagaatatgacattgaaaagcaactgcatataagggggagaattaagaagtgactgtgcatgcctaggaaaaggtataggcacagtaaagacctgagaagaccctgagtttatacccaagactgatctttggcacagacggcctacagtaaacaaaaagaatcacacacacatccacacacagaataacaaaacccagtaaacttgaaaaggggaggatctgattttctgaattaccacagtattagattcaaatgttcagttttcaacaaaacaaatcacgaggcacacaaagaaacaggaaagtatgctcttccaaggaaaaaaaaaacaactgaaactgtgagaccacatagtagacctactagaaaaagattttaaaacaactgtcttaaagatatgcaaacaactaaagaagatgtggcgctgggggcggtagctcatgcctgtaaacccagcacttggggaggccaaggcaggtggatcacttgaggtcaggagtttgagaccagcctggccaacatggggataccctgtctctactaaaaatacaaaaactagctgggtgtggtggtgtgcactggtaatctcagctacttgggaggctgaggcaagagaatcgcttgaacctgggaggcagaggttgcagtgagccgagattgtgccattgcactccagcctgggtaacagagtgagactccttctctaaataaataaataaataagatgtggaaaaaggtaaaacagcgtatgaaggctgggtgtggtggcttacgcctgtaatcccagcattttgagaggcagatcagttgagtccaggagttcaagaccagcctggccaacatgttgaaacccgggtcatcgctagtaaataagacaaaaattagctgggcgtggtggcacaagcatgtagtctcagctactcaggaggctgaggcaggagaatcacttgtacccgggagatggaggttgcactgagccaagatcgtgccactgcactccagcctgggcaacagagacagattctgtctcaaaaaaaaaaaaaaaaaaagaaaaaagaaagaaaagaaaaaggaaaacagtgtacaaataaaatgtaaatataaataaagagatagaaaccctaaaaagaaactgaaaataattctggaactgaaaaatacaataactgaaatgagaaattcactggagggattcaaaggcagatttgagtaggcagatgaaagaatcagtgaatttgaagataagatattaaaattatcaagtctgacaaacagaaaaatgtttgaagaaacatgagcagagcctaagggtcatcatcaaagagactaacatgttttctgggagttatagaaagaaatgaaagggggagagagattatttgaagaaatagtatctggaagcttcccagatttgacgagagacatggatataaacatctaggaagttaaacgacctccaagtaagatgaactcaaggacacccacaccaagacacattacaatcaaactcccaaaagcgaaaaccaaagaacctttgggctggattcagtggctcacacctgtaatcccagcactttgggaggacaaggcaggaggatcacttgagttcaagctcagcctgggcaatatagtaagacctcatctctactaaaaatcaaaaaaattagccgggcgaggtggcatttgcctgtagtctcaggtcctcgggaggctaaggtgggaaaattgcttgagcctggaaggtcgaggctgcagtgagctatgattgaggcactgcactccagcctggcctaccgaatgagaccctgtctcaaaaaaggattcaacctgaggaagctgactaaaaaaacaaacttcagagaggagagaaatgcctcctcatatacaagggacccccaataagattataagcagatttctcatcaaaaactttggaggggtcaggtgcagtggctcacatccataatcccagcactttgggaggctgaggcaggtggatctcttgaggccaggagtttgagaccagcctggccaacatggcgaaactctgtctctaaaaatacaaaaattagccagggatggtggcgtatgtgcctgtaatcccagccatctgggtgcctgaggcacaagaatcgcttgaatctgggaggcagaggttgcagtgagctgagatcaggacactgcactccagcctggatgacagagtgagaatctgtctcaaaaaacaaaacaaaacaaaaaaacaaagtttggaggcaagaatacagtgggctgatatattcagagtgttaaaaagaaagaagacctgtcaactaaccatctaatacccagcaaaactgtccttcagaaatgaaaaagaaattaagatattcccaggtgaacaaaaatggagggagttcattagccacaagacctgccccgcaagaaatactcaagtgagtcctgcagagggaaattaaaggatattaaacagttactcaaagccatataaagaaatgaagatcttggccgggcacggtggctcatgcctgtaatcccatcactttgggaggccgaggtgggtggatcatgaggtcaagagatggagaccatcttggccaacatggtgaaaccccatctctactaaaaatacaagaattacctaagtgtggtggcttgtgcctgtagtccccagctactcaaggaggctgaggcaggagaatcgcttgaacccaggaggtggaggttgtagcgaactgagatctggccactgcgctccagcctggtgacagagcaagactccgtctcaaaaaaagaaatgaagaaaaaaaaaaaagaaaaagaaatgaagatctcaaaagtgaaggatatgtgcaattttaaaagctaatattactgtaacaatggtttataattgcatttttgtgttctacatgatttaagagactaaaatgcttttttaaaattagtctaaaagctagtagtattgtaatgttggtttgtgaatccacattttcttttcttttcttttttttttttttttagatggtgtcttgctctgtcacccaggctggagtacagtggtgtgatatgggctcactgcaacatctgcctcccgggttcaagtgattcttgtgcctcagcctcccaagtagctgggattacaggtgtgtgccaccacacccagctaatttttgtatttttagtagagacggggtttctccatgttggccgggctggtgttaaactccgacctcagttgatctgcccgccttggcctcccaaagtgctgggattataggcgtgagccaccgtgcccagcccacattttgttttctacataatttaaaataatttttttggtaaaataatttctaaagcatttaaaataattatttactttatggtttggggcacacagtttataaaggtataattttgtgatatcagtaagcaaaaaggttgaggacccagctgtaatggagtggagcttttctgtgttactgaaattaagctgatagaaatttaaattagtgttataactttaggatgttaaatgtaatcctcatggtaatgacagagaaaatcactgtagaatatacacaaaaggacatgagaaaggaatttaaatattttaatgtacccccaaaaatcaactaaacacaggagtagacagtaatgcaggaaactagggacaaaaaccttaaggcatatacaaaacaaaatgacaagccaggcgcggtggctcacgcctataaccccagcactttgggaggccgaggcgggtggatcacgaggtcaggagttcaagactagcctggccaagatggtgtaaccccgtctctactaaaaaaacagaaaaattagccaggcatggtggcggggacctgtaatcccagccacccgggaggctgaagcagagaattggttgaacccaggagacagaggttgcagtgagccaaggtcacaccattgcactccagcctgggcaacagagtgagactcgtcgcaaaaaaaaaggaacaaaatgatagaaataagtccctgtttattggttaattaccttaaatgtaaatggattaaactctccaatcaaaagacaaagattgtcaaaatggtttttaaaaccaatctgggctggacgcagtggctcacacctgtaatcccagcactttgggaggccaaggtgggtggatcacctgaggtcaggagttcgagaccagcctgggtaacatggtgaaacccaaactctactaaaaatacaaacattagctgggtgtagtggtgcatgcctgtaatcccagctacccaggaggctgaggcaggagaaatgcttgaacctgggtgacagaggttgtagtgagctgagattgcaccattgcactccagcctgggcaacaagagcaaaactccatctcaaaaaaaaaaaaaaaaacaaaaaacaatcctactatatgctatatataagagactcacggccaggtgcagtggctcaagcctgtaatcccagcagtttgggaggccgaggccagcagatgacaaggtcaggagatcgagaccatcctggttaatatgatggaaccctgtctctactgaaaagtggaaccctgtctctattaaaaaatacaaaaaaattagccatgcttggtggtgggtgcctgtagtcccagctactcaggaggctgaggcaggagaatggcgtgaacccgggaggcagagcttgcagtgagccgagatcgcaccactgtactccagcctgtgcaaaagagcgagactccgtctcaaaaaaaaaaaaaaaaaaaaaaagagagactcactttaaatccaaatgttgctggtgaaaggatagaaaaagatattccatgcaaatagtaatgaaaagggatcggggtggctattctactatcagacaaaaagagttacagaattgcaggaagaaatagacagttctacaataaaagttggaagctttaatatcccactatcaataatggatagaaaaataaagaaactttacatgataaaccaactagatttaacagacatttatagaacactctacccaataacaatagcatacattttctcaaatgtagatgggatgttttccaggatagactatatgttaagccacaaattagtgtcaatagattttaaaagatatacaaagtatgttcttattgcaaccacaacaggataaagttagaaatcagtaacagaaggaaaattggagaatccacaaatttgtgcaattaaccatatactcttagtcaaccaaagggtaaataaagaaattacaagagaaatttaaaaatacttaaagatgattgacaatgaaaacacacataccaaaatttatgggacagtgaaaacagtgctaaaggagaaatttatagctttaaatatatacattaaaaaataagaaaaatctcaaatcaacaacctaaactttaccatttaaggaactagaaaaggaagaaaaactaaactcaaaactagcagaaggaaggaaataataagattagaacagaggtaaaggaaatagagactagaaaacaatagagaaaatcagtgaaaccaaaagttgaatttttgtaaaggtaaacagaattgacaaacctttagccagatggatcaagaagaaatgagagaagacacaaatgattaaaaccagaaacaaagtagacccttactattgattcaacagaaacaaaaaggattatgacaggatggtgatctgttgaataccaacagattggataacctagatgaaatggacaaacccctagaaacacaaaacctactgagactaaaccgtgaaaaaatagaatacctgagtagatctataattagtaagaggatagaatcaataatcaaatatctccttgtaaagaaaagccctagacacgaagccttcaccagtgaatttaaccaagcatttaaagaagaactaacactatttcttctcaaatttttccaaacagttgaagaggagggaatacttctgaattcactctatgaggccagaattatgctgatatcaaaactagaaaagataaccacaagaaaaatacacatcagtatccctcatgaacattgatgcaaaaatcttcaagaaaatactagcaagtaaattcagcagcatattaaaaggattatacaccatgaccaaagtgggatatatttctggaatgcaaggatggttcaacatatgaaagtcagttacctaatatgctgttttaacaaaatgagggacaaaatcacatggtcactccactggtccataaaaagcacttgacaaaattcaacacccttttatggtaaaaacactcaacaaactgggaatagaaactaccccaacataataaaagccatatatgaaaaacagtgaacaattatacttaatggtaaaaaacggaaagcttttcctctaagatcagaaacaaggcaaaatgcctgcttttgtcacttcagttcaacacagtgctggaaattttagccagagtcattagccaagaaaaagaaattaagaggcatcaaaattgggaaggaagaagtaaaagtatctctgtttgcagatgacatgatcttgtatgtagaaaccctaaagattccacaaaaaattgtttgaactaatacatgaaactgacatagtagcagcatacaaagtcaatgcacaaaaatcagttgcatttctaaacaccaacaatgaataatatgaaaaagaaattaagaggaaaattccacttaaaatggcattaaaaagaataaggaggtgaaagactcatacaatgaaacatgaaacattgctgaaagaaattaaagacataggtaaatagaaacacattgtatgttgagaaattggaagacttaacattgtgtgtttggtttttggagacagggtcttgctctgtcacctaggctggagtgcagtggcacaatcacagctcactgcagcctcaatctcctaggctcaagtgatcctcccacctcagactcccaagtagctaggactacaggcatgcacaactatgcccggctttttttttttttttaattttttgtagagatggggtctcactatgttgctcaggctggtcttgaactcctgggctcaagtgatcctcctgccttggcctcccaaaattgtgggattacaggcatgaatcaccccgactagcctgacttaatattgttaagctgtccataccacccaaagtaatttataagttaattcaatacaatttctatcaaactcccaaggccattttttggcttgggagttttagaatataaaaatttattctaaaattcatatgggatctcaggagaacctgaaaagccccaacaaacctgaaaaagaacaaagctggagatctcaaacttcctgaacttaaaacttaactgcaaaaatgcagtcattgaaacagtgtattggacttggctgtggtatgaagaaataagaaaaagaagagaacagcatgatacataaaaatagacatagagaccgatgaaatcaatagcccagaaataaaccctcttatatagtcaagtgaaatttttttttttttttgagacagactgtcactctgttgcccaggctgcagtgcaatggcgtgatctcggctcactgcaacctccacctcctaggttcaaatgatgctcctgcctcagcctcccgagtagctgggactacaggcgtgtggcaccacacctggctaatttgtgtatttttagtagagacaggatttcgtgttagccaggctggtctggaactcttgacctcaagtgattcgcctgcatcagcctcccaaagtgctgggattacaggtgtgagccaccgtacctggcccagtcaagtgatttttgataaggacgtgaagattgttccacagggaaaggacagtcttttcaacaaatggtataggggaaactggatattcacatgcaaaagaatgaagttggacccttacctaatactacattcaaaaattaactcaaaatggccggggcctggtggctcacacctgtaatcccagcacttgggaggcccaggcaggcggatcacttgaggccaggagtttgagactagcggggccaacatggggaaactctgtctctactaaaaatataaaaaattagccaggtgtggtgatgcatgcctgtagtcccagctactctggaggctgaggcatgagaatcacttgaacccgggaggtggaggttgcagtgagccaaggttgcaccattgcactccagcctgggcaacagagcgaggctccatctcaaaaagaaacaaacagacaaaaaactcaacaatgaaaaaacccaattcaaaaatgggcaaaggacttgaatagatgtttccccagagaaggtaaacaaatgaccaataagcatatgaaaaatgaccatcactaattattagggcatgcatgtcaaaactataccccacacccattaggatggctactgtcaaaaaaaagaaaaaaaggaaataacaagggttggtaaggatgtgagaaatgggaaccctggtgcattgttcacaggaatgagatgatgcagccaatactagaaaacagtatggtggttgctcaaaaaaattaaaaatagaattaccatatgataccaaaattcagtcctgagtacagtatgtacccaagataattgaaagcagtatctcaaagagatgtttgtacactcatattcataggagccttattcacagtagttaaaatggggaagcaatccatgtgcgtctatcaacggatgaatggataaacaaaatgtagtatgtacatacaagagaatatgagtaagccttaaaaaggaaggagttctgatatgtgctataacacggatgaaccttgaagatactgtgttaaggagataagccagtcagaaaaaaggcaaatactgtatggttccatttgtatgaggtatttagagtattcaaaatcacggtaaaaggaatctgaggagattaaaaaaaaaagagtagtcaaaatcataaagacggaaagtagaatggtagttgccaggggctggggggagggatgaatggggaattattgtttaatagagtttcagttttacaagattaaatattcgtggagatggataatggtgatgattgaagagcattatgaatgtattgaataccactgaaatgtatactttaaaaagggatactggtaattttacgttatgtgtattttaacattaaaaaattgggggatgagggctgggcatggtggcccacacctgtaatcccagcactttgggaggccaaggcgggcagatcacgaggtcaggagatcgagaccatcctgcctaacacggtgaaaccccgtctctactaaaaatacaaaaaaagcggggcgtggtggcgggcgcctgtggtcccagctactcagtaggctgaggcaggagaatcgcttgaacccaggaggtggaggttgcagtgagccaaggtggcgccactgcactccagcctggtgatagagtgagattccatctcaaaaaaaaattaaaattggggcatgagggcagggtgcagtggctcacatctgtaatcccagcactttgagaggcccaggcaggaagatcccttgtgcccaggagattgagaccagcctgggcaatatagtgagaccttgtctctacaaaaaaaaattaaaattacctgggtgtggggcacacgtctgtagtcccagctacttgggaggctgaggtgcgaggatcgcttgagcctgggaggttgaggctgcagtgaactgtgattgcaccactgccctcctacctaggtatatttgttttttggtttttttgttgttgttgtttcttgttttttgagacagagtcttgctctgtcgcccaggctggatgcaatggcacgatctcggctcactgcaacctccgcctcctgggttcaagtgattcttcctgcctcagcctcccaaatagctgggattacaggcatctgccaccacgcccagctaatttttgtgtttttagtagagacggggtttcgccatgttggccaggctggtctcgaactcctgacctcaggtgatctgcttgccttggcctcccaaagtgctgggattacaggcgtgatccaccacgcccagccctgtttttgtttttgttttttcaacagatgtaatttctgacttgtataccttttcaatcaagaatatgtatggactgcagcctgatgaagtttttcactcctttagtaatgtcctccttgttttacattttcaaagcctgcatagttacagattcatttgttttcaacgtttccccaggggaagacggaatctatcactgtggtgaagctgctgagctgctttgatgacctggtggcagcaggcacagcctctggcagggttgcagtttttcaacttgtatcttcattgccagggagaaataaacaggtgagtactcatgatcttaacacgtgttaacttcttggcacattcctcatggatttttaaaattagaaatcctcatctgcttagaaagtttatgctcagagaaagccgggcacgactttctctgcccaggctcatgcctgtaatcccagtactttggaaggccaaggcgggctgatcacgaggtcaagagatcaagaccatcctggccaacatggtgaaaccccatctctactaaaaatacaaaatttggccgggtgcagtggctcatgcctgtaatcccagcactttgggaggccgaggcaggcagatcacgaggtcaggagatcaagaccatcctgactaacacagtgaaactccatctctactaaaaaatacaaaaaattagccgggtgtggtggcgggtgcctgtagtcccagctactagggaggctgaggcaggagaatggcgtgaacccggaagacggagcttgcagtgagcggagatcacgccactgcactccagcctgggcgacagagggagactccatctaaaaaaagaaaaaaaatacaaaaattagctgggcgtggtggtgcgtgcctgtagtcccagctactcgggaggctgaggcaggagaatcacttgaacccgggaggcagaggtcacagtgagctgagattgtaccacgctactgcactccagcctgacggagcgagactctgtctcaaaaaaaaaaaaaatgctcagagaagcttaacactgtgctgtttataattggagaacatttttgtgctgggttggacacttggcataaagtacatgtgggtcatttcatttttgcttaatattctcaaggtatgctctctgtgggttttgaaggtgactagacagatggaactttgtgcagggttctgcttggaaaacgagattgggaaaaccagctcttccctaactaggagtgattgtataccttttccatgtagccccagctcacagcatttatcctttttttttcttgtgtatatttttatcccttgttcatagcttcggagatttgatgtcactggtattcacaaaaatagcattacagctctggcttggagccccaatggaatgaaattgttctctggagatgacaaaggcaaaattgtttattcttctctggatctagaccaggtaaaattattttcagaaatactgttggctcttaccttcttacatttggaaaaactatatttataacttgtatttttagtcaacttgtattcttgatcatcatccctttataatctcaattgttatttgtaacatttacttttatagacttatgttttataagcttccacttctatgactaaggagttggcctactggaacattcacttttttcattccactgttgtgtattacttttacttgaaaaagaagctattatcattcctacttccttgaaaggttagtaggagtgatgccaagcacttctgaatcctaactgtggacaagtcagtgatttcaatggatggaggactctgccagccacctggcctgtgtgagatgacctcatgtgacaggaagtggcagaggaggttaggtggcagtatggtgaagatgaagaaactggagtgccaagagatccaggaactagtccaggggtgcaggcttgcacctcacagagcttgctttcaaactgtgcttctgcttcgacgcccgtgccttttccactgcacgtatggcttgatgatctgctgggttttatttgttttgtcatgtgtctgcaaccaaactgaactccttggtggcacagtcctttctttttcttatttgtagccttcattcctagagcactataggaattcagcaattttttttttttttgagacagtctcgctcttgtcgcccaggctggagtgcagtggcccaatctcggcttgtgacaacctccatatcccgggttcaagcgattctgccacctcagcctcgcaagtagctgggattacagggacctgccatcatgcccgactaatttttgtatttttgtagagacggagttttaccatgttggtcaggctggtcttgaactcctgaccttagatgatctgcctgcctcggccttccaaagtgctgggattacaggcgtgagccaccacgcccagccaagaattcagcaattattagctgcatgactttcagtccctctgatccaagactgacctagtacaaatattctctagtagtagttctcaagctttgtagtcacaggatccctttacactcttagaaagaggaccccaaagcatttttgttcatatgggttatctctaccaagtacaccatgttagaagttacaactgagaaatttaaaaatatacatatttttttgagatggagtctcgctctgttgcccaggctggagtgcagtggcgcgatctcggctcactgcaacctccgcctcccgggttcaagggattctcatgcctcagcctcccgagtagctgggactacaggcacctgccaccacgtctgactacttttttgtattttttgtagagatagtgtttcaccgttttagccaggatggtttcaatctcctgaccctgtgattgaaatctcccacctcagcctcccaaagtgctgggattacaggcgtgagccactgcgcctggctgaaatttaaaaatattttactttgaaataataaatccataacatctgcacataagtgacatattttgtgaaaatatctctatagctctattttcaaaacaggtgagaagagtgagtggcattgatttatatttttacaaatttctttattatctggcttaatagaagatggctggattctccctaatctcaagtaatcagggacacaaacactgcggaaggccgcagggtcctctgcctaggaaaaccagagacctttgttcacttgtttatctgctgaccttccctccactattgtcccatgaccctgccaaatccccctctgtgagaaacacccaagaattatcaataaaaaaataaattaaaaaaaaaaataaaaaataaaaaataaaaaaataaaaacacacctcaccaagctcagccaccaacttaaaaaggactggacaatacttttaccactttcccttctcagaattcaggcctgtcctcggaatgctacagggtacagcccatttgagctcctgtatggatactcctttttgttaggccccagtctcattccggacactagaccaacttagactgtgccccccctcaaaaaaaaaaaacttgtcatccctactatcttctgtctagtcatattcctattcaccattctcaactaactcatacatgccctgctctggtttacactgccggtttacactgtttttccaagccatcgcagctgatatctcctggtgctatccccaaactgccactcttaactcttgaagtaaataaataatctttgctggcaggactgtgctgaatctccttaggcactctctaatcagatatcctgagtcgtcccaattcttagaccttttatacctgtttttctccttctgttattccatttagtttctcaattcatccaaaaccatatccaggccatcatcaatcattctatatgacaaatgtttcttctaacatccccacgatatcaccccttaccacaagacctcccttcagcttaatctctcccactctatgttcccacgccgcccctaatcctgcttgaagcagccctgagaaacatcgcccattctctctccataccaccccccaaaaatttttgccgccccaacatttcaacaccattttgttttatttttcttattaatataagaaggcaggaatgtcaggcctctgagcccaagccaagccatcacatcccctgtgacttccacgtacgtatacgcccagatggcctgaagtaactgaagaatcacaaaagaagtgaatatgccctgccccgccttaactgatgacattccaccacaaaagaagtgtaaatggcctgtccttgctttaagtgatgacattaccttgtgaaagtccttttcctggctcatcctggctcaaaaagcacccccactgagcaccttgcgacccctgcccctgtccaccagagaacaaccccctttgactgtaattttccattaccttcccaaatcctataaaacggccccacccctatctccctctgctgactctcttttcggactcagcctgcctgcacccaggtgaaataaacagccatgttgctcaaaaaaaaaaaaaaaaaaaaaaaaaaaaaaaagaagatggctggattctgcattcaatctgttgccatacattgttttgattgaagtgtataaagaaaaactggctttacacagacatgtagttggaaatgggaggagtattttgatagccttttcagatagttgtggacattctttaataatatcctcatatgactacctcataaagcaaatggtagttgctttaaaggttacggtgacaaatgacaaatggtagtttctttaaaggttagtaaaaatgtggaatctgaaaccacatggatgaatttttcctactctgttacattaaaatctactttacccatgttggattttgtaacattatgtattggtcacttagaaaatactattcacagagtgatgcagatcttccaaatgttgacactttttttttttttttttttttttttgagacatggtcttactcctctcacccaggctggtgcacagtggtgcaatcacggctcactgcagctttgacttcccaggttcaggtgattcccccaccttggcctcccgagtagctgggactatgggtgcacaccaccatgcccagctgatttttttgtatttttatagagacagggcttcgccatgttgcacaggctggtcttgaacatctgggctcaagcaatctgctcaccacagtcttccaaagttcttggattacaggtttgagccaccgtgccagctgataaattttctaatacaatatcaaaaaaataccttcattaacatcaacatcattgtaatcgggaaagtctagctataaggaatcatgtcaagttcacagggacagatacaagttttcagattgctaatctttgtgtgagagcaacaaataccattacttgttttccttgaagtgacaggcttttttttttttttgagaaaatgtctgctaaatacccaaatttgaataattacagcatttcaaataaaaatggtgttttgtgaaaaaagcagctggctcagctcatagctgcaacagttgcacaagtggtttccttgagagaaccactgagtgtatttcagtgtgcagcagaagggagaatacaaaagtacctatcctctggccaggtgtggtggctcacacccgtaatcccagcactttgggaggccaaggcaggatgatcacttgagcccaggaatttgagaccagtctgggcaacatggcaaaaccccatttctaccaaaaaacataaaaattagccaggtatggtgatgcacacctgtaatcccagctactctggaggctgaggttggaggatcagttgagccttggaggtggagattgcagtgagctgagattgcaccactacactccagcctaggccaagagccagaacctgtctcaaaaaaaaggtttgcaacattttcatgtaatggaaatttctttatcttgattttggtgttggttacatgactataaatttgtcaaaattcatagaattgtatacccaaaaagggacgaaatttactgtaagttttaccaacaaatctgatcactgccccctacttccctcacaaaatgtcagtgatgttacagcagtatttctgaaataattgatgaaacttttcatatatatattggatttcatatatatgaaatatacatatatttcatatatatataatgtatatatatatatattttttgagacagagtctcactgtgttgcccaggctggagtgcagtggtgcgatcttggctcactgcaacccttgcctctgggttcaagtgattctcctgccgcagcctcccaagtagctgggattacaggcatgtgccacctcgcccagctaaattttgtatttttagtagagacgaggtttcaccatgttggccaggctggtctcgatctcctgacctcaaacgatccacccacctcggcctaccaaaatatagggattacaagtgtgagccactgcacccggcctgatgacacttttctgtaaaagtaacttacagaatcagattttttatacaatgaaatatgctttgtgttagcagtcgtatgccttctagaattttattttgtgtttatatataaaatatggtttttttttcttttttaaagacagagtctcactctgctacctgggctagagtgcagtggtgtgatcacaactcactgtaacctgaactcctgggctcaaatgatccttctgtctcagcctcccaagtagcggggaccataggcacgtgccaacatgcctggctaataaaaaaaatttttttgtagagacatgatctcacaatgttgcccaggctggtcttgtaaagtatcattttatgttaatagcattttatatatttaatatcatttaatttcttctaaccttctgttttctattaccctttcagttggcaaggatataatgtcctcaaagctgctttgaaccctttgtgaggggagactataatatgaacttacagagctgattattgtcgcaataattttatagaatgttccattccattgttttataatagaataagcaatacacacagtgcaacagatttctgtttagatctttatggattcttctttgaactctctgcatgtttactgcatcatccctgagcctgctatggtgcacagtaaagaatgtatctactgaggacatgtttttaaaaattatgcagattttaaaatgtttcctgtcaaactggatgcagcatgagggagatgttagtatggactcttttcccatccgtcaaataatctcgctatggtgggttgagagtgaatctgcagagagtgaaagcatgcgttaagtaaggtgcaagctgacctaagcacagctagcgggaaggacactgacttgtcctaagggaggtccattctttagcctggcgctgatgtgaggtgtaaccagactttctctgccaggggctctgtaactcccagctggtgttggaggagccatcttccattgtgcagctggattatagccagaaagtgctgctggtctctactctgcaaagaagtctgctcttttacactgaagaaaagtctgtaaggcaaattggaacacaaccaaggaaaaggtaagtttcacaagtttgccagtttggcctaaatgctgggccttgttgtagaaggtgctttagggtttcttaggtctcctgtttgccggagacctcctgtttgcaaacccacagcgcctctaagcctggggttcctggtggggccctgtgcctgcttaggatttctcctcccagaggcagacaagaagagtgtgttcttcttgtcgcagagctgtaggagcctgcacacacagccactctgcctctcagggtgccacagtcagcgcagagaagcctcaggggtggcctggtctatctgttccttgtggagccacctcctccacacagccctggtgaggggtcagggttgtggggctcactcgttattcagcacgtgtttaccatgcacccctgtgcactgtggcaggctcagcagtgacatggtaaacacggcagatctgagccctccgttgtggaaatggaaacacagatagaacacttgttgaccactgtgtcagctgctgtggaccaaaatacacaggatgctgtgtgagtttagacacacttttgtccaggtgaagggtcagggaagacatcctgaaggcatgggttccaggttgagagatcattcctcctttgaccagtgatgtggaggaagggcatcgagaagtccaccagccataccagccgtgtgggaaaagacaactggaacacctggggaacctgtaattcatcatcccaccctagcctgtaaagcactcttgtaggactctgcagcgagtttgcgtggggatggggtgaggaggggtaggtagagcagtggagctgacccctcctatgccaaggaggaggtagactggggccaacgtgggggtgggaagcagagggcggcattagtacagatcatgcgttgatgagtctacagtcatggattgtcgattggccgatgggagctggaagagttcccgtcttgtgtctcccaggaaagggcactgtttgcctgcatagaatcaggggcagggcagctgatggtcacggcatgtggggagggcttgaggctggccctgtggagagtgacagcagggactgggaaacatggtgagattggcaggcgttgatgaggccctgcggctggtggtgccgttggggacaggccgtcctggagagtcgggtgaggcggagccagcccctgtggtcgtagtcactgcccgttattctgtgttctgggctttgcggcaacacacaagtttattctcttttctgcatggcagccctccggctgttaaaagacgctctcaaacctcccctttcttctattttcgatgctgaacaccttcttttttctttttctttttcttttttgtttgagacagagttttgctcttcttgcccaggctggagtgcagtggtgcgatcttggctcactgcaacatctgcctcctgggttcaagcgattctcctgcctcagcctcctgagtagctgagattacaggcatgtgccaccacacccggctaattttgtatttttagtagagacagggtttcaccatgttggtcaggctggtctcaaactcccgacctcaggtgatccgcctgccttggcctcccaaagtgctgggattacaggtgtgagccaccacatgcggcctgctgaacaccttcttaatcccatcaacaatctggcctttttatatctgcagtctccctttcggtccctggagaactcagtggaatttatggccctgcagatcttagttctgctgctctctctgccagtatcctactcctctggcattttatcctggttcgtctgtcaatgttttactgcactgtcttggaaggaaggcagagtgtaaagagaggcattgaaaaccaattactttacatgtgggtcctattcccaacaatctctcttaaaacctggcccttggccggacacagtggctcacgcctgtaatcccaacactttgggaggccaaggtgggcgggtcacttgaggtcaggagttcaagaacagcctggccaacatggtgaaacctcctctctactaaaaacacaaaagtttgccaggcagggtagcaggcgcctgtaatcccagctactcaggaggctgaggcaggagaatcgcttgaaccggggagacaaaggttgcagtgagctgagactgcaccaccgcactccagcctgggtgacagagcgagacttcatctcaaaaaaatcgaaaacaaaaaaacaaaaaacaaacctggccctttaacctcttgtgtggagacccaggcagtttctgtaaacctctcctagtgcgtctgtgcagtcaagtctttagggaacattgattgaaagcgtgctctgctccccaggaacgttttaggatgcagaaacaaataaatgtgtccccttctcagaaggagagagattttactgagccttggggaaatgagggctaacagaataagaggaaatgtttttaacatctgtgtcttaaagacttgctttctgctgtagactattgtgtgcgtctatccctggaagcagtgcttccctcacaactgtttagtgagcggagctaggcatgtacacgtggaggcgtgacagcaagtacggaggcatccaaggagacaaggcctctgccctcaaacacaatgagagagactgtcggtcagcaggaggagagtagaggctgtcagtgctgtaaaggagcgggctaggtgaagcattagggagtgctaggcatggggcaggaagttgcatttggataggatggtcaggaaaggcctctacaagggcagtgatctttgagctgaagcctgggaagagctgctggaagagcattccaggctcagggaacagcatatgccaagacctcaattgggcaagagcttagatgttcaagaagccagaagtgactagggcactggctatggctggagtccaggggagccgtggggaggctgacacgggagtccaggggagccgtggggaggctgccatgggagtccaggggagctgcgaggaggctggcacgggagtccaggggagcctggcatgggagtccaggggagccgtggggaggctgccacgggagtccaggggagccgtggggaggctggcacgggagtccaggggagccacggggaggctgctgcaggagtccaggggagccgcagggaggcaggggagccgcagggaggctgccttgggagtccagggaaaccattgactgagatggagactggagactggggaaggctgggccagaggtcaggacatcaggacctctgctgtggacataaggggtttgacgggcctgtcaggtggctgcgtgggagtcgcagaagagagttctgtggaccggtctggagcccagggaagaagtcttgaccagaggggaaaatgaggtcaccagatacaggtgacactgacaccctgacattggatgaatccacgcagggaatgtctgttcattcagcgctggagctttgcgccaagcctctgccctgctccagtactcctcatcgggggatatctgtgaacaaggcagaacagatctctaatctcagggagctgtgtgcagagtagtgaacagataaacatgtcagagggtgcagagccagagagggaggagcaggagacacaggtgtctctttaataggatgacagggaaggctcctctgaggaggtagcatgggctgattcctgaaacaaagaggcaactagtgcgagaagaccttagagagaggctctggaggcagagggccctgcgcaccgaggatctgagcagccaggctggctgtgtggagcacggtgtggggagccccctcccgtcggctttgtgggccctgcccatggggctctttcagtccagtgctgtggtcagtcacagagggctgtggccaagccagggaggtcactctggctgctgcttggaatatgctggagggggcaggtgtggcagctcagcagggccagcaaggattctgggtgatccgggtaggagaagacaggatggggcggggttggtggtcggactgcttccaaggcagagctggcagatttgctgccacgttggttctgaggtgtgagagggatgagttggagatgattcctaggtctgtggtctatgcagctgggtgagtggacatgctgtggattgacgcagagaatcctggaggcacggggagaaggaggagatggaacagcctgctgtggccccgccatgtcctctccctgcagtggagagctggcgtgggaggcgggtggcgggtgtacctctcggggagctgtgcgctggcagccactggcatgcagacaggagctcgcctagggagatttgggcaggcttgtgttctgaagaggaaagggcatcaggagagaacaggagttggggggtcagaggagtcggaggccatatggagggacatagcagctgctgcgagaccgggggctgaggcagcttcgacgggcctgagtctgtagcatggaggctgtgcacagccctcctcatcagcagggccaagggattggaagggctgaaagaggagttgacggcgagtatggagagcttttaggaggagtgtttttgtagaagagaacaaagaaagacaaataggtggtgcccaggggggaaccatgtggcctggtgggagttttgggagaggggccgtgtggcagcacattggtgtgtgacgcgggtgcctgtggagggaacacagtgctggtggggacagagtgcaggcggtggcctcagttgggccctctcatgggcagcagtgtagggttgaccagaaaccgggacagagactctcttccagagaaagggcagggcactgagcacagggcaggtgcaggcaggtcaggaggcccagaggtagaagacgaggggtcctcttcccgtcgagtccgtgaacctcttcagaccggatgatgtgtgttacatccagaaaacctcagaggccctagccatctgcaaccgtgggtttgctgtcctgtgtatttatgttgcattgtttcatgtgtcagagccctctgcagacctgttactgtgtcccctgtgagtctagtactcagggaagccctccctggcagtagcactttgccctggggaaggagaaggagacgcagcaatctgtaggtgtggcgcccgcatgtgggtaagagccagcagccggttctggaaccccgcgactagcacatctgtttggatggccagtgggtgttagctgttgagatctctggcagggcttctgtggatccttcttctcactcagcttagactttcaggctcccattttgggtgctgtcagctttcagcgtatcagctctgtggcaccatacattatgcacaaaatcataaaacaccattttatagctagaatttgttagccagaacacactccttacatatcaacgtggtctataaagggaattaaaatttttttaggtaatcaatgaggtttttggaaatcatctctaccgaaattaagaaattatattaatttgtttatgattttagaatcctgcaatacttagaccttaaaagttggagcttcagtgtcaaattcagaaagcaccagcaagtactgcagaatcgcactgcaagtggatggtggctgagtcgggggcttaggacaatttgtacctggctctagctggttcttcacaacttcactgcctttgaccaacccactcatcagacatttccgttctttttattttttagagacagggtcttgctgtgtcaccaaggctggggtgcagtggtgtgatcacagctcactgcagccttgaacagctgggttcaggcgatcctcctccctcagcctcccgagtaactaggactacaggcacgcaccaccatgcctggctaaattttttaatttgtagagatggtgtctctctaggtcacccaggctgttgtcaaactcctgggctcaagcagtcctccctccttggcctccaaaagtgctgggattacaggtgtgagccaccatgcccagctattcagcagttttagaggcagccactcccaggaccttgctcagcagggctcctttcccttcctccagggtaagagtccacctggtgttcaggacctcgccttctcatgcccactcagatgcaccaccttgatctgagctctttgagcagctctttgagcctcagatggcgcttccagatgctgatgtgattgttcacacaggtcagcacagtgttatgagacaggctgaggacctcatcttatttattttttattttacccagagcatcaaacacgatgtcttacagaatgtaggaatcactaaatgtttgttaacatgagtgctttagttacataagatgaaccagtcaaaatggaaatgacaagagatttttcagaggtcctacaaatagaaggaaaacatttaaaaattggatcgccaagagaaattgattgacaggaaaggcagaggaagagattatgggctcccttgctggaattcctctggttcgctctatttagaggacatctccagaacaaacccaccaaaggcagtaatcagatacgatgctgttgatagagttgtccataaaagatccacgatgtcaaaacacccttggttcgtcctaacgatcattgtttcaaagctgaatttgatatataatatcctccttggaccctatccaaagggatttagttactgaggtgccagagggacctagtgagattctggtgtgcgaagaaaccccgcaaataactatctgtttgcctatgtgggtgggccctgggggtggcctctagggttgggtgtgctgctgtgtgcagggagtgtgggaacaggcacagcacaagttggccgaggtctggtggggaagcagtggcacggaggcagctctcaactgtgacctgcctgtagcctcgttcaggacaattgagcacttatggggacttagtgtcacaagcattgcttttgtgctgcatgtaagtaatctcattaattcctcacttcagcctttgagatgggagttactctgcctggtttacagaatgggaaacgggtccagaaaagttcaataattgcacgtaccacatacccactaggtgtcagggctggacatcgagcccagggctagctctaaaaccagtgctgtttctgcttttcacaatctgagaagtatttgggagaaggaatcagccaggcatagggctgaactgaaatgcttacatgtgaactctgttagcatcctgagaaataacgagaactcagattgccagtgggagtgtagattgtataatcacgtttaaaaagcttgaagttgtcttctaaacttgaatatgctctcagcaacccagcgattaccccacagcccaccaactgcatcctgagtgtccgtgacagactctgacacctgtgggctaaggggtatgcacagaaatgctcatagcacaattgctcaaaatagctttaaaaaataataattgaaatatccatcaacaagaaaatgaataaatgaattgtggaatacattaagtcctcgtttaatgtcattgataggttcttggaaactgcgacattagcaaaacaacgtataacaaaaccagtgtttttccctcaccaatgttgttgaaggagatggtgttatctgaggacctgctctatgtcatttcgcttacagttgtagtttctaagaacctgtggacgctgagtaggacgtactgtaccattcagcagtagaaatgaattagtgcgacagcttctttttatcaagaaggataaatctgagaaacatagtgttaagtgagaaaaagcaaaagagtacaattagcatcatacattttaataaaaatgaaagataaacaatactaaattatattgtctttagagatacatagatatgtgattaaaccaacaaaaaagtgaggaaatgataaaggcaaaatgcagtccagtggttccatctggggcacaagggggcaggaagtgttaggagcacaggagaacattggttgggtgactgatgatttctttcctaagtttggggatgggttcccaggtgtacctttccttgctaggcttcataactgcatggatatatgtacatatacacagtggtgcactgcataacaacatttcagtcattgacggactgcatgtatgacagtggtcgcagaagattataatggagctgaaaaaattcctatcagctggtgtcttagcgccacacattacgtgttctgtttttagatagacaaacagtcatcattatgttacaggtgcctacagtgttaagtacagtcatatggagtacaggtttgcagtccaggggcaataggctagactaagcttgtccaacccacggcccaacacaaatttgtaaactttcttaaaatgagattttttggccaggcgcagtggctcatgcctgtaatcccagcactttgggaagccaaggcaggtggatcacttgaggtcaggagttcgagaccagcctggccaacatggtaaaaccccatctctactaaaaatacacagttagctgggcatggcggtgcacacctataatcccagctacatgggaggctgaggcaggagaatcacttgaacccaagagggagaggttccattgcattgagcccagattgcgccattgcactgcatcctggacaacaagagcaaaactctgtctcaaaaaaaaaaaaagaggttttttttgtgactattattattattattattatttttagctcatcagctattgttagtgtattttatgtgtggcccaagacaattcttcttcttccaatgtggcccagggaagccaaaagattggacagccctgggctagactatgtgggtgtgtcataggctgtgccatctaggtttgtgtaagtacgctctatgatgttcacacaacgaagacatcgcctaatgacatatttctcaaacatccctgtcactaagtgacctgtgactctatatatagcatattcttttgtttgtgtcagatatttcataatttcagaaagaaaaaatatcaagcttgggggcaggaagggacattggtgcctctgatgggtttagagaaattctgaaaaggcaacaatatagatgggttgctgtgaagctcattcattcaggatgtggactgagcacagcaatcagacgtcagaagcaacagaatcagagcagggaaaggatgagcagacctggattcttcaccttctgcctcagtttcctctcctccaaaacgggagttgtaatacagtcatgtgtcacctaacaactggaatatattctgagaaatgcattgttaggtgacatctttgttgtatgaacagcattgagtgtactgacaagcgtaggtggtaggtacagcctacttccacctgggctaaatggtacagcatattgctcctgggctacagacttgcaccacatgtgactgtactgaatactttaggcagctgtagcacaacggtaagtaattgtatgtctaaacatagaaaaggtaccataaaaatatggtattataatcttatgggaccactgttgtatttgcggtccatcattgactaaaatggtttgttgttgttgtttttgaagcagagtcttgctctgtcacccaggttggagtacagtagtggcactatctcagctcactgcaaactctgcctcccaggttcaagcgattctcctgcctcagcctcccgagtagctgggactacaggcatgcgccaccatgcctggctaatttttgtatttttagtagaggcatggtttcaccatgttggccaggctagtctcaaactcttgacctcagatgatctgccgtcttggcctcccaaagtgctgagattgcaggcatgatgcatccagcctgaatacaatgttatgtgatgcgtgactgtatctgccactcatggttgttgtaaggattagacacgagagtgggatcaagtgccaggcacagtgcaggctgtgtgagtactcagtgaatggttccctgtgtgctaatggggcacacacctgtgagggtgtggtcgggcctctgttggtacagggatgacagtgtggtttgacaaaaaacaaacagtagaaagggtgaaaaatcaattattgtcttagccaaaaaattcttgttgtacttaatattaagggttgacaactgcattactttaaatcagtccatgtctgttttttgttctttctttctttcttctaattttagtactgggaaatttggtgcttgttttataccaggactctgtaagcaaagtgatctaaccttgtatgcgtcacggcccgggctccggctatggaaggctgatgtccacgggactgttcaagccacgtttatcttaaaagatgcttttgccgggggagtcaagccttttgaactgcacccgcgtctggaatcccccaacagtggaagttgcagcttacctgagaggcacctggggcttgtttcatgtttctttcaagaaggctgggtgctgagttggaatgaatatagtatctatctcctagacacagtcaaccaggtaagtgaagggacgccaccatatcttctgtgtctataggcaagagaatgtatctctataaactgttctactcagggacctcagaatgctaccaggagcagtattgacttacactttactttttcctttgggccagtcaaggaaatcaaatgaaggtttggtaatttttatagatttgaaaaaaaaaatttggttttgacatttaggtccaattttctgccgagaaatgatgtatgttttttgtatgtaaacacaaaattaaacttgttctttttgttgttgttgttgttgttgttgttgttgagaaagagtctcgctctgtcacccaggctggagtgcagtggcatgatctcggcttactgcaacctccacctcccaggttcaagcgattctcctgcctcagcctcctgagtagctgggattacagacgcatgccaccacgcctggctaatttttgtatttttagtagagacagggtttcacaatgttggtcaggctggtcttgaactcctgacctcgtgatctgcccgccttggcctcccaaattgctgggattacaggcgtgagccaccatgcctggtttttttttttgttttttttttttgagatggagtcctagtatgtcacccaggctggagtgcagtgtgcagtggtgcaatctgggctcactgcaacctccacctcccgagttcaagcgattctcctgcctcagcctcccaagtagctgggattacaggtgcgcaccaccacgcctggctaatttttttgtatttttagtagagacagggtttcaccatgttggccaggctggtctcgaactcctgactcaggtgatccgccagcctcggcctcccaaagtgctggggttacaggcgtgaaccgccgcgcccggccgccacttggttttttttttgttttttgttttttattttcagttttctttacttagcaatatatcttgggcaaatttccaacatcattaaaatcatggtaggaaataatttctgcttaaaccaagatgataacagattatcatcagagacagatttagaaactttaaacaaagctgtttagtttcagtttctccttgtcttaagagcagagcttttgctctttttaaaataaactccctgccttaccctcccgactcctcacccccagactctagaccaggccctgtcctgttcacgttcttccattctgagctcagcgggcctctgacaggcacccctttcttttataagcagagcctcactgtagaaaataaacagttttcagccaggcgcagtggcttacgcctgtaatcccagcactttgggcactttggaaggccgaggtaggtggataacctgaggtcaggagttcaaggccagcctggccaacatggtgaaactccgtctctactaaaaatacaaaaattagccaggcatggtggtgggcgcctgtagtcctggctactcgggaggctgaggcaggagaattgcttgaacctgggaggcggaggttgcaatgagccaagatcacaccactgcactccagcctgggtgacagagcaagacttcatttgaaaaaaagaaaagaaagggttttcttctttggtgtgtgtcagcagaacatgaagttcatcttctcctcattgaagttttatgaattattatcagccgtacctggtaacactggtttggcagaaagaaaactggcccggggtggggggcagaactagactcgactcttctagcctggttctgcctttaaccaagagtctcttatcggccggagcctggtttgttttcctgtaaaatggggtgggggtggaagaagcatcgacttaggggaatcaccaaggtgccttgagtttgttcattttataagggatattctgaaaggtatttttgcaccctttcctcagttacagagaacttctttccctggataccttttgaacttatgtgcacttattaattagtagcatcaagatgctttgtaactgtgcattggttctttcatctgagcatttacccgatgctttacccagtaggtataattaacttcattttataggtagagaaatggagacaggggaccgtctgggacagatgtcacagtcaccctcagagactggaccacccagtggcagcatgactggcagctttcggaaacaaatgttatgtttgcagcagtccatcagttatttaaaattagccaaaaacatagactctccttctacaacagactagtctctttatttgcactgtctacagcaaagcaaggacttgctttaagtcagtgtgggctcaggatgtcctgtgttttgttgccacccactttcagataatgctggaggaacctcccctcccttcatgtattcattcaaaacccatgagttgcagtgcgcactggcctctcctgcaggaatgcacacagtagggggactagacgtgtctgcacgttatttcagcccaggagtggggcgtcaagcggaagtttggatgaggtgctgcaagccctgagagccctgggtgttgcagcagagggcaagcttgtcagaggctgcttctcacagaggtggcgtctggagagaactggaacttccccagcaaacatggataggaaaggaatttgagcagaaagagaagcacgtgcattcaccatggaggaacagggctgggactgggctggcagggccggtgcacctgcagcagggacgagggcagggtggtacgtgggtcggagatgaccgaggccccaccatgccaggggacccctcagatcctgcttaccaatctgtgagatgttacctaactttggattgaattggaattttcagaaagttaccatagtaaagtgcagttatcatttgactgatttggactctcacacatgcatttttatgctttgagctgttaccgttgtttagttttgtgttttttgttttttttttttttttttttttgacaggccacagttgctggtttggaaggatccggtgatattgtgtctgtttcgtgcacagaaaatgaaatatttttcttgaaaggagataggaacattataagaatttcaagcaggcctgaaggattaacatcaacaggtttgtatttattataaaatgtaccatgtatatgatgggaagtactatactctgttgtttgtaattgcagttaataattgatcaaacttaccattgggccaggcatggtggctcacgcctgtaatcccagcactttgggaggctgaggtgggtggatcgcttaagctcaggactttaagaccagcctgggcaacatggtaaaaccctgtctctaccaaaaatacaaaaaactagccaggcgtggtggcatgcgcctgtggtctcaagtactcgggaggctgaggtgggaggatcgcttgagcctgggaggcagaggttgctgtaagctaagattgcaccactgcactccagcctggatgacagagtgagacctcatctcaaaaacaaaaccaaaaacttaccattattttgctaaactattgcaactttatttgaacttggaggatttggagggtttcctctgattctttttttttttttttgagatggagtttcgctcttgttgcccaggctagagtgcaatgaggcgatctcagctcaccgcaacctctgcctcccaggttcaagctattctcctgcctcagcctcctgagtagctgggattacaggcatgcgccattatgccaggctaattttgtatttttagtagagacagggtttctccatgttggtcaggcaggtctcaaactcccgacctcaggcgatccgcctgcctccgcctcccaaagtgctgggattaaaggcgtgagccactgtgcccggccgctcctctgattgttaaaatagcatttacagtacatttcttgaaagtcacctactttaaggcttacatcagatagtctcacatttagtggagttgctttcatggttgtggaagatggggagattgagaaaggaggaaggaaaaatcagaaaccactttactgatccctgctctccgtctgagacagtatgtgggattaatgctccaaaagacatagatttgcatagagttttagaatatttaaatctgtcatctgggacataccgtttacccttaactcagttcttccttgtaggatttatttttctctgtgcttttgacattttttggtaattcatacaagcccaaattttaatgagcaaagaatcctaatatgtgtcctcttgcggacatccacatgctttatatatttgggttcctcggggaacttgttcctcatggtggcaacaacagccatgtggaccccatcaccctcctcctcactaccattacctctgatgtcagagagggcaaattggggtgaatattccaaaacataatttgtataagaagtgaataagctctgactcttgagtttatgagctgggggcccctcagacagtgtcatcaaagggttagaatggctttcaggaagggtggtgacttggagccaccaggctaagctctggacctctgctgcccatagagctttctgcagtgatgaagatgctcccatctgccctgtctggtaggcagtccctgtccatgtgtggctgctgagtacttgcaatatagcaagtgcagctgagagatgaattttacattttgtttaatttttattttattttattttattttttgagacagagtcttgctctgtatcccaggctagagtgcagtggtgcagtctctggtcactgcaacctccacctcctgggttcaaacgattctcctgccttagcctcccgaatagctgggattacaggtgtgcaccaccacaccaggctaatattttgtattttagtagaaagggggtttcaccatgcaccatgttacccaggctggtctcgaactcctgagctcaggcagtcctcccaccttagcctcccaaagtgatgggattacaggcatgagccaccgcgcccagcctaaattttgttcaattttgatcaatttgaatttcaatacttacaagtagctggtggctgcctattggacagggagctctaggcaagatctgccattaagttatgtaatcttcagcaagtcgcttcacagcagagtcctcccctccagtctccagtgtacacttcattgcctgcagtctgcccctaacacatgccctcaatagaatgtgggtgcttcaagggcaggaattcctgtgtcttatggactgccatgtcccagcagctagccctgtgtctggcacacggaggatccccgataaagagaggatggcgaatggatcaaagtgggctgtggtcttgtgttgagggtactgtagctggaactgctctggccttgtgccctgtggtgtcgtgttgcagaaaagatgagtccactgcagtgggaagctcactggcccttgggcttggggacaggagacaggtactcacatgcctgttctcactctgcggtctactggccttgatgctgtgtggtaatggacttctctgtcttgagtttgttctaatggaaaattacctttccctcttccaggaaacttaattacaggtacacatgtatttttcaaatgccctttgagtaatcttaaagtatattcaaggcagagtcttagtatgaagtataactaagctgttttgttatacacaggcatctctcatttgtaaataatttgtaaattgaagcgagaaatgctgtattcttagtatttttttacttttttttttttttttttgagacaggtttcactctgtcgtgcaggctggagtgcagtggcatgatctcagctcactgcaacctccacctcccaggctcaaatgattctcccacctcagcctcccaagtagctgggactatgggcgtgcaccaccacaccctgctaaattttgagactccgtctcaaaaataaataaataaataaatataaaaagaaagctatggcaaattattttactgattttaatatatgagcttcttgaagaacaaaaactgtttcttagagtcttttgtatgattcttttagttttggtggattttttttttttttttttttgagacggagtctcactgtgttgcccaggctggagtgcagtggcgcaatctcggctcactgcaagctttgcctcccaggttcacaccattctcctgcctcagcctcccaagtagctgggacccccggcgcccgccaccatgcccggctaattttttgtatttttagtagagacggggtttcactgtgttagccaggatggtcttgatctcctgaccttgtgatccgcccgccttggcctcccaaagtgctgggattacaggcgtgagtcaccgtgcccatcctagttttgctggtttctatgaatttagaatcattcagttctttagctggctggtgcctctgtgacaactggtatttagggctagcaaacgtggataagtgcacatcagctctctcttggatcaccagtggtaaaaccagactcttctttcttagtgagagatggtctggagatgtctggatgctcagagcgtgtccacgtgcagcaagcggagaagctgccaggggccacagtttctgagacgaggctcagaggctcttccatggccagctccgtggccagcgagccaaggagcaggagcagctcgctcaactccaccgacagcggctccgggctcctgccccctgggctccaggccacccctgagctgggcaagggcagccagcccctgtcacagagattcaacgccatcagctcagaggactttgaccaggagcttgtcgtgaagcctatcaaagtgaaaaggaagaagaagaagaagaagacaggtaccctctgtagctggcacacacccatctggggttacagtctttccagattctctgggagtgctgctgctcactgagtgagcaatgctccatacatccaaaagcagagaacacatacatttcttccccaaaggagttttactgcaaaatacttcacattaacggaaaatacacacacacacacacacacacactgtaaggtctaaatgatgacagaacacctgtgtgtactcaccaccctgcttaaagggtctcagttttgtacttttcaatatttatttatgtatttatattatttatttattttttgcgacagagtttcgctcgtcgcccaggctggagtgcaatggcacgatctcggctcactgcaacctcacctcctgagttcaagcaattctcctgcctcagcctcccgagtatgcatgcccagcgaattttgtatttttagtagatacagggtttctccatgttggtcaggctggtcttgaactcccaaactcaggtgatctgcccgcctcggcctcccaaagtgctgggattacagcgtgagccaccgcgcctggcatagtttttagtatttaaattaaaatgtcggggccgggcgcagtggctcatgcctgtaatcccaacactttgggaggccgaggcaggcggatcacgaggtcaagagattgagaccatcctggccaacatggtgaaaccccgtctctactaaaaacacataaattagctgggcttggtggcatgtgcctgtaatctcagtcactcgggaggctgaggcaggagaatcacttgaacctgggaggcagaggatgcagtgagccgaggtcacgccactgcactccagcctcgcaacagagcaagactccgtctcaaaaaaaaaaaaaaaaaaagtgttggtttatccatgtataccattgattaaatcagagattctgtgagcctgggtggaaagttgtggaaaccagaagatctatgctggtaaatacttgggacattttatgtttagtgttgaatatgctaccaaatatgggatttaacattgaatttttttctttttttttttcaacttttattttaaatacagggggtccatgcgcaggtttgttacatgggtatacagcacccaggtagtgagcacagtatgcagtaggtggcttttgacccatgccgcctcctctcccgctctggaggtccacagtgtctgtccttcccatgtttatgtccatgcgtgctcagtgtttggctcccacttacaagtcagaacatgctgttggttttctgttcctgttgcattaatttgcttaggattacggccagcggttccatccatgttgctgtaaaggacaagatttcattctttatttttatttatttatttatttatttatttattttttaatttattggagacagagtttcactgttgtcacccaggctagagtgcaatggtgcgatctcggctcactgcaacttccgcctcccaagttcaagcaattctcctgcctcagcctcccgagtagctgggattacaggtgcccactaccacgcccagctaagtttttgtatttttagtagaggcaggggtttaccatgttggacaggctggtcttgaactcctgacctaaggtggcccacccgcctcggcctcccaaagtgctaggatggcttatgagcgtgaaccaccgtgcacagcccagatttcattctttgttatggctgtgtaacactgaatttttcaaaccttttactccttggttcctgttaatcctctctagctaagatgactgcaacactgaaggaaatgttattagatttctaagcattttaataattataaggaattggtttgtgacccaggtgaacatctcagtttgtcccctggtttttcttagctgccctcaaacccatggatttgttcagtacttgcatgcatagaaagcatctctttgttgggattatttgtacttaagaggtttattcttcattcaccaaatatcctttatttaaaattttttttcttgagccaaaaatatgtgtgcaagttagtctcttactaatcatatagaaccgtgccttattttgaatgttcttattctgaattagaaggtggaagcaggagcacctgtcacagctccctggaatcgacaccctgctccgaatttcctggggacagtccccagtccttgaacacagacttgctgtcgatgacctcaagtgtcctgggcagtagcgtggatcagttaagtgcagagtctccagaccaggaaagcagcttcaatggtgaagtgaacggtgtcccacaggaaaatactgaccccgaaacgtttaatgtcctggaggtgtcaggatcaatgcctgattctctggctgaggaagatgacattagaactgaaatgccacactgtcaccatgcacatgggcgggagctgctcaatggagcgagggaagatgtgggaggcagtgatgtcacgggactcggagatgagccgtgtcctgcagatgatggaccaaatagcacacagttacccttccaagaacaggacagctctcctggggcgcatgatggggaagacatccaacccattggcccccaaagcactttttgtgaagtccccctcctgaactcactcactgtgccttccagcctcagctgggccccaagtgctgaacagtggctgcctgggaccagagctgatgaaggcagccccgtggagcccagccaagagcaggacatcctaaccagcatggaggcctctggccacctcagcacaaatctctggcatgctgtcactgatgatgacacaggtcagaaagaaatacccatttctgaacgtgtcttggggagtgtgggaggacagctgactccggtctctgccttggcagccagcactcacaagccctggcttgagcagcctccacgggatcagacattgacgtccagcgatgaggaggacatctatgcccacgggcttccttcttcatcctcagagacgagtgtgacagagctcggacctagttgctcccagcaggacctgagccggctgggtgcagaggacgccgggctgctcaagccagatcaggtatgtgggttcgggtggtgggaaaagtagctgaggcttctttcttaagggtaataattgtcaagactgattattttccttctcatggaaagaaattctattcctactgcaaaatccgtaggccaactctgttttcaagtctgggtttcaggggatttccagcacagggactatgaatggcttgaactacttctgacctgttctaccctgctcagtaacctgcctccccaaccaaggtagcgtcttgctgtttcctctgaccccacaagtgcaggctggtgtaggcacttactgttagccatcgtagggcagggctgaattggcctggggccatctcagaaaaccagtgggcagaggactgtccacctgtggagtagagaaagctctgagcagtttggaggcagggagtctcctgtccttctcctcacacccctccaaggaaccatctgcaagagcacgaggccatttccagaactgctgtctcctcaacctccgaacagtggctccaaggctcccctgcgagctgtacaggaaccagtttggagtaaccagtctttgtaggtccacccagcacatgtaactaggagatgacttttaactgtccttgagcattttatattaaaagtgatttttttaaaagtgcctacttcccttagcaagtaattattactagatatatttgtttcaaaactgtgtcttgccctgtctcctactaactgtcgatgtgaggtatgaattatggctgcgcacttacagccacgtgtgctttccacagtctacgctggcttctgtcagtgctagcagtgtgacgctttgtcagtgctcaccatgtgcaggtatcccacaaagcactttagaggtttaactcttttacttctctaaacacgaactataaaataggcactcttcttgtccccattttacagaggagaaaatggaagcacagaacagctagacagcttgcacaaggtcacatagcaaatgaagggcgggccccaggaccccctcactcaccctctgtgctgtcatgcctcagaagtgaaacatgctgcttacttgttttgagacaaaacgccataagtctggcttttttttcttctttctttcttttttttttttttttctgagacagggtctcactctgtcacccaggatggagcgcagtggcgcaatcatggctcattgctgcctcgacctccccaagctcaagtgatccacctgcctcagcttcctgagtcactgggactacaggcatgtgccaccatgcccagctaatttttgtattttttgtagagaaggggttttgccatattgcccaagctggtctcgaactcctgagctcaagcaatctgcctgcctcggcttcccaaagtgctgggattacaggtgtgagctgctgtgcctggccaagggtggccttttattcagtcatccggcatttatcttttcaacccagtggttcttgagtggccttgactgtcagcctctgtgattatgctggggaccacagtgcagatggcagctagttgtggattccatcttcctgagcctcagagtcttgagggggagccaggtacatgttcacatcctcgcagttgagtgggactcaggtgagggtactgagcaaagtacagggctgcaggaagcgcaagcagcatggccccctaatgtctgggcgttagccaggcagactgtcggtggggtggggtattggaattctaggccagaaatttaggaaagccctcacttaggtgacagggatcctggccctttgagcccctgactctctaacttcctcccttcctcatcccactccaggtagctgggaagccaagaaattttatggtgtgtttttatttggaggttcggtgtggaagtaagacttgccatggtgagcagggctggattgagaagagttgggcaccattttctttgaagtagttaacttctatgtgggtatctgtacaaatacatttatcttctttgcatttattgaaaagtattaaagtacaaagactttatttagctttgatttttaaaagaattctagcaaggtcgggcacagtggctcacgcctgtaatcccagcactttgggaggccaaggtgggcgaatcacctgaggtcaggagttcgagaccagcctggccaacatggcgaaaccccgtctctactaaaaatacaaaaaatagccgggtgtggtggcagatgcctgtaatcccaagtactcaggagcctgaggcaggagaattgcgacttgcttgaacccaggaggcggaggttgcagtgagccgagattgtgcccctgtactccagcctgggcgacagagcgagtctctgtctcaaaaaggaaaaaaaaaagaaaatatggtggaaaaaagaaagacagtggtagtgccatatatccagtgcctctgtaatgattagactacaaaaaattgacttgcatccaaatgttgaagaacctggctctttgtgtaaggtgaggtatgcctgcagaataatagcagctccttcgtaacgtgatgtgatgctctaagcgttacatttgcaaaggtgttagaacaggagaaaatgtcatccagggactccagggagtctttgtagggagacagcagcacgcgtctcagaaggtttgtagtagaggggtgtccacagatagcaggggttgggagaagggttgacttggcgtcttgctgacccgttttaccgtctcgtgttaatgatatcctctcacctttcttactgagaacagtaagccaaatgtggctgtgtcctctgccacagaactcactggctcttcccttgttagtttgcagaaagctggatgggctactcgggtcccggctatggcatcctcagcttggtggtctccgagaagtatatctggtgcctggactacaaaggcggcctgttctgcagcgcgttgccgggcgccgggctgcgctggcagaagtttgaagatgctgtccagcaggtggcagtctcgccctcaggttcgcctccccgctccctgctcccgctccctgctcccgctcgccgctcctgctccccgcccccggggtgcagacatcttagtacagggctcccctgcagcagctctgggctcacgctgccgtgcgttcaccaggtttgcctcttcaggaacgtttgaggggttgtctccaaagaacgtgaattgcttcattggatgtcaattcgtagtgtaaatgggtgttcagtttgagtttttgttttctttattaattgcaatggtaagctctgatcgtatttttgtaagctagacaaaaagtttgaaaattgagggacttttttagggatattaatatactaactcttcataaaaataatacgtgtttctctttctcattgttgctttaaagcaaccgaactaacgaagacgggcctatggatatgttagatatattccaattatttggcttcctctttaggaattctgttttaatgagctctctgctgtgggtgaacagtctactccctgactctaaaaggaaagtccattcattctttcatgctgctgttaggccattgttagtgaactggagctggtgtttcctgaacgatgttctcctgagctggaagacctcccatatctgcatggaatcatttgcttgctttttctttctttctttcttttttttttttttttgagacagagtcttgctgtgttgcccaggctggagtgcagtggtacaatctcagctcactgcgagctccacctcccaggttcgcactattctcctgcctcagcctccccagtagctgggactacaggcacccgccaccacgcccagctaatttttttgtatttttttagtggacacggggtttcactgtggtagccaggatggtcttgatctcctgacctcatgatccgcccgcctcagcctcccaaaatgctgggattacaggtgagagccactacgcccggctttgcttgttttttcttaaggttgtgttggccacgtcggcacctacgccagtggggacacttttgccttgaagcagcctggtttactgtcaggacattggaatagaagtcagacgaagccgaagctgagtctgtggcttgggacctgtctgttctctgtaacttcactgtgtttcgggatgaatttcccttaattctccctggtctctgtcactgtttaaaatattagtttgttcagcgttgtttttcttgcttgctttcactgtttgtttgaaaaatatttttctttagagactggctaacaacccactccacaagctgtcattacacagttgtgtgttttaattcatttctcgttggtatcatttaccttcaggtttgtctccttagccttttagaactttggttctattcctgactatattagttacttgtattcccaggccccttggtccctcactgtgctagcgggaactctgtatctccatgagattcacctgctcagttgaggcgtccttcagggcccagtcccatgtccttggtgggcagcagagcccttgtgccgggggcaccacaggcagagatgctcgacaggccctctagtccagcccagctgacactcggtgatcactggtggccccttgccttgcctgcgtcggcctgctccaggcctccagctgcagcgctatcctgccttccctttcctctctcctcctccatctcttcatcaaagtcctcttcacagtgaaaacaggccaactcagtgcaagtgtgttccttctgtgcaccttttccattcagctcatccagaactgatccttctctttgaatccctaaaggactttttcagcctctcctagggcactagttgtgcttaggatgtttatttggagacttatcaaacctaataatgtcatcagtgtttctcctcccgtgtgaggagcgcctgtcatgtgcccagctctgtggccatgtggttgatctgcttccgtctgcagtctttagagcagccctgtaaggtggagatgatccccacggcccaggaggaaagtgaagcttggagacgggcggtgacatggagcctgaagctgcatagccactgggtggtggccaagggcccaaacctgggtctggtggcctctttccccacttggggggacagaacaggatgtgttttagaaatctttctcccctcaatgcccagcatgaagacttttgtatagaaatatattctagtatttattggacagtgaatagaatttttatttccataggagcccttctctggaagattgaacagaaatctaaccgggcttttgcttgtgggaaagtcaccatcaaggggaagcggcactggtacgaagccctgccccaggcagtgtttgtggccctgagcgatgacacggcctggatcatcaggaccagtggggacctatacttgcagacaggtaaccgcgggccacgcttagaggcctgccagctctgccgtcactgcctctgctgcaccctgctttgctagtaacatgcttaccacaatcgctatgattaagaggctaaatccattcgaattaagacacttctgggaagagagtatttgccatttggcatgtattagcagtttcctgcattgacacaaactcaacccaggacaaatttagggcaaaaatgaataggattatttggtgagatacagaaacagaatcttattctcctatggccaaccaccgcatatcacgtatcctacaatgttagatcttaagaggtaagaatacagaggaaggacataaaattcatttccccctttaagctaaagtttaagtggctgcattttttttttcagccatatcaaagcccggctcctatatacttacttacccgtgggccaggaaaaaaaaagaaataatttgctcttttttattttgagacggagtctcgctctcttgcccaggctggcatgcagtggtgccatcttgactcactgcaacctctgcctcctgggttcaagtgatcctcctgcctcagcttcctgatcacaggctgggattacaggtgcccatcaccacgcccagccaatttttttgtatttttagtagagatggagtttcactatgtcggccaggctggtcttgaacttctgacctcaagtgatctgcccgcctcagcctcccaaagtgctgggattacaggtgtgagccaccacaccaggccataatttgctctaaatagcagttcaggccaggtgtggtggctcatgcctgtaatcccaacactttgggaggcctagacgagcagatcacctgaggtcaggagttcaagaccaacctggccaacatggtgaaactctgtctctactaaaaaaaaaaaaaaaaatacaaaaaattagctgggcgtggtggcgcttgcctgtaatcccagctacttgggagcctgaggcacaagaatcacttgaacctgggaggcagagcttgcagtgagctgagatcgcgccactgcactctccagcctggtgacagggcgagactccgtctcaaaacaaaacaaaacaaaaatagcagttcagcaagtcacaggaagctgccctcagggaagtttttagctgatggaagggcacagtgggacttgcttattaaaaataagctgtaatgacagtcagtgtttactgtcagcagaatggggaaggatcttccaccagcaatgtgatttatcagtatctggaaggactgtggggcaggagttatcgtcagttgtccagaggccacgttggatttatgtaaagatcagtcttccaggcgtttaatgttgttgattccaggagaatgttgttgttgttgttttgagacggaatctcgctctgttgcccaggctggagtgtagtggcacaatctcggctcactgcaacctccacttcctgggttcaagcgattctcctacctcagcctcccgagtagctgggactacaggcacatgccaccatgtccagctcacttttgtatttttagtagaggcagggtttcactatgttggccagtctggtcttgaactcctgaccttgtgatccgcccgcctcagcctcccaaaatgctggcattataggcgtgagccaccggcctcaggagcatgttttaatcactgctgtgagtcgtcagctggggatgagtcttcaggttgaagctcttgcacagctggctctctcctagctgtgtaagaacctctggcctgggtgcacagccatgctggcttcataggccatatgctggcccaggtctctccagcctagttcctgtgtctttctttaaatgaaagtagctctgtcaaggcacatgcacatctaagctgccaggacatttgagctttggtcatggggaagacaggaggtgcttctggcctgggggtgaggagcgagtgacctctaaaccagtagtgccagaggaatcaccaggacagtgatttcacatgaggtggccccacccagacctgttggattaggtccaatccctctggagactgctcaggagtgtgtcgtgtaagaagtcctgccggtgattcccacctagtttagtggaaggaaatatcacccaaggactgcaatactataggtgcgtctgtgattagtcacggagcatatttgagtactgagacctaattgcaggcctaaggtcaaggaatacagggttgtaggcgacagttggtctgtctgctcccctgggaatagcctttgagctcatttagacatactttattgacagaacacaaggaggcaaggggagagccctggacagggagccagggaccctgagctttggcctgccactgccttgcagtttgacagacctcagatttcatctgggaaattcggggtttcattttattagtggaacctcgcacccagtcagagcagagaggagccgccgtgctggagctctctgcaggaacgactgcaggcctcaggtccctgccaactccagcagcgctgcagccctctgcctggaagagctgctctgccctgcagcctttgggcctccatctggccactctcctgctcttggcttttgtgttcttctcttagaacttcttaagctacattgggacaccagataattctgaattgttcagttttcaaagagtgtctaaaactgttttcagatagatgttacatttaggcagaatttaaccactttatgttgattaaacttgacaacaaaaaagcggccggacagggcagctcctgcctgtaatcccagcactttgggaggctgaggtgggaggatctcttgagcccaggagtttgagatcagcctgggcaacgtagaaaggccccgtctatatttttaattaattaattaattaaagtttttttttaaagcactcatcataaaagaatatagcaaaataccaaaaaaggaaaaataagccaataaccaagtcaaaatgaggtgtggagttctgactgtgtgtctttggggcttcttcccatcttcctggcaggtctgagcgtggatcgcccttgtgccagagccgtaaaggtggactgtccctacccgctgtcccagatcacagcccggaacaatgtggtgtgggcgctgacagagcagagggccctcctgtaccgggagggcgtgagcagcttctgtccggaaggcgagcagtggaagtgtgacattgtcaggtactggcgggccagagactcctttcacatcgtgcttgtcctacccttcgttcttgtccacttgacaccacaaggcaccatgaggccgttcctgggaggcagcacctgcagcctccatggctataggctaagcttgaatctctgcctaattctgaccggcaaactggacgttgagtcagagctcgctttttaaaaatgctgccgccctctgcgcagccctgagcatcacagcgtcatgagtctgtcatgacggtctctattcagaattgcccaccgtcaggtagttctggtttagtgtctgtgacggcttaggtccaaatatttttctttattttcatgctaatcgaagttgatctctgaactgtagcttttttttttttttttgatacaggttctcactctgtcacccaggctggggtgcagtgccacgatcacggctcactgcagccttgacctccgggctcaggtgatcctcctgcctcagcctcctgagtagctgggactacagatgcatgccaccatgcccagctaatttttgtattttttgtagagatgagttttgggttttcatcatgttgcccagactcatctcgaactcttgggctcaagcaattctcctgccttggcctcccaaagtgctgggattacagacatgagccactatgcctggcccgatctctgaactgtaatttattaagctatttttttttttaccattcaagatgttagttatagaattgccatcagatcattttactagtatggaagtattaatagtcctttgaaaaactagattaggatattcttggtttgaatttagcaagccaataaactttcagtgaatacctattaagagccagaatggtccaggtgtggtggctcacgcctgtaatcccaacactttggaaggccaaggcaggcggatcacgaggtcaagagttcgagaccagactgaccaacatagtgaaatcccgtctctattaaaaatacaaaaattaaccgggcatctcaggaggctgaggcaggagaatcacttgaacctgggaggcggaagttgcagagagctgagatcgcaccattgcactccagcctgggtgacagagcaagactccatctcaaaaaacagacagacaaaaaaaagcaacaacaacaaaaagccagaatggtgctaggggctgggtgcgccaagagggctgagactggccctgctctcatcagttccaagtctcatgggggccccgtgcatggatggacacccattagcacagatggccctaaacaggagtgtggagcatgcagcactgagggaaccatggactccatgcagagatcaggaaggcagcatgcagagtggaccaacagctaagccttgaagctgacgaggacttccccatatggaaggagggggagggcgtctccagcaaagagggcagtgtctgcctaggtccagctgcacagaatagcctggcacatcgggggagtttacagtcattcccttggtgagggagggagtagagagatggaggcgctcaggggccttggattggcgggggaaggagtagagagatggaggcactcaggggccttggattggcgggggaaggagtagagagatggaggcactcaggggccttggattggtaggggaaggagtagagagatggaggcgctcaggggccttggattccttttgtgcctactcgcttttttcttaggttattttctctcttaagagtgttcccagccattctgggtcatcagtgtgtctttcaaaagctgccacccacttgaaccatatctcttgcacagtaatttaactcagacccaaacttccttccctggcacctgctgatccgctccagggccacgtctcttctcccagccacgcctgccgggagaccctggatgtccgcagtccagacacactgggcactctgcctatgggtgctgacccccctgttctcctccttattttcagcgaaaggcaagctttagaacccgtctgcataacgctcggggatcagcagactctctgggccctggacatccatgggaacctgtggttcagaactggcattatttccaagaagccccaaggagatgacgaccattggtggcaagtaggtgttcagctctgcgccacgtgccgaggtctcccgaccttttctgcttccccttttcttacttctctcttttccttaacgatactagattaaatttaaaatactcacttttttattatttgtttgtttgttttgaaacaagatctccttccgtcatccaggcggaagggcagtggtgcagtcacggctcactgcagtcttgacttcctgggctcaggtgattctcccacctcagcctcccaggtagctgggactacaggcgtgtgccaccatgcctggctagttttttgtatttgtttgtagagacagggttttggcatgttgtgcaggctggtctcaaactcctgagctcaagagatccacccagactgggcagagtggctcacacctgtaatcccagcaatttgagaggccaaggcaggcagatcactcgagtccaggagttcaaagccagcctgggcaacatggtgaaaccctgtctctaccaaaaatacaaaaattagttggacatggtggcacacgccgttggtcccaactactcggaaggctgaggtgggagaatagtttgagcccaggagacaaaggtttcagccaagatcacaccaccacactccaacctgggcaacagagctagaccctgtctcaaaataaataaaaataaaaaagagagagagagagaaatccaccctctccgcctcccaaagtgctgggattacaagtggagccaccactcccagccaatagtattccttttttctatttgatggattagactttgctgtgtttgagtgcattagaaacataaaggacttttcatcataggaaataatttgcaaactctttgtgtaaataatgcacttaatttatttattttgatattgtttatatatttattattataggctaaataaacccagtgacatccatttgaagacctaggtaataatgatgtttaattatgaacaaatgtgctgagaaaagagcccagataataggtttgaaagcccaacccagaattaaaattgagctgtctctgcttattcagaaggcctctaagtagatggtatttcagcaaagacaggagaattttcccacgtgcttccagaaaaggaaacactataagaaacaggatgagggtataatcaagctcactgtgtgtgatttggtcccagcaagagcgcctagaatgaatttctcttttctttttcttttctttttttctggggcagagtctcactcttttgcccacactggagtgtggtggcaggatcacgacccacctcagcctcccaagtagctgggaccacaggcacatgccaccatgcctggctaattattttggtagagacaaggtcttgctgttacccaggctggtctcgaactccttggctcaagcaatcctcccaccttgacctcccaaagcgctgggattacaggtgtgaaccaccaccctcggccctagaatggattttcaaaggagtgtctactttccccttctttggtatagtttagtgttagtgttgctcccacagtctcccactgtggtaggtaagatttcactgatagtcgatggtcgtgaaatatttgatgtttcttttttttgagacggagtcttgctctgtcacccagtctggagtacaatggcgcaatctcggctcactgcaacctccgcctcctgggttcaagcgattctcctgcctcagcctcctgggtagctgggactacaggcacgcaccaccaggcccagctaatttgtgtatttttggtagagacagggtttcaccatgttggccaggttggtctcaatgtcttgaccttgtgatctgcctgcctcagcctcccaaagtgctgggattataggcgtgaaccaccgcgcccggccagtatttgatgtttctgaagtatcttgccccattggtttatgttttattgtcacctcagacttgctttgttgaaggcttgtcttgcattgactgctctgaggtctttcagatgagaatgtagaaaaatgagttgtgtttactctttgataaaatatgtattctatataatatgtacattatatacagatgtatctaatttatatactaggtaatatttgatagtcatgcaaatgattttaaaataccttttgtgtacttgtaaccatatatatacatatacatgtaaaaatatacatatatgtatttttgtagagacagggtttcaccatgttggcaggctggtctggaactcctgacctcaagtaatccacctgccttggcctcccaaagtgctgggattacaggcgtgagccactgtgcccgaccaggagtagggcatttatgccagtgatgttttatgtaatcaaacccagcagggcagaaatgtgagtgaacatcatggagaatcagattttcactcataaagaatttgccttatatcaagctgcccaagaagagaagagcttcctgcagggaggggtggttggagaaatgtctgaggtatatgaatgcttttcaggaatgttatagaagcaagctacccttctgagctagggttagagtctagatacccaggatggtcctagttgatgctcttgccctggagtaattattagtagtcccaattcagatcataaattagttcatcacagccttgcatggtggctcacacctgtaatcccagcactttgggaggcctgggcgggcggatcacctgaggtcaggagttcaagaccagcctggccaacatggtgaaaccccatctttactaaaaatataaaaaattagccggctgttgtggcgtgcgcctgtagtcccagctactcgggaggctgaggcacgagaatctcttgaacccaggaggcagaggttgcggtgagccaaaattgcaccactgcactccagcctgggtggcagggcaagactatgtctcaaaaaaaaaaaagttcatcactctacttgtgatacctttttagatgcatattatgtttctaagtaccgtatactgttgtccattggaaatacctgatttaaaagcaaaattaaagctgggcatagtggttcatgccagtaatcccaacactttgggaggccaaggcagggagatcacttgagcccagaagttcaagaccagccctgggcaacacagggagacctgtctctacaaaaaatttaaaaattggctacatgtagtagcattcgcctgtatttgggaggctgaggtgggaggattgcttgatcctggaagtcaaggctgagtatgattgtgccactgcattccagcctggatgccagagcaagactgtctcagaaaagatggcaaaattattctttctcactctgattagaatgaaagtcttcttagaaggggtgtgagggggtgataatcacaaaagtaatacatgcttgtaacagatccatgttgtataaaagtatataaaatgtgaatatattcttccatacctttaaatccaaccctacgaaggagctggagttagcattagcagtttgatggcatcctgccacatttttttggtcctttcacaagcgcacacgtgcacatttgtgtttggatggtcatcttgttactagaaatgcagaggtgtggacctgagctagaaccttccctcaaggcagagagtctacacttgtaactgctctgacagcagggcttttgcttgtctcctccttccaggtgagcatcacggactatgtggtgtttgaccagtgcagcttatttcagacgataatccatgccactcactcggtggccacagcagcccaagcccccgtagaaaaggtggcagataagctgcgcatggcgttttggtcccagcagcttcagtgccagccaagccttctcggggtcaataacagcggtgtctggatctcctcgggcaagaatgaattccacgtcgctaagggaagtctcataggtgggtgaattgctgtaattttcacactggctttataggcagcctcactttaaagccaacatttaaagaaaagctttaagatctcaacttgaaaagataatttagtgccagtggtatgaagtgtctagtggaggcactctatgctttgtgatcagtttctctcctttttaaaaaatctgtcattcctaaaactcgtatccctgtgtctggatagtgtttcccctggaaaccttttatgacataagaaaagcaaatggaggtcatttttatgttaacaatttcacattttaaatgaaaaaatccacccaaacctagtgagagagaatggtccacttcctggagggaaggtgatcgccactgttggaaatgcaaggctctggccaggtctgtgaatgtagatgccagtctacacatcctggggtttgtttctgtgagtgaaccccttgcttttctccagccctctccctgctgcatggcctccacgaccctggactgggtgtggctctgcctggcagtattcagagggagatgaatgttaggctgtgattgctcatgtcgctttatttagggacactctagaattatctggagaaagggtttgaaggccagctgtcgtccagaactaagatctgaagtggttttgtctatgctttctttctttaacacattcttcctatttactctttccaggcacctactggaatcatgtggttccccgtgggacagcttctgctacaaaatgggcctttgtgttggcttctgcagctcccacgaaggaaggtgggtcagtcttagcctcactgaagaatctagagcacagcttggccattggaaaggttcaaaccacagtcggactgtggccttgttggttatggggcatgcctcggagactgaccacgtgagggtgtcagaggccagtagcccttgttagctgagccgagggccctgaatcgggataggcctgaccaggagagcctctgagagggaccgagcgtggtgaagatgagggaaagtgtccttctgaaggaggggctcacacagtgcagccaccggggctggcagctggtgacttccagtggcacatggcaggggccacagcttctttgggcaccttcccatctcccctcgagaatccttctgtcacctcccagcaacttccttccgtcttgttcacagcctccggataacctaagtccgacatttgcaccgcattaggcagacctgccctgcagcggggtgctcctgccaaccacattctgggcagaactcagtgtccctgcggagtacagggtttgtgagggagccagggcaccagagggtgagggagctggcatctgcggccgggaggggcacttcccccacccgcttagctgggagccccggcagtcaggcgacctctctgggaagtagctgtacctcctcccaggattgcctgaggatgaaatgcaaagatgctgtgaaatctgtggtgaagagggaatcgtttgcttagttcaaaccattagtcccactaggatgcaggtgactgggtcagtacaataacttcttactcaccagattgttcggaccacagttctggaacccagaaatctctgaaaacaatgttatttcttgagtctggcataaattaatttggcagcaaaacctgaccggatctcacatagctgcctccagccttggttgatctgttggctgtgaccgcatccatgttgcagggatgttaccgcacttcaccggggagcgcctggcccctccgtggttgttttgtaaacctctggcatacccattagcttaggttttcaaaaatccagaaaaagtttgaattccaaaacgtggccacaagttgtagataatacttcatataacgtactgtgaccaagattttaactgccctaaggattatttgcattttaaacagaatctgttaaacctaaaggacttttttaaaatgctgtagggaatgaaaggacatgattttgaggcaagggtgggaagagaagcacttccagcttcctaagccttctccagcagctgccccaccccccggccccatccccagaaggtccgggagagcaccatggcgccatccttcctaggaactgccaaccctccctccctccagggcaccgagttgatagtcttctcctcttggtaaaattaactttctacattaaaaatgctttggtgcctttgttcaagtgaaaaacttctcagcccatgaaaaatgggaggtcaaagccactaagccaacattatggccttcataaaatctcctaagccttgccttctttccatttctttccaacatctcaggcgtgtttcttgttagtcacggtgtttccctctgccttctaccttaaagtgctacaccgctcctgcccgtgtgggaatgggcaggtgagtgagctggcatctgtggccaggtggctagcgtctgctgaaaggcaaaggctgccttgtgcatttagggcaggcggcttggtgcagacaacacctcgatgacaaacatgacccctttctgcaggaagcttcctgtggctgtgccagagcagcaaggacctgtgcagcgtcagcgcccagagcgcacagtcgcggccctccacggtgcagctgcctcccgaagccgagatgcgcgcctatgccgcctgccaggatgcgctgtgggcgctggacagcctcggccaggtgttcatcaggacgctctccaagagctgccccacgggcatgcactggaccaggctggacctctcccagctaggtacggccacctcgtgagtacacctgccggtgccctgactgccctaaaccggcatcacaacgtgatgtcggacaaaactgcccggcctgtgtccaacctgtgagagttctgagggggtgtttataagctgctgaatttcaggagctcagttggccactctttcagactagacaggctctgggttttgtcccttcccctgccccttagagtttgcagggctgtcagaacccgaggagggtgtgcgtcctcaggtcaaggggccactcgctgcgagcggcttgaaggatactggtgatgcagctgccccgtcagtctttctgaatatggaacatagctttatgacctgaaaagctgaaaagatgggtgttccctatgacaggatcagtgccacgtttgtctatctcctcaggacagtacctggcggaggagagtggctcagcacacaggtgctagctctccttcagctcagccagatataggaggacctgcatccactagctcctgcttttctctgaatcttctatcaaaagccgtggagtaggctaagaaatgtagtgctatttgtaggccgggcgcagtggctcacacttgtcatcccagcactttaggaggctgaggtgggtggatcacctgagatcaagagttcgagaccagcctggccaacatggtgacaccctgtctctactaaaaatacaaaaaaaaattaggtgggcgtggcagtgcacgcctgtagtctcagctactcaggaggctgaggcaggagaattgcttgaacccgggaggcgggggttgcagtgagccgagatcatgccattgcactccagcccaggcaacagagcgagattctgtttcaaaaaaaaaaaaagaagaagaaagaaagaaatgtagtgctgctatttgtaaataattcattcatgttccaagaaataataacataagcccacaacattagatttctctctgagtagattcttggtggatcaggcagcataggtgtggtttgcctgaaggtggagttgtgcagatggcccccagggcccggatgagccctgcacttgcagcaggactgacttaggaacttcctggctgcaaggcttcccagtttttttaacttagaaccagcatttggttatgtggtagacttgaattgtataagcatttaatgtttgaaaactcaatcacatgtactcaccaaaaaaaaaaaaaaaaaaaggatggggagaaagaaagcaagaagagggctgggcacagtggctaatgcctataatcccagcactttgggaggccaaggagggcggatcacctgaggtcaggagttcaagaccaacctggccaacatggtgaaaccccgtctttactaaaaatacaaaaattacctgggtgtggtggcacatgcctgtaatcccagctacttggttgggaggctgaggcacgagaatcacttgaacttggtaggcagaggttgcagtgagctgagatccatgccattgcactccagcctgggtgacagagcaagactctgtctcaaaagaaaaaaaaaaaaaagaaagcaggaagagaagggcttgttccccttctccccaagcccctggctgcattgcagtctgtatgctaccagctgatgagagcctcttgccattccgtaaagcaagcatcgtcctaggctgcctggcagtggttggtgtgctcagccccgggggctcctacagggtgctgagtagacatcacccattcttttgcctgaaaaggcccctgaacactaactcagctgaagaagcaagttctgttccaaggcttggggactgaaggtttgtccagggcaacttttgttctttatgctttgggcctccccacctgccttttggacccaccagtcaccatctagctttttgagaacacccgcctctccacatcactgacagtgactgatagacaaggctgaggctgagagtggcctgaacattggtgctgactgacctgccgcctgccctggaaagcctttcatttgttcagagaccctactggtcctgagccattctccagcagctcctacccagactaactggaaaatgccgctagttccctctgagggtaaaaagtccagggcttggtgtgtattctccctgctcctgaatcttgagcactgtgggaggctgtgttcacctgcaccatttgggtgagaagcagaactgcttcccttgcacgtccccttcccagcccctccaggaaggctgctgcaccgtggtgggattcagagtgaatgggcatcatgccaggttctgcactgctggagccagccctgcctgggcctcctgcctccagcacagctcatgcctccctcctggctcgatccagtcctcccagcaccggctagctggccaaagtggtgcaggtctctaaggtgtgtatttgggcttcactgggaggtttctctcggggagaaacctggcttgagtgggattgagtctcaagagtgtgagggaaacaggaacaagtccatcctgagtccaagatggccttgggccatctggtgttcagcagatactcattgaggggttgggtgtgtgaacagagggatggcctggggatcctggtcgctgtggatgggcaggttttcactgacctcctgtgttccgcctgcaaaatcattagcaaatcaatgtcagtatccggctgaccccgaaatgaatcagacagcagtgggtgcaaggaggtcacaggcagaggtgtggggactcatggcagaggcaggacagagctgggccccaggcgggctctggactctgggcaagctgctgtcaccttgaaccgcaatttcctctcctttcttttttttccaggtggggtctcactctgtcatccaggctagagtgcagtggcacgatcttggctcactgcaacctctgccttcccaggcttaagcaatcctcgcacctcagcctcccaagtagctgggaccacagacatgtgccaccatgcccacctaatttttttgttttttgagacggagtttcgctctgtcgcccaggctggagtgcagtggcacgatctcggctcactgcagcctctgcctcccaggttcaagcaattctccctgtctcaacctcccgagtagctgagattacaggcacccaccaccacacctggctaattttttgtatttttagtagagacagggtttcaccatgttggccagtctggtcctgaactcctgacctcaggtggtccgcctgcctccgcctcccaaagtgctgggattacaggcgtgagccaccacgtacagtccctgctaacttttgtattttgggtagagatggggttttatcatgttggccaggctagtcttgaactcctgacctcaaatgatccacctgccttgtcctcccaacgtgctgggattacaagtgtgagccaccatgcccggccttggtttcctctcctttctaatgggagcagcaacccccaagcccaaccccctggaggatgcacggggcatcccgtctaaatgttggccatctccgggcggtgtggtcatcctaaggctgtgacacgtcttgcttgggggtgctctctagtctttgttagctgctggtggtggggcttttgcttgtgttgccccagtttgtgccacagggaggacaaatccagcatctcttgttaaagcaccacctcgcttagtccttatcctgccctgaactttagattttgtttatttgagttatctggttgatcttgaaatgtcagattaagactcctttcctgtttcctacacatcctgagagaatgcagcaagtccagggttggcagctttgtgttggggcaagggaggtgaacaggcaaccgggactcccaggctgttcctctgcacacgcacctatcccctcaacgagtatctgctgaacactggagggctcgaggccatcttggactcagggtggacttgttcctgtttccctctcgctctttttttttttttttttgagacagagtctcgctctgttgcccaggctggagtgcagtggcgcaatctcggctccctgcaagctctgcctcctgggttcacgtcattctcctgcctcagcctcccgagtagctgggactacaggctcccaacaccacgcctggctaattttttgtatttttagtagagatggggtttcaccgtgttagccaggatggtcttgatctcctgacctcgtgatctgctcgcctcagcctcccaaagtgctgggattacaggtgtgagctaccgcacccagcctccctgtcactcttaagttgagactcaatctcactgaagctgagtttctcccctagaaagaacagccacctccccagccttcactatgccagggtaggggcagtgagcatcaggccaggggcaccaggtgttcagttattaggctctctccaggtatggtctgtgtcctgcaggaaaagcaggtaggtcaagagacttctctttttgtttgtttgagacagagtcttactctgttgcctaggctggagtgcagtgacacaatcttggctgactgcgacctccgcctcctgggttcaagtgattctcctgcctcagcctcccgagtagctgggatgacaggcatccacagccatgcccggctaatgtttgtgtttttagtagagacggggtttcaccatgttggccaagctggtctcgagctcctgacctcaactgatgcacccgtcttggcctcccaaagtgctgggattacaggtgtgagccactgcgcctgacccaagagaccttttaataattacttatttaagtgaaaattttgaatgcaggtgtgctgtctgcccaggagcccgtgtatgactgtgcatggcggctgtcatcaggtggcatgcattgaatggggattattgactgtaaaggagagtcatcaagctgacatggctgctgcctgtgttacttatctggaattaattggggtgcttcatttattttttacaagtcagcagtgggccgggtgcagtggcttacacctgtaatcctagcactttgggaggactgcttgaggccaggaatttaaaaccaacctggccaacatagcaagaccccatctctaaaaatatttgttaaagtcaacagtagggggtgcacacagcaatgaatggaaacacagtgactgcatttgaggatgttgttcaatatcaaatttagcctcccccaattgtgctcttcttcctaacttcgctcctctgctcccactaaattccctttttttttttttttttttttgagatagtgtctcaccatgttgcccaggctggagtgcaatggtctgatttttgactcactgcaacctccgtctcctaggttcaagcgattctcctgcctcagtctcccaagtagctgggattacaggcctgtgccaccccgcccagctaatttttgtatgtttagtagagacggtgtttcactgtgttggccaggctggtctctaactcctgacctcaggtgatccacccgcctcagcctcccaaagtgctgggattataggtgtgagccactgagccctgctgctcccagtaaattctgctggaaagaccagagtgctcttttggccagtcgctcagcagtgtcctggccatctacccgaggatctccctgcttctggacctctgcttccctcccaccactgtcagggtggagccccctcgtcaccaagttgctgtactgcagtagctgcctcctggcaccaggtgtgcccacctcccaccacggctaccagagctgtcttcctcaaacccagctcagatggtgttgccctccacgttacatggctccacgctgccactagaatacagctccagtctttggtgtggcacccagggtctcgcagccagacccggcctgctgttccgaggcctcgtgcgttggggactccagccactcctggcctttgtgttggggccctggctaactttcatattttgggtagagatggggtttcaccatgttggccaggctggtcttgaactcctgcccttccctaatgtgtggtgcatgttcatgccacccatttgcttctcttcctggggcctagcattccttccgtgggctgctttccttcaactcttcttccttcaggactcagttgagatcgcacctccccaccagacattcttcattgactgtccccatcatagcactgtgcttctacctgtcatttcagagccaagcacggtggcgcacacctgttgtcctagctacttgggaggctgaggcaggaggattgcttgagcctgggaagctgagcctaatctaggcaacagagcaagctcctgtttcttaaaaaaaaaaaaaatacacacatatatatatatatatatatatatgtaattttagtttgactcacattatttttgttgaaagtttacacacggagtgtgtagggactttacaggcagagaccaattgcttggtgacagtacgtacccaacaggatttttgttttaatttgggatggggtctcactatgttgcctaggctggtctcaaactcctgggctccagtgatgctcccacatcagcctcccaaagtgcggggattacaactgcatgcagctgcaccagcaggatttaaaatgtcagggaaagtcagtactgtttgcagctccatttctgagtaactctgggatgtgagttttgatcctatatttggccatgttactggtagtcaaagataaaactgccttccatgcaagtacaggatgtcatcacacacagtagcctggtggatgatgtgactcccaccctcccaggaaaattctcatctcttgctctaagttgccatcagccttcccagggcatgaggcagaagatgttaggttataaaaacttgtcggccaggcatggtggctcacacctgtaatcccagcactttgagaggccaaggtgcgtagatcacgagatcaagactatcctggccaacatggtgaaaccccgtctctactaaaaatacaaaaattagctgggcatggtggcttgcctgtagtcccagttactctggaggctgaggcaagggaatcgcttgaacccgggaggtggaggttacaaagatcatgccattgtactccagcctgggaacagagcgagactccgtctcaaaaaagcaaaccaaaaaatcttgttagagatacatttacatgtgttctcccttcagccctggtgttttctttacaagtgtcttcctggttgtatgagtagcaagcagccttggacagcatgacctctgctccctcggggacagtgttgaccttgggcagcactaactcattgttaggtcaggaccatcatcagtcttctctaaaaggcaagcagaaattttaatttcagactgggtgtggtggctcacgcttgtaatcctagcactttgggaggttgaggcaggaggatcacttaaggccaggagtttgagaccagcctgaccaacatagcaaaaccctgtctctacttaaaatacaaaaattagctgggtgtggtggtgggcgctgtagtctcagctactcaggaggctgaggcacaagaatcgcttgaacccgagaggcagaggctccagtgagccaagattatgccactgctgagccaagatggtgccactgcactccagcctgggcgacagaatgagactctgtctcaaaaaatactactaataataatcaattaattaaaaaacaaggccaggtacagtggctcatgcctgtaatctcagcacgttgggaggccaaggcaggcagatcacctaaggtcgggagtttgagactagcctggccaacatggtgaagccccgtctctactaacaatacaaaaattagccaggtgtggtggcacatgtctgtaatcccagctacttgggagcctgaggcacaagaatcccttgaacctgggaggcagaggttgtagtgagccgagatcacgccactacactccagcctgggtgacagagcaagactctgtctcaaaaaaaaaaaattaaattttaatttcaaggatgaggatgactttagcgaagtatcaaataatgaacatgatttctacctttaatttttttttttttttgagacggagtctcgctctgtcgcccaggctggagtgcagtggcacgatctccgctcactgcaagctccacctcccagcttcacgccatcctcctgcctcagcctcctgagtagctgggactacaggcacccactgccatgcccagctaatttttttgtatttttagtagagatggggcttcaccgtgttagccaggatggtctcgatctcctgatcttgtgatccacccgcctcagcctcccaaagtgctgggattacaggtgtgagccactgcgcccagcctcaattttttttttttaaatacagcttccctcttctttctacccctatacaaattaccagagcaattactgctataggattaaattaaaggaattcttaaattaaatggttggctgctgaaccaagttgtagcagttgaatatggaattttgtagtgatttattataatcctagtttttggaagaaaatttgcatcacttagcagatatttaagatgcttgtaacatttcatttcccagtacacataaatatgcattatgtcaggcattggaatgtttagcaaactaatgaaatttgtaatttaatttatcaggtcacagcatttaatgaagaactattcagtgtcagtttatgccgttaggtaacaaacaggattgtgttacgcagtaatttatacagaaaagtattttataaataaaatgtcaaataaatgccactttttgttttaaaatgatatgtttaagaaataatcctaaagggaaaatgtctgctttgtcgaataaagtaattaaagcatttttttaaaacaagagaaaaaaataaggacaaagcagggacagacaggaaaatgtcagtgtgtttgcatcagccaggctgggctgtgcttcggtagcaagccccagatatcagcgacttcacacagtgaaccgtggcccccgctccacgaagctggccctgcatctgtcctcttctagggcagtggtcctccaggtggtggcttcctgatcctgcctgctttgctctgcggctccaccatctcggttccttctgctcagagcctgttgccagtactggtcgtgggtcctgcctaactctaagggaatgtgagggagccatggagtgcttggggagggctgtggtctctgccaccgcgttcaccacatcctgaccacttcttccatggaacaggttcacaaacctcattcatccaggcggcctgggtgacactctggggtaaaagtctgcaggaaagccctcagttcaactttgtcatctttcacctgtctcttcaattcggaataagctggtttatgcactggaagtacatcatctagtagtcttttatatgtgttctgaaaggttgttcactgtgtaatgtgaactccgtgttctgtgagcagtgttgttgctgccaactctgagatgctggcctggtgtgtttttgtcaccatgtgactctgttagcatgatcactgctgcctgtagtttctcttagaggcaggttgaagactctaatgtaaaattgtcttttaattagcatttgtttctcagctatttctagagttactgttgaaggtactttattttgactggtacagatctttgcatatgtaatgttagagttccagggaattctgtttaaactccccggtaaaacattctgtacaagatcaaggaaggagaaaatacagttaatttttggaatagagaaattgtcatctttagaaaatgcaaagaggaataatgataattttttgtgtagcagtgaatgaatagctttaagttgatgtcataactgaagacacatgagattttcacatggcagagtcatgcctctgtgttttgctacactccgtgggctgtcatctgataccagtgacaactgtgcaagggtggtacctcccgattctgcacccagtgtggggcgtcctccacctgcccctctccagcagcaccaccagctaatggagctgcacaccttttattccccggttgaaagtcaaaataacccatcaaaattaaaaacttctcatccaaaaacactattaagaaaatgaaaaagcaaaccacagactagatttacaatgcacgtatctgacaaaagactagtacctacaatgtgcagagaactcctctaactcagcagtcaggagaaagttcattttaaaatgagcaagacttgaacaggcacttcacaaaagaagatatacagatgtccataagcatattaaaagattcccagcatcattccttagcaggaaatacaaattaaagccacgacatgatacaacttcacctctcctagaatggctgccgtggaaaaggttcaggggtgcgggcagccagaacccgcagacacggctgtgggtgtggagcacaggatctccattggggaaactggcggtttctttaaaaatgaaacaggccgggcgcagtggctcacacctgtaatcccagcactttgggaggccgagacggatcacctgaggtcaggagttcaagaccagcttggccaacatggcaaaaccctgtctctactaaaaatacaaaaattagctggacgtggtggcaggtgcctgtaatcccagctacttgggaggctgaggcaggagaatggcgtgaacccgggaggcggagcttgcagtgagccgagatcccgccactgcactccagcctgggcgacagagcgagactccgtctcaaaaaaaaaaaaaaaaaaaaaaagaaaaaaacaaaaaaacaggaggcagaggttgcagtgagccaagatcacgccactgcactccagcctgggcaacagaacgagattctgtctcaaaaaaaataaaaaagcagtcagttcagcagttacctcagggtagagggcattggccagaagggagttgagggaactttttggggtgactaagttgtttaaaaccaattgggacaggcgtagtggctcacacctgtaatcccagcacttcgggaggctgaggtgggtggatcacttgaggtcaggagttcgagaccagcctggccgacatgattaaactccatctctactaaaaatacaaaaattagctgggcgtggtggcacgcgcctgtaatcccagctactcaggaggctgaggcacgagaatcacttgaacccaggaggcagaggttgcagtgagccaagattgcacccctgtacaccagcctggatgacagagcaagactccatctcaaaaacaaacagaacaaaaaacaaaaacaaacaattcaacttagccctgaagatctgtgcattgtgctgtaggtaaagtctcagaggtcagaggttgctgatgcagaggacccaggctgacccaggtccaaaccttagatcctcctttgcctcctggcctggccacctcctgccgtgtggccctcagcagatctctttctggctgagtcccgacggtctcatgggtgaagtgggatgatactaatcgtgtatcattgttgtgggtttgagatgagtatatgaagacctggctgacagcctgtccacagcagctgctcaggaactgttgactgctgttcttttagccagactattatcaaatgtaatttctatttttaaaaaactcttcccatttcctttcctcttgcaatcagtctcaatagcagtaagaaataaataaaaatgaagattctttgggagacttagttttgtttttttttgtttttttgagatggggcctcgctctgttgcccaggctggagtgcagtggcaccatcacaggtcactgcaacctcgacttcctgggcccaaccgatctcagcctcccgagtagctgggactacaggtgtgtgccaccacacccaactaatttctgtgtattttgtagagacaggatctcactatgctgcccaaactggtcttgaacttctgggctcaaccgatccacccgccatggcctctgaaagtgctaagattacaggtgtgtgccactgtgcccagtcagtttaattctaattaagatcaagattatctgtaaatacgagttccctctctccaaatctagaatttgctggcattagtcacatgtctgaggaagctgacgatgggacccacattgagatactaatcccagggctcggtggttcagggcactgtactgacagcatcttgactgctttgcctgttgcctggaaggggtgccgtgtggcgcctggcaggtggcagagtggccagaggccattattactctcttgagttacggtgttctcaagcccagctgagtccacacagccgatgtggatggactaggacagatccgatgacttagtgtccaagttcaattgcaaatgcagcctcatttctttctttgaagtagaaaatcaaagttcatagattagatgaaagaatagtcattgtacaaaagtaattatagtgtgtgtacttttctttatctacaggagctgtaaaattgacaagcttggcatgtggaaatcagcacatctgggcctgtgattccaggggtggagtttacttccgtgtagggactcagcctctcaatcccagtctcatgcttccagcctggataatgattgagccacctgtccaggtaagcagaagttagctggtggaactcactcttcagtaagacagaaactgtgaggatgctggtactgggaaaaaggatctgcacagcctctagaggcctcccagcaaatgcggggagccatgcccccagggtctacacactctcgttcatcaacatcacaactggaattcgggatttgtgaagtttagagctgaacagactgttacagattatgagtcaacacgtatattttctctttcaaaataataatatttcgtttttgactttttactaagtgaatattattttttaaatctgcctatatattggaacctctattttataataataatgataataaatcagtacccagaagtataaagaaggtaaaagttactttgaa

SEQ ID NO: 15850 - DNA, 62212 bp, Homo sapiens
atcccgcctcctccggcccggcggggccgacgagtccggaggggctgccgcgggaggtgagtccggcgacgccgcaagcggccccgacgcccccgacgcccccgacgcctggccccgagcccctcctcggcctcccccgggccactcttcccttgcctcagccccgcagggtctccatgcccgtccgccccgtctccctcgcccgcggtctcgcccgcgcggagtggcggacactaaatgccacaacacacggagcgcctggctcgccgcccgcagaatccggcggtccgcagcggggaacaggggccgcccgcccctcctcaggcctccgctgcgcgtcccgcgccctcggcccccggccccaccctgcatcccggctgccggtctggccgcgggctctgctccttcgccttaagattgacgtcgtgttctgtcccccactcgcagcccgcgtcccttacatccgcccaccggcgcctggccccaggccttgacactcatccagttggtgttcagtgttcgatgagtggataagtgaatgactcctttcccaatcctatttgaaggcatgggaggcagaataggtagtaagtgttaaaggatggggtgtcctggagtcagagccgggcaggtcccagcggccccttcctagctctgtgctggggcaagtgccctacctcactccgctccagtttcatcaccagtggaatggagatgagaatagtttctacctctggcttggtaagaggattaaatgggtcagtgcatgtaaagttaagcacggtgcctgccgctgtacatttcagtaaaggggagcccctgctgtcatctgtgctagcctgcgttctcgccctctagtcccttctgatatgtctctgacttctcatgactttagtttctccttctctacctccatttctcttccctgcacttttttcttcctctcttattgggattcaggaattttattctgttctgtgacttatgttccatgtgttggcagaatgtgggataccagcctgggtgcatccttttctcatctattggagtgaccagttgcacttgtggactgcctccttgcagccaaggtcttgtagacagagttctgggaaatctcaaaacgcaaatcccaggcataggtagaatctgggaatgaagccactgtagctccttgtgatcaccagcgattcctggtcttttaggctgcaggactttgtgttttctcacacccagctataatgtaccttgataaacctctgaccttatttttgttgttgttgttgttaacctgacttacgtcccatattggtggttatttggccatcgtgtgccagcactgtgccaggctggctctagggatgctgtggtgaaccagacagacccttcctgaggtcactgcctcagaaagatcatggtctggcccatgaactttaaaagggagaactaagtgcaggtgtaggggacacacaaattgaattttcaggactgccttggaaaaccagtggtggggaagatggaatgaggataaccctcttctgaaggagtgactaggaagtagcttttgttaggcatcagctatattatacccacgtgtctttttcaatagaagactggcatctactggatttttttttccaattttttcttaaagaagttacacttaagtttggggagaatttcatttcatattagccgctgtaggagttgaaaaaaatggctactggaacttagtgggaagaaaaggaaggaaacaggcatcaggcagaggcagttgattgaacttgggaagatgaggaatagatcaggaaagggttataatgaaaagctttggtgtcaagcacgaagagatttctagattcagtaatgcacagagagatcagtaaaattagaagggagtagttgatggctttgcgaattgctaaggtagaagggagctgttactcaagatgcatgttcaatttaaaatgaatgtattctttggacctggacataagagttctattgactttttgccactattttatatttagggctgtcatacttgggtgaatctagcacagtgctttgagagagagattcattcaacaaacgtgtattgagcattgattgtaccatactctttattggtcttttaaagcaccacaaagtatacagactagaagaacataggtgaagatgagaaagagtccattgaaggggagagaaaacagataatgatggtgctgtgcgataactgccatcatggagttctgtgaaagcagagaaagaccaaccaagtatctgagggaatttatgaaggcttcctggtggcggaggactagttcttacagggcacatgtgggggaatagggaagagtggaaagggactttgttctgcagagacatacaggttatggtgtgtgcagggactgtgatggaaagctgatggatgcacaaacaaaacgtggcctgtctacacaatggaaggctgttcagcaataaaaaggaacgaagtactgatttgtgctacaacatggaggaaccttgagaacattaggctaagtgaaagcaaccagacacaaaataccacatattatatgattcaattttgatgaaatctccagaataggcgaactgtagacagagaggagatcagtggttgcccagggctgagagaagaagcgtgtagaggggtgattgctaaagggtagggagtgcacagtgtgtggatggaagagtggcctgagatgaagttagatatagactgttttgtcatagtgtctaatttccatgcttgtgttaggctttagcttgtgaccattgggtagccaatggggatgggagcaaggaagtgacaaaattttgtctggaagataaatgactgcctcagtctcattacgttcctccttaataatttaatactcaaataattaatagatgtcgtagccagatttcaaacatagattctacaatagggatacaaattgttgcttcctagggattttggagagaatcctgaaaccattagtgtacccagagcactctgataacatggttattgtacagcgaagtggatgacttagactctatattagtcctagctccagtttgagaaatcatccatctgggtggcagttgggtgttagtagtcagcagtgaaggctagctgccaccttccagggttatgagattgacagggctagtggggaaaggaagcatcgtaacttgaaggatgccatagggtggtgttttgtatttttttaactgaaatagtcatgactaaggaagcattattcattatatttttatttatttatttatttttgagatgaaatatcactctgtcacccaggctggagtgcagtggcacgatcttggttcactgcagcctccacctcccaggttcaagtgattctcctgcctcagcctcccaagtagctgggattacaggtgtgcgccaccacacctggctaatttttgtattttttagtagagatgggtttcgccatgttggccagactggtctcgaactcctggcctcaagcaatcctcccacctcggcctcccaaagtgctgggattacaggcgtgagccatcatgcccagcccaattttaaaaattggattgagactattgttttgcagtaagacctgaagttaacaaatctttactgagcatctactctgtgccaaagctattattagatactaggatttaccttggtaagcaagagagaattcatgttgcttacattcttgtaggagagatgatttttaaatggtttagcaaataaagcaattagaggttgtaatgaggattatgaagcacatatgatagaggaaagaagggacagttgggtactcttgagtgatctggtcagagaaggcctttctgtggtggtgatatttaagctgagaccccacagttgagaagaagccagataaatggagtgagatcatttattctgcatagaggaaataattatgacacctgagtgggacagagtgggtcagtggagctagaacttggaggacaagtggagacgggtagagaggtgacaggggagctgcaaagggcttagaccacacggggcatttggtttttattcttagagcactgggcaaccagtgaggagttttgagtagaatgggtagtatggtctgatttctctttgaaggagctgatattttcctttgttttttggggggtaacagctttattgagatataatttacatgccacacagttcacccatttatatacaattcaatggtttttactgtattcacagctatgcaaccgtcactacgtcaattttagaactttctcatcaccctaaaaggaaactccgtacccttcagcaatacaccctaaccccttcttctcccagccctgggcaaccactgacctactctgcctacagcttgcctattctagacattttgtatacatggaatcatataatatatggtgttttgtgcctggttgctttcacttagcataatattctcaggattcctccgtgttgtagcatgaatcagtacttcattcctttttattgctgaacaggcttccattgtgtggatagatcacattttgtttgtccattcatcagttgatggacagttaggttgttttgacattttggctattatgagtggtgatattatgaacatttatctacaaattctttgtagatatgttatcatttctattgggcataaacctaggaatagaacttctgggtcacatggtaactctgtaaccttttgaagaactgcccactggtggctgcaccattttatttttcaccagcaatgtatacagttttttccacatccttgctaacacttgttcataccctagtgggtatgaagtggtatctccttgtggtttcgatttgcatttccctgatgagtaatggtgctgaacatctttttatgtgcttattggccttttttttttttttttttttttttttttttggaaataaagtctcgctctgttgcccaggctggagtgcagtggtgcgatcttggctcactacaacctccacctctcgggttcaggtgattcttgttccttcggcctcctgagtagctgggattacagatgtgcgccactatgcccacctaatttttgtgtttttggtagagacagggtttcaccatgttggccaggctggtcttgaactcccaacctcaggtgatccacctgcgttggcctcccaaagtgctgggattacagatgtgagccaccgtgcctggccttactgggcatttgtgtgtcttctttggagaaatgtttcttagactttgcccattgtaaaattgtcttttgttgttgttttgagatgaagtcttgctgtgttgatcaggctggtctcaaattcctgggttcaatcgatcttcccaccccagcctcccaagtagctgagactatagccacgtgccactgcacccagcttttaaaattgtctttttattattgagttataagagctctttatatattctgggtaaaatctctttatcagatatataaccaggagatattttcttccattttgtgggttttttttttttatttttgtcggtggtgtggattagatgtatttttactttcttgatggtgccctttggagcacaagcgtttttcatttcagtgaagtcaaagagctaattttgatggctgaatgagcctggcttctgggggcaggtgtggaagaccatggcagcagtgtaggcgagggatatgatagcttgtactgtggcatggccacagagttggtgaggaggcgccaggcttgagggaggcttggagatagggctgatggactgagttgagagattgttgtacgggtgagggaaacagaggaattgagggtgaatactaggatttcagcttgaacaacacttttgattcaaaatgtgattatgctgttacctgccggacaattgtgacagtttctaatacctgctggagcctagcaagggcagccctgcgctccctccctgggttctgaagttgcttttggtaggattatcactgagtgtgccaaggagatggtcagggattctgaccttttgtaatacccactaagacctcctaagccaccacaaataaacatattatctgagtagaatagtgcacttgctctgcaaatgcacttttgaggcaaatctcttgactcccttctagctagactgcagtctcaaagcccttcttgtgtagagcctgcgagctgtcagtggatagcatcaaatcaagcggatggattcttgaaagctaaatgtcatcatttgacagagctactatgaggaaaaatatttttatttttaaaaaagttttattgatcgattgatttgagatggggtcttgctctgtcacctaggctggagtgcagtggcttgatcatggctcactgcagcctcgaactcccgggctcaatggatcctccaggttcagtcgatcctccgggctcaattgattcttgtgcctcagcctcctgagtagatggtactacaggcacgcaccaccacacctggctacttttttgtattttttgtagagacagagttttgtcatgttgcccaggctgatgtcaaacccctgggctcggccaagtgcagtggctcacgcctgtaatcccagcactttgggaggccgaggcgggtggatcacaagatcaggagattgagaccatcctggctaacacggtgaaaccccgtctctactaaaaaaaacaaaaaaacaaaaaaacaaaaaattagccaggcgtggtggcaggtgcctgtagtcccagctactcaggaggctgaggcagaatggcatgaacccgggaggcggagcttgcagtgagccgagatcgcatcactgtactccagcctgggcgacagagtgagactctgtctcaaaaaaataaataaacaaacaagcaaacaaacaaacccttgggctcaagtgatctgcccacctcaacctcccaaagtactgggattacagatgtgagccactgtgcctggctgaggaataacttttttttttttgagacagagtttcgctcttgttgcccaggctggagtgcaatggcacaatcttggttcactggaacctctgcctcctgggttcaagcgattctcctgcctcagcctcctgagtagctgagattacgggcacctcccaccatgcccagctaatttttgtgttttaatagagatgaggtttcaccaagttggtcatgctggtctcaaactcctgacctcaggtgatccacccacctcaggctcccaaagtgctgggattacacgcgtgaaccaccacacccggccggtaataagatttttaaaggaggaaataacattaggcaatacttactggtgaagagctcagtacttccgcttgcttgctaggagatctcatgagctaaagcagatacgaaagtgcctgccagagatagggagtagaaggtgtgaaggccaggacgtgagaggccaggcctgttgtaattagaagcaattcagtgtggctggaggacaagtgagagatcctcgggtggcagaggccagatcaccaaggttcttgtaagccagcaacacttgggctttagcaggaggaagatggggaccactgcagagtgttaagcaagggagtgatgacatcagctttgcacatcaggaaaatccctctgtttgccacgtggatgacggggagggagaggcgggcagatgagctgggcaccagagagagctgcaggtgagaggtaatggtggcccgagctaggggtgacacactgaggtgtgtgggagatgtactgaatggagaatcggggacatggagaggagaggaggagggatcagggatgatgctccttttctggcttggtcagcatggcccaggcaactggtagaagatacaagataggtaagtgtctttgacattgttcatttactctgtgtttatagctaggatgtaagttttactaatcccatttcagatggtaattggagatctagagaggttgagcagttattccagggtgcctcaggtagttttaggagcattgggatttgaacttgggtctttttcacttcagtatcattagccactcattgtgcagttcttcctcggtggaaagagggtcagttctgtggctgtgggtctgagacctgggggttgggtgaggtggaacatggagttgggtgaacattgggtaaggaggaggagcagaaagtcttagcagaaatgtttgctgtgtctgcattgtttttcccaaacctagcgcaggacagtgagacagcggctctatgccttttcctcagcccgtcctagacactgtttctgccaggaggacagttttgctgggagttggcctcaacctgctcctcctatctgaatggtgggtgaaggacagacaagcctggtgctaagctcatccagaggcccccagatagggaaatagcatggattctcttctgcccgctggggacttcttgggcacctggcccccaggcatggctgtcctgactcatctgggtgctatggcttacgggcctctagatatcctttggaaaaacgtgtgaggcataaattgatatgaacattcttcaaggcagtttggcaatacatttttttttaattcaacatttccacctcttgcagtgtactccaagaatatacttggatatatttctgttgtttttgatggcaaaattaaaatcttttggttgagaaaattttggtttatccatacagtgtgttctctgcagtttttctgtatagtcactaaaaatcacattctaggggaatatttaatgacatggaaaatactcatgatttattaagtgaaaaagtctgtgtgtgtgcatatatgtttatatacatatatctgtagctatctgtgtacatggcatatctcagtatgatgagattgtgacttttctttacttctttgtccttttattttgagatagggtctcactctgtcacccaggctggagtacagtggtataatcagctcactgcagccttgatctcctgggctcaagcgattctctgtgtaccaccacacctggctaatttttgtattttttgcagagtcaggatcttgccatgtttcccaggctggtctcaaatttctggcctcaagtgatctacccaccttggcctcccaaagtgctaggattacaggtgtgacctactgcacccagctgcctttgtacttttcttttcttttttttttttgagattgagtttcactcttgttgcccaggctggagtgcaatggcacaatcttggctcaccacaacctctgccttctgggttcaagcgattctcctgcctcagcctcccaagtggctgggattacaggcatgcgccaccacgcccaggtaattttgtatttttagtagagatggggtttttccatgttggtcaggctggttttgaactcccaacctcaggtgatccgccctgactcagtctcctgaagtgctggggtttacaggtgtgagacaccgcgcccagccttctttgtgcttttctatattaacaaatttttgaggccgggcatggtggttcatacctgtaatcccagcaagtctgggcgtggtagctcaagcctgtaatcctagcactttgggaggccaaggtgggtggatcacctgagatcaggagttcaagaccagcatgatcaacatggtgaaaccccatctctattaaaaatacaaaaattagccaggcctggtggcaggcacctgtaatcccagctactcgggaggctgaggcacaagaatcacttgaacccaggaggcggaggttgcagtgagccaagatcatgccactgcactccagcatgggcgacggagcaagtctcaaaaaaaaaagcaactttttgatagtgagcatttataactgttataaaaagaaacctttatttttaaaaagttaaataaattatggcacatcaatgtgtgtatgagtatgtatgtatgcactctttaaggaaacaaagccttttactatttctgtgccttggaaagaagaataagaagtttctgcatccatgaagtggaggtaacattcatgtctaatgtttggggattgcaggaaaaaaaaatggaagtaactatgatgcctacttcatgtttgttttttttttctttctttttggtgaggatttaatgggtttgtgtgctaagaacagtttgtattaagtacagacggttttcaacttacagagtttcaacttactattttttgactttaagattgagcgaaaacgataccattcagtagaaactgtatttccagtaaccatacaaccattctgtttttcactttcaatatggtattaaataaattacatgagatatgcaacactttgtgataaaataggctttgattagatgattttgcccagctgtaggctaacataagtattctaagcacatttaagttaggctaggctaagctaagatgttcggcaggttaggtgtattaaatgtattgtgacttatcttttcagcttatgacggttttattgggacataaccccattgtaagttgaggagcatctgtaaaaacattagctattcccattattattactgcaaaagagggtggattgggttcttaagtatcacagaggaatgcaattattattattattgttatttacttacctttaagaaagttctcatacgtggatatgttctgcctgtattggctattgtgactgtcagatgaaatgggaatctaaggctgggcgcgatggctcacacctgtaatcccagcactttgggagactcagatgggcagatcatgaggtcaggagttcgagaccagcctggccaatatggggaaacccccatctctactaaaaaatataaaaattatccgggcttggtggcacacgcctgtagtcccacctactcgggaggctgaggcagaagaacccaggaggcgagtgttgcagtgagccgagatcgcaccaccgcactccagcttgggggacagagcgagattctgtctcaaaaaaaaaaaaaaaaaagaaaagaaatagaatctaaaaatgcttggaaaactggatatgctatacagatttagggaattattattccagcattgaattggggtcatattgaagaaaaaatgatactttgctgctcttccattccattttttagaattttatatttaatattttttcttttgctctacacattcagagaaacttctctagtaatgaactatagaaatgatcccagaaagcacagcctttgttcttctgttcttgtcactcattccttccttgcatattttccttttatttatttattcatttaagagacagtgtctcactctgtcactcgggctagagtgcagtgacacagtcatagctcactgcagcctcaaattcctaggctcaagtgatcttcctggctgagtgcagtggctcatacctgtaatcccagcacttggggaagctgaggaggaaggatcacttgagcccaggagttggagaccagcctaggcaacatagtgaaaccctctctattttttaaaatgaaatatttgttttaaaagcgtgatcttcccacctcagcctcatgagtagctaggactacaggcatgtagcaccatgcctgactaatttttaaaaatattttttgttgaggcgggagtcttgctatgttgcccaggctggttgtgaactcctggtctcaagcagttctcccaccttggcctcccaaagcactaggattacaggcataagccactgttcctgggccaaattttctgtttcatcattcattcatttatgcaacaaatacttgctgaatgcctctgatgtgcctagcccttttctccctgcggggggaagaggggtgagtgaggcagatatgggctctgctgttatgggccttacagactagtgtgtgtgtcagagtggcaggcaggcagataaccagtcagagaaaagaaaggagatgtgtggataggccggacacggtggctcacacctgtaatccaagcactttgggaggctgagatgggaggatctcttgagcccaggagcttgaggctgtagtaagccatgattgagaccagcctgggcaacacagcgagacctcatctctacaaaataatttaaaaattagccaggcatggtggcatattcctgtagtcccagctacgtgggaggtggaggcaggaggttcacttgagcccaggagtttgaggcgtcagtgagtcatgatcttgctactgctttccagcctgggtcacagagtgagactgtgtctcaaaaaaaaagaagaaaggggctgtgtagagaaagtaaaactgggagaggtgacagagagagaactcagtagggggaggagaaatcaagtacggcctcatgaaagagggcacaattgagaaggaggaagagctcagtagagaaagaacattccaagtggacggaacagccaatgcaagggccctggggtgagaacgagctggattaatttgatcagaagagggactggaagttggtcagtccactatgtagaaatagaaaacctacagttcaaagagaccataaatccatgatgcaagaagtttctgtgagaggagcttggaagtctccatagaacctgtagagctaaaatatccctccaggtgtaatcaggtacagagcatctacctggactgttacagcctgcctgtcagagctgtgactgtgctgttgtcaagagcctaggacttggagggaaaagacctagagtcaagtctcggctgtttgatcttgagtgagtctcatgaccctctggcccccagtcccttctaaaagttagggatgatgctacctgccttataaggtagggtcaggattaaatcagtgagtgagcactttgtgaaagatggcgtgcatggaagggttgcatatctttagtaagggaagctttgaagccaaagtgcaagtgggtgggtctccatgtggaacagagtaaggtgctgtgtggctggactcttgagcgctgaggaggctgtgggcatccaaccaggccagggcacctgttcttcaccatctcattaacacagccagcatatctgcatctgagattggcccactattctcctaatagagtgtctttcctgtttctcttttccatatcctgtccaacctggtgggcttcatagttcaggatgtgttcagtgaagccatgtctacactcactctaatccccactgatctctctctcctcatgaaaacccacaaattatcacctcattacttgtggatttgtgtcttttcactatttcatctgcctccctgtctagatcataagctacttgggagtaagaactgttttgttttttgtattctttccactcctccatggcattcactacaacataaatcatagaggtcagaacatactgaagtgcattttgagttaaaatgctcaaaagtgatcttagtgacacgtgtttactttccctgtttatttaagctccagctataatgtttacctgcctaaaagttccatgttgccagtattaaacatacttctttttgccatgactaggcattgaaaggattgtaatgctttgttctgtagcccccaggtttccctagatgacaaataaacattccttttcctgcgtgaagatagtctgtggaaaccttggccatggcatcgatatcagagcctgttacattcagagagttctgcccgttgtactatctcctcaatgccattccgacaaagatccagaagggtttccgctctatcgtggtctatctcacggccctcgacaccaacggggactacatcgcggtgggcagcagcatcggcatgctctatctgtactgccggcacctcaaccagatgaggaagtacaactttgaggtgagccttgctttgcttttcacctgagggggcacgagccatagctgacgcttaacatgcttgtgttctaggatgagataatttacttctgatttgccagaatatggccttaatacctcacccaaacaatactttaaaaccatctttagctgaagtggaatataactaaaaacattggtgtttttaactttttcctgcctccaaaaatctaacatcactttatttatttatttgagacagcgtctcgctctgttgtccagcctagagtgcagtgggacaatcatagctcattgtagcctcaaactcctggggtcaagtgatccttttgcttcaacttcctgagtagctaggaccacagggatgactgccacacccagctagtttttgttttgttttgtctgtagagacatggtttcactatgttgcccaggctggtcttgaactcctcggctcaagcagtcctcctgccttggcctcctaaagtactcggattacaggcatgagccaccacacctggcctaacatcactttaaaagagaatatcacctgaggtcaggagttcgagaccagccttgaccaatatggtgaaaccctgtctctactaaaaatacaaaaattagctgggcgtggtggcatgcacctgtactcccagctactcaggaggctgagacaggagaattgcttgaacctgggagatggaggttgcagtgagccaagatcacaccactgcactccagcctgggtgacagagtgagactccatcttaaaaaaaagaaagaaagaaaaaaagagaacattttagtatttaaaacttactacaacactttgaaagcagatatttttttcctaagtgtttacaggagcaggcacatgcctgtttttcaaagttttgaataatctctagttcttctcttgaaattatgatgaaaaaaggatgtatatgaatattggctcattgccagaatatgcacctcttagctgagctgaggtctcttctatagcattgggatcctgaccaatctgtttctgcagtgctgtggactcaggcatttctgtgtattgtagatattggtggagatgttatttgactgtgttgtggctggcaccaactattggtgaactgtaatgtaattcacccacttagtcaatatctgtagtttattgagtacgtcacttttgtgagagactcaaagttgactgagttgtggcttccaccacatgggactctattctgtctgtggttagggggcttttatggaccaagatacagcttttgtatctaagagaaatgtttacaaatacttgtgttttaatcagtattcaatatattaaagttttcatttaaaacgtaactaatttaagcctctgtgctcattttaaaataatcaaaatggttcatacacatacagccctttctatgtgtcagacattattctttaaaaatatattttttaaattttttaaaacattattttttccttctcactatgcttcttggacagacatatattaactcattttatcctcacaaaaactctctgaggcagatgttattatgatcttcctcatttactaaggagacagctggtgaagagagggtaggtgacttgcctgaggttggctggtagtaaatggcagcaccatcatgtgaacttgggcagactgtctctagggtctgtattaatatatatatatatttttgagacggagtttcactcttgtcgcccaggctggagtgcaatgacatgatctcggctcactgcaacctccacctcccaggttcaagcaattttcctgcctcagcctccagagcagctaggattacaggcacccgctatcacacccagctaatttttgtatttttagtagagacggtatttcaccatgttggccaggctggtcttgaactcctgacgtcaggtgatccatctgcctcagcctcccaaagtactgtgattacaggcgtgagccaccacacctgcccgtgtattaatattttttgtataaaaattagaactactgctatttcttctctttgagtaatagctcatggattcgactgatcaaattccccaaacatttaaaaccattacgtaatctttcaaactgtagttaggagtttaatagtctgaaatctctcaaatgcttcagacactttataaggaagactcgtgaatccaacgatgaaccccaacaagatctatcaaagaaatccatgcacagaggcaccctagtcacactgctaaagatcacaatcttaaaatccgtgcacagaggcgtcctagtcacactgctaaacatcacaatcttaaaatccatgcacagaggcgtcctagtcacactgctgaacatcacaatcttaaaatccatgcacagaggcgtcctagtcacactgctaaagatcgctgtcttaaaatccatgcacagaggcgtcctagtcacactgctaaagatcacagtcttaaaatccatgcacagaggcatcctagtcacactgctgaagatcaccatcttaaaatccatgcacagaggcgtcctggtcacactgctaaagatcaccatcttaaaatccatgcacagaggcgtcctggtcacactgctgaagatcacaatcttaaaatccatgcacagaggcaccctagtcacactgctgaagatcacagtcttaaaatccatgcacagaggcaccctagtcacactgctgaagatcaccatcttaaaatccatgcacagaggcatcttagtcacactgctgaagatcaccatcttaaaatccatgcacagaggcatcttagtcacactgctgaagatcaccatcttaaaatccatgcacagaggcgtcctagtcacactgctaaagatcaccatcttaaaatccatgcacagaggcgtcctagtcacactgctgaagatcacagtcttaaaatccatgcacagaggcgtcctagtcacactgctgaagatcaccatcttaaaatccatgcacagaggcaccctagtcacactgctgaagatcaccatcttaaaatccatgcacagaggcgtcctagtcacactgctgaagatcaccatcttaaaatccgtgcacagaggcgtcctagtcacactgctgaagatcacagtcttaaaatccatgcacagaggcaccctagtcacactgctgaagatcaccatcttaaaatccatgcacagaggcgtcctggtcacactgctgaagatcacagtcttaaaatccatgcacagaggcaccctagtcacactgctgaagatcaccatcttaaaatccatgcacagaggcgtcctagtcacactgctaaagatcacaatcttaaaaatagccagagaacaatgacgtattacctgtagaggaacaatgatttaaatgactgtggatttctcatcagaaactgtattagcccgttctcatgctgctatgaagaaatacccaagcctgtataatttataaaggaaagaggttttattgactcacagttacgcatggctgcggaggcctcaggaaacttacagtcatggtggaaggcacctcttcacagggctcactgtcacaagaacaggaggggggaaaccatgcccatgattcagttatctctacctggtccctcctacgacatgtggggattatgggaactacaattcaagatgaaatttgggtgaggacacagccaaaccatatcagaaacaatggaagctggaagacagtagcatttttttggttttttgtttttgttttgttttgagacggagtctcgctctgtcgcccaggctagagtgcagtggcgcgatctcggctcactgcaacctccgcctcccgggttcaagcgattctcatgcctcagcctcccaagtagctgggactacaggtgcccgccaccacaccggctaatttttttgtatttttagtagagacggggtttcaccatgttcaccaggatggtctcgatctcctgacctcgtgatctgcccgcctcggcctcccaaagtgctgggattacaggcgtgaaccactgcaccaagcttgtttttttttttttttggcagagtttcgctcttgttgcccaggctggagcgtagtgactgcaacctccacctcctgggttcaaacgattctcctgcctcagcctcccttgtagctaggattacaggcacacgccaccaagctcagctaatttttctatttttagtagagacggggtttcaccatgttgtccaggctggtgtcaaactcctgatgtcaggtgatccactcgcttcggcctcccaaaatgctgggattacagctgtgagccactgcgcctggccgatagtagcacatttttaaagtggctgagaggccgggcatggtggctcacacctgtaattccagaactttgggaggctgaggcaggtggatcacttgaggtcgggaattcgagaccaatctggccaacatggcgagagccccatctctactaaaaatacaaaaattagccgggaatagtggctcatgcctgtaatcccagctactgagaaagctgaggcatgagaatcgcttgaatctgggaggcagaggctgcagtaagctaagatcgtgccagtgcactccagcctaggcgacagagtgagactccatctgaaaaataaaatgaagttctgagagaattgtcaacccgaaattctttactcagtgaaaatacctatcaagaaaggtgaaatgaaagtattaccagatgaaggaaaacttaagagggttcgttgccaaccgacctgctctaaagtcattgctaaatgaagttctttagacagaagggaactttgtacatcaagaatgaagaatggtaaatacctgggtaataaatacaatagatgatttttcccctattgagttctttaaaatatatttgacagttgaaaacaaaaattataactgatcaagttttaacagatgtagatgtagtaatatctaagacgagtacaacataagtaagggagagtaaggtatcctatacatttgtacattcttcttgaagaggtacaatattgattctaagtagattttgaaaaattacgtataggccgggcacggtggctcacgcctgtaatcccagcactttgggaggccgaggcgggtggatcacgaggtcaggagatcgagaccatccaggctaacatggtgaaaccctgtctctactaaaaatacaaaaaatgagccaggtgtggtggcgggctcctgtaatcccagctactcaggagactgaagcaggagaattgcttgaacccaggaggcagaggttgcagtgagccaagatcgcgccattgcactccagcctgggcaatgagagtgaaactccgtcccaaaaaaaaaaaagaaagaaagttggagtggctgtattaatatcaaggttttcttctgtgcaaagaaataaccaggggtaaaaaagacattacataataacagattcgtatatgtcccttaacaacatagcttcacacaatacacgaagcagaaatggacaaatctgcaattacatgtggagacttcagtattcctctctcaataatagaagtagtagacagaaaaccaacaggatgtagaagaactgaacaacaccatcagccaacttggtctaattcacatttatagaacactcagctgaatatacattctttgcaagtgcacatggaacattcatcaatatagaccatgtcctgagttagaaaacatacctcaacacatttagagtagactaagctttccaggcccttgtgttttactttgttttttcacttttctttaaaatataatttacacaaagtttgcaaatctttttttttttcgagacggagttttgctcttgttgcccaggctggagtgcaatggtgcgatctcggctcactgcaacctccgtcccccgggttcaagtgattcttgcctcagcctcccaagtagctgggattacaggcgcctgccaccacgcccagctaattttttgtatttttagtagagatggggtttcaccacgttggccaggctggtctcgaacgccagacttcaggtgatccatccacctcggcctcccaaagtgctgggatgacaggcgtgagccactgtgcccagcctgcaaatcttaatagtaccatgtgatgaatttatatgtgtatgcctgtttaatcacccagttcaagatacagaacatttccagcaccccagaagattctcttgtgctacctcctaatcattacccctccccaaggtaactattctgacttctaacacagagtagttttgacttctacagagtagttttgctagctccttgggttttaattcactattaagtaacctctggcagtaaggtttatatgcgttagcggaatttggactccttactcaggttgcagttacaacccagttttcttttataaagcacatgtgtctcattgatcaccattgtattgtcttttttgttttttttgtttttttttttgaggcagagtctcactctgtctcccaggctggagtgcagtggagcgatctcagcccactgcaatctccgcctcctgggttcaagtgattctcctgcttcagcctcctgagtagctggaattacaggtgcccgccaccatgcctggctactttttgtatttttagtagagacagggttttaccatgttggccaggctggattcaaactcctgatcgcaagtgatccacttgcctcggcctcctaaagtgctgggattacaagcatgagccactgcgcccggtcccgtattgtcttttagaaaaactgtataactatttaaatattttcagtcaccaaactaaaaaacaaatactaaagttgaagtttattgctccccagaatgaaactacaaattacatctgatggccatttttacagtttaaccaataattagttctctatcatattatctttgtttcgttttcctttaacagaatacctaagactagtagttgttctttttttttttttttgagatggagtttcgctcttgttgcctagcctggagtgcagtggcgcaacctcggctcactgcaaactctgcctcccgattcaagcgattcttctgcctcaatctcctgagtagctgggattacaggcatgtgccaccccatctggctaattttgtatttttagtagagacagggtttctccgtgttggccaggctggtctcgaactcccgaccccaggtgatccacctgcctcggcctcccaaagtgctgggattacgggtgtgagccactgcatccggccggaagttgtttttatttttttactatttttaatttttttaaagaggtttatttggcccacaattctgtagctggaaagtccaagattgggcagctgcatctggtggggacctcatgctgcttccactcatggtgggaattggaaggggaccaggtgtgtatcaagagatcacatggtaggccgggcatggtggctcaggcctgtaatcccagcacttcaggaggccaagacaggcggatcacgaggtcaggagtttgagatcagcctggacaacatggtgaaaccccatctctactaaaaatagaaaaattagccaggcatggtggcccatgcctgtaatcccagctactcaggaggctaaggcaggagaatcacttgaacccgggaggcggagattgcagtgagccaagactgcaccactgcactccagcctgggtgatggagcaagacaccacctcaaaaaaaaatatatatatatatatgtgtgtgtgtgtgtatatatatatacacatatatatgtatatgtatgtgtgtgtatatatatatatctatatctcacatggtcacatggcaagagaggaagcaagacaggaaccaaggatgccagactcattttcttttcctttcctttttttttttttttttttttttttttgagacagagtttcactcttgttgccctggctggagtgcagtggtgcaatctcggctcactgcgacctctgcctcctaggttccagcaattctcctgcctcagccttccgagtggccaggactacaggtgtgcgccaccacatctggctaatttttgtatgtttagtagagacagggtttcaccatgttggccaggctggtctcaaactcctgacctcaggtgatccacatgcctcaccctcccaaagtgctggaattacaggcatgagccacggcacccggctctttttcttttagtatggagtgcttcacaaatttgtgtgccatcctcgtgcaaggaagccagactctttttaacaacctgctgtcttggaaactaatccagtccttggagagtgagcactcattcacccatgaggagggcattaatctattcatgagggatctacccccatggcccaaacacctcctactaggccccacctcccagcactgccactttggggatcagacttcaacataaattttggcaaagacaaaccacatctaaaccatagcagatatgataagtcacgtgagctttgaaggactgtgacatggtagaacagcatccacaggctctaccagagtttggtggaacagcatccacaggctctaccagagtttgagggagcagcatccacaggctgtaccagagattgagggaagctggtacaaattactggatccagcaccatagaaggggactctgggagaatcccatgtaaagattttagctagtccaggcatagtggcacacacctgtaatcccagcactttgggaggccgaggcggacagatagcttgagctcaggagttcgagactagccttggcaatacagcaagacccccatctctacgaaagaatacaaaaattattcaggcgtgatggcgtgtacctgtagtcccagctactcaggaggctcaggtgggaggatcatttgagcccaggaggtcgaggtcgtagtgagccgagatcgagccactgcaccctaacctgggcatcaaagtgagaccctgcctcaaaaaaaaaaaaaatttagctagttatcctttaaatgtatttcacccatacatgcatatgcctgctgtgtacctacaaaaactttttaaatctaaaatattaacatttggaaaaaaaatgtattttgctggggccaaaatccatacttggtagccctgagtatcaacagcattttttgagcgcccattatatataggatatcaaacttataattgtggagaatcacaagggaggtataaaataaatttcttgtccaggcacggtggctcacgcctataatcccagcactttggtaggccgaggcaggcagatcattttgagctcaggagtttgagagcagcctgagcaacatggcaaaaccccatctctactaaaaatataaaaattacccgggtgtggtggcgggcacctgtaatcccagctactcaggagactgaggctggagaattgcttgaacccaggaggtggaggttgcagtgagtagagattgcgccactgcactacagcctgggcgacagagcaagactctgtctcaaaaataaaataaagtgaaaattttttttttggcaagaatgtagaatttagaggtagaagatttagagcttggaaacaaagctgtatacctatatgtaaacacataggaaaaggtctgaaggaattttcacatgattacttaactctaggtagggattaagattgggatgggctgagggaggaagagtgaaagggaattacgtatttttttaactttactgaggaattactagaaatttttggtacatattacacgcataaacacagcaacacaaagatttgttttgagctttggctgccagttattagtggtttaaccccagagatgaattaaatatttatgttgttgttgttgtcattttcatcatgagagctggctgggtcttagaatcatttggtacaatccccactttttatagataaagaaattctaagattcctgcttcaaggcacgtatctctgattgcctaaccattgtgcttacttcttgtgagaggaggtaggccctctgtgcagtctgtggatttcaaggatatggaatacagatgcgtggtctctttggaatgtccaagtcgaaagttaaagatgcattaactagtttagggaaaatctaagattttatgggaagataaataaaaaagtttatgctcaaataaatccatgtatggcatgattgaaagattatgtttttaaatgaagttatgtttcctaaagaggaaagcagaccttttctgtggtaaatatagccttgcatgtgttttcaagaatggtgctttggaaaccatttttttctacagaagttagtgggagagggcagatggaaacacagattcttcctacctagtgccaaaagcactgagaaaatgttgcaaggagctaataacaagtacaaaaatgttagaaatgtgttaaatatataggtctgatatgtgtaagcatagaccaaaaagactacctgacctgagtttctaatgttctgttttgaagttaaacatatgatcccttttccttagcattcaacaagccaatgagatttcatggatttgccttcagagctgtctttttttttttttttgagacggagtcttgctctgtcccccaggctggagtgcagcggcgccatctcggctcactgcaagctctgcctcccggtttcacatcattctcctgcctcagactcccgagtagctgggaccacaggtgcctgccaccacgcctggctaattttttgtatttttaatagagacagggtttcactgtgttagccaggatggtcttgatctcctgacctcgtgatccactcgcctcagcctcccaaagtgctgggattacaggcgtgagccaccacacctggctgggtggttgcagttttaaatagcattccagggaaggtctgactgagaaggtgacagttgaacaaagacgtaaagagcatgaccaacacaccatactgacatgtctgtattccaagaaaacggaagggaaaggcactgagcctgaaacatgtcttggatatttcgcattgagaaaagtcatgcttcagaatgttacaagtatttcattggcttatactttatagacatattttaaagaggtgcagaaaggacagtttttgtctcaccatagcagccaaggtgcatttgcccagtgccttccattgtctttccctgtgggagtaacttttaggtccagtgatgaggagcctgtgatgtctgtgttctggtttgttgataacattaccatacagggcttcacgggtgtccttcttagcatggattgcttccattcattggttgctggaaaatttgctttcaaatgtttttaacagtgactcttagggaaaaaaaatacattttattagatgtccattctccctaaatttacctgagttcaactgaattccaataggtttttttttagtgttaatttaaaaaaacaagctggccaggtgtgatggctcatgcctgtaatcccagcactttgggaggccaaggtgggcggatcacttaaggtcaggagtttgagaccagcctggccagtatggtgaaaccccatctctactaaaaatacaaaaattggctgggcgcagtggctcacgcctgttaacccaacactttgggaggccgaggcaggaggatcacgaggtcaggagatcgagaccatcctggctaacatggtgaaaccctgtctctactaaaaatacaaaaaaaaggccgggtgcggtgcctcacacctgtaatcccagcactttgggaggctgaggcgggcggatcacgagatcaggagatggaggccattgggctaacatggtgaaatgctgtctctactaaaaatataaaaaattagccgggtgagatggcaggcacctgtagtcccagctactcgggaggctgaggcaggagaatggcgtgaatccaggaggcggagcttgcagtgagccgagattgcgccactgcactccagcctgggcgacagagcaagactccgtctcaaaaaaaaaaaaaaaaaaaattagctggatgtggtggcacgtgcctgtagtcccagctactcaggaggctgaggcaggagaattgcttgaacctgggaggtggaggttgcagtgagccgagattgtgccactgcactccagcctgggcaacaagagtgaaactccatctcaaaaaaataaaaataaataaataaataaataataaaaatacaaaaattagccaggtgtggtggcacacacctgtaatcccagctacttgggaggctgaggcaggagaatcatttgaacctgggaggcagaggttgcagtgagccgagattatggcactacactccagcctgggtgacagagcaagtctctgtcttaataaatacataaataaaaatgataagctgatttaaaaatgcatatgaaattgtagtgggtggaatagtcatactagtggaaaagaggaagcaaatgggagaagttgctattaggtaacaaaacttatagagctttagtaattaagggagtgtggtattagcacaagaaaagatacatagatcactggaacagattagagaagtcagaagaccaacatgtatatggatacttgagtaattgcaaaggtgatacgacaaagtctttttcagtaaatgatgtgggacagctggatatgaatgggaagaaaaatgaaactggatccctacctcacttcatatggtggttattttgagcactttaaagtattaatgccactgtctcttgactgctgagattctgctggcagtgtaattatttcctttaccgggaatttgccttgtctgtttctgctttagatcttctctaatgatagagtccctggctttaggcttcttccttcaactccagtggatattccctactttgttttgtcctatggagttaagaaaattattccagaaaagcagatatctttgtttaacttccagatcattaaaaagttgtgttagtattcaaacattaaacagatgttctttgttagtaaaaggaggaaaatagtgtaaccattcttaataattgaatgaattcatatttggtcttaaatatttcaaaatatttcagatcaattctttggtatgctagtggtttctactgaaggttaagctttgacctactaaaagcagctcataaagaaagctttgtcagacttcagttcccatgaacctgctcacaaagaacactttttcccaatgtagttttgtcttgtgtatgaaaggaaaactgcctgccaaggaggctaagaaggttagctgaatgctattgtaatggtgagatgtttgtccagaaaaccattcctgacacctttcaaatcaaaagccttttttttttccttaaactttttgattgctggatttctgtttgaggaagttatgttgctacaatgagggtagcaataaatgcctcctgggaagttggaaataaaggcaaaggagagttaaacacaatagatgagatcagaaatgggcaaagttatcttaaagagacagaatggctccctggctagaataagactgaattgtccctagatcaaaaaaagaagagaatgtgtgtggcagaaggaagaaagtggactctacactgtgttagttaggaaaaccagaaattgggccaaattgcctgtttagtgggagagatagcttttgagagctgtgatcccgctggtgtggctggctctgggcagatatttgtatctgaaatgactcatgctgtgggacccttcctgagatctaacacttacagtggtttgatcagaaattgcaccatgcttgccaagcaacttttggactaaaagttgctgcccacgtatatcaggggaagaatatatatatatatatatatagtacctatcttagcatctgatttgtatgaccattacttcaatgtaaaataataaattggctttccagcttaaacttcaatttcttgtatattatatgatcatgagacaacctccctgggctgatcaacagcaggacgctaaaaagattgagtatctgagtcaggaaggtagagggccagaccctacatgtagctaattcaccattgtgaatctgcatgttaggtaaaactatggatttgttttttgtcttttgagacagattctcaccctgttgcccaggctggagtgcagtggcatgatctcagctcactgcaacctttgcctctgggttcaagagattctcttgcctcagcctcccaaatagctgggattacaggtgtgcaccaccacgcccaaccaattttttgtatttttaatagagacgggagtttcaccatgttggcgaggctggtctcgaactcctgacctcaagtgatccgcccacctcggcctcccaaagtgctgggattacaggcatgagccactgtgccaggcctaaaactatggtttttaaagatatacacgcatgtggtaaagctatgaatcaaagcaagagaatatttcatctcaatgttaggagagtggttttggtggggtggggtatgtagtcaggcagaggcacacaagagcttcaaaggtgctgttaatggtccctttcccaagctagatggggattccatgggtgctcattttttagtaactctaatttaagctgtacatgttatatatagtcatggatatataatcattattttaaaaatgaaggcaaggaggataccataaaatgaggtacttcatatttaaccagctggcatcctaagcacctttcctgccctcccctctctgcacctggcagagttgatcacatcctccccattacccactatacatgggtgtcagtgccaatagtgctttgctcttgtattattgatgagtcttgctccttttcctaaattgtgaggcctcctgaaggcagcacccttgtcttatgaaaaagttgagcttctgaggatatgtctttggtgaattttggaaaacgtttagcctttatctctgaagataccacttttcattaccctctcttttcatttcctgctgaaacccctttttttgtttgttttttgttttgttttgttttgttttagacagagtttcactcttgttgcccaggctggagtgcaatggtgtgatcttggctcaccgcaacctctgcctcccacattcaagtgattctcctgcctcagcctcccaagtagcagggattacaggtgctcgccaccacacccagctgattttttttgtatttttagtagagacggggtttcactgtgttggccaggctggtcatgaactcctggacctcaggtgattcacctgcctcagcctcccaaagtgctgggattacaggcgtgagccactgcgcctggctgagaacccacttatgtgtagcttggacctttatgttctctcttctatgtctctaaacttctctttcatgttttgaatcttttcatctctttgttgcatggtaggtaatttcctcagatctgtcatctagttcaatacttttttttccagctgtgactaatttgctgttcattccacccagtgacattttaaattctcttggattttttcatttctatttccaatagtagttgttctttgcttacatttcagtttcctgttttatttttaaaacattttaatcatttttcttttatgttctgtgttcttcaatctaagtgaaatacttggggttgttcagtgctgttatggcttgttttacttgactcattcatgggcctgcttccctatcgtaatttctaattacgagcaatgtggctgatcctaatgtatgagaaccctgggggacctggatcgggactgctccacagatggggtttatgtttaccaatgccaggcaccttggagtgctaccaacatagaagcacttcagattaaccgtctgcatagagctttgcttggaaagagaataaattcaaactctgatgctgaatggggcaggcttatgatgacacattcttcggaaagattcttttttattcgttccaatcaatgcttgagataagacagatttccttgccagctccatttgccagcaaatcaatttttccctagcttactccttcacttagggttaggtccttgggattctggcttggcagagaatatcagctccagctccccatcatctactccgctctgaaaaccaaggctccagaggtgtgccagatagttacagggtagcctgtagcttcagggctagcttctgttttagtttgggggcattcttcttggttttggggtcctgtggattttccatactttcttgaaaattcagctgtgcatttgaaaggctttgttatatattgcactcagcattgccaggtgtttggagaggggtgttttgggatagctaggctattgtattgtgcaaaattaaagcctcatattctatttctatatgaactgtagttaagtgttaataatctgatgtctgggatgttttgattcttacatcaataactatgacatttattaataatcatattaaataacattaactcaagctcattggttacattacaaaggacactgatacattacaaagcacacatacaagcactgcacaccagtattgaggcttccagccccctctacatgatcatttatttatttatttatttttgagacggagtctcactctgttgcccagactggagtgcagtggcatgatcttggctcactgcaacctccgcctcccaggctcaagcgattctcctgcctcagcctcccaagtagctgagattacaggtgcgcaccactaccacctggctaatttttgtacttttagtagagatggggtttctccatgtgggccaggctggtatcgaactcctgacttcaaatgatccacccgcctcggcctcccaaagtgctgggattataggcatgagccaccgcgcctggtcatgatcatttttattttggaaccattcattcagaaaaatttcacagccattttgaacttgtgctatgacatggcaaaatctctagtaaatcattttaattcctgatgagttcatttttataatgataaatttctaaggaaaatattttgttttcaacttcttgccaccatgtcaagactgtacattttaaaacatattacatcacattttcccttcaaagcaatgccagtgaattctgttaatggtatcattcatctcatgttacccaactccagatcataaagtttccctcattctccttcctttccacaaacctaccaaatcctctatcgccaagtcctttgggttaattcacggagaaagtatcgagcacagaggcagaacagggcctctggagagtgtcacatttgtgtgtgaatcctgactcttgattttcactagctttgtaaccttagacaaattactaccaggcacggtggctcacacctgtaatcccagcactttgggaggctgaggcaggatcactggagtccaggagtttgagaccagcctaggcaacatagcaagatcctgtctctacaaaaaataaaaaattagctgggtgtggtggcacacacttgtattcccagctacttgtaggggctgaggtgggaggatcacttgagcctgagaggtcaaggctgcagtgagccatgatcgggccactgcactcagcctgggtgacagagcgagaccctgtctcaaaacaaaccaaaaaacaaattagttaacctgtctggagctcagtcccatatttgtaaaatgtggctaactacagcaccttcccttatagaaagctgtttgaggatccagttatgcatttaaagggcttaacacattacctggcacaggaaaacaaagacaagctgctgtcctgttttctttgttgctgccatccttctcacaaggtctcgacggagtctgtcttcatcacgatttcactgccctcatgcctgttctgtttaccccttttctagactgggcccttacttaccttagcctgagctattgtgaaacactcccagcggcttcctgacttgccccactccctccttccgccgtcctgtcctgctcctaatcgtgtttgtcagaaatgcctctgactgatacactggcaaaatcagaaatcttcaagggatccccctttttcttgctgtagcttaagatctaaatctcttaacctagatcacgatctgacactagatatatttatagtccatgaaaataccctgaaagctttcaagtaccagatgaaagtgagctccttcattaccacctcaactcactgtaggcggcttttcatgtgcaacagctaagctttaagagggctgggactgtgacctactttattttgtattgttatagcagctcacttggtacccagagcaaggaggtatatttgtttcttgcatatttggcaggttgattactatataaattactctattgaagattaaaatggtttactgaagatgtcgccatatatcttagcaaggtcaaaacagttgtgtaatttttctgaatgaatactttcaaaataaaaaagaccactcagaccagaagcctgaacatctgtgagcaatgcttatacatgtgctttttaataaaccaacatgttgggccgggcacggtggctcacgcctgtaatcccaacactttggaaggttgaggcaggtggatcacaaggtcaggagtttgagaccagcctgaccaacatggtgaaaccccgtctctactaaaaatacaaaaattagctgggcatggtggcgtctgcctgtaatcccatcgactcaggaggctgaggcaggagaattgcttgaacccgggaggcagaggttgcagtgagccgagatcacaccgtggcactccggcctgggcgacagagcgagactctgtctccaaaaaactaaactaaactaaactaaaataaaccaacatattaaactttaataggattattgatctgaaaaccaaaacatggtaggaattagtttataagtcatatttagacgcatcatcttataaccctctcagcaaaacctgtggggcaggtagattatggataacaagtgttcacttcatgaattgtccctgttgatcaggtgaagtagaacttggatctggggcagctcttgtgactccagattcttggtttttgagcaggtgttgggggaaatacctttcttgttgaagttctttagtactcttttttttttttttttgagatggagtcttgctctgttgcccaggctggagtgcagtggcgcgatctcagctcattgcaacctctgcctcatgggttcaagctgctctcctgcctcagcctcccgaacagctgggattacaggcacacaccaccacgccaggctagtttttgtatttttagtagagacggagtttcgccgtgttggccaggctggtcttgaactcctgacctcaggtgatctgcccaccttggcctcccaaaatgctgggattacaggcataagccactgcacccggcccatcttttaataagagctcagcatattcatacttgattgatcagcattttcgtcattagaaatgaggtggggtttttttgtttttgtttttttgtgttttcatttcaaagattaaaaacctagagaggaaggagagtatttggggaaaatggtggaagagggagcaccagtcatctgtctccacacctagacatcaattgtactggcaggatctgtctgatctaactattttggaactcggaagtctactgaggtttacacattcttgctgggatggcaaactgtggttaattttggtcagtttcaactcttagcacagtagcagctatgcactccccaaccccagttctgtggaaggcggctacgcgggtgttcctagagcttgcacacagcgtgggagccagaataggcaaaaagcatcttgtcctctaaatatttggggtctgtgctctgactgctgattgctgcttctgatcgtagaggtgcagacaaagagatgggtggccattgtcgttacacctcctcattattgcaagttcttccccctccaattaacaagacttccaggggatttaaagagctaatggtcctgctcccttgcttcacttttattttttcccatttgggagccagatgttagagaatatgacattgaaaagcaactgcatataagggggagaattaagaagtgactgtgcatgcctaggaaaaggtataggcacagtaaagacctgagaagaccctgagtttatacccaagactgatctttggcacagacggcctacagtaaacaaaaagaatcacacacacatccacacacagaataacaaaacccagtaaacttgaaaaggggaggatctgattttctgaattaccacagtattagattcaaatgttcagttttcaacaaaacaaatcacgaggcacacaaagaaacaggaaagtatgctcttccaaggaaaaaaaaaacaactgaaactgtgagaccacatagtagacctactagaaaaagattttaaaacaactgtcttaaagatatgcaaacaactaaagaagatgtggcgctgggggcggtagctcatgcctgtaaacccagcacttggggaggccaaggcaggtggatcacttgaggtcaggagtttgagaccagcctggccaacatggggataccctgtctctactaaaaatacaaaaactagctgggtgtggtggtgtgcactggtaatctcagctacttgggaggctgaggcaagagaatcgcttgaacctgggaggcagaggttgcagtgagccgagattgtgccattgcactccagcctgggtaacagagtgagactccttctctaaataaataaataaataagatgtggaaaaaggtaaaacagcgtatgaaggctgggtgtggtggcttacgcctgtaatcccagcattttgagaggcagatcagttgagtccaggagttcaagaccagcctggccaacatgttgaaacccgggtcatcgctagtaaataagacaaaaattagctgggcgtggtggcacaagcatgtagtctcagctactcaggaggctgaggcaggagaatcacttgtacccgggagatggaggttgcactgagccaagatcgtgccactgcactccagcctgggcaacagagacagattctgtctcaaaaaaaaaaaaaaaaaaagaaaaaagaaagaaaagaaaaaggaaaacagtgtacaaataaaatgtaaatataaataaagagatagaaaccctaaaaagaaactgaaaataattctggaactgaaaaatacaataactgaaatgagaaattcactggagggattcaaaggcagatttgagtaggcagatgaaagaatcagtgaatttgaagataagatattaaaattatcaagtctgacaaacagaaaaatgtttgaagaaacatgagcagagcctaagggtcatcatcaaagagactaacatgttttctgggagttatagaaagaaatgaaagggggagagagattatttgaagaaatagtatctggaagcttcccagatttgacgagagacatggatataaacatctaggaagttaaacgacctccaagtaagatgaactcaaggacacccacaccaagacacattacaatcaaactcccaaaagcgaaaaccaaagaacctttgggctggattcagtggctcacacctgtaatcccagcactttgggaggacaaggcaggaggatcacttgagttcaagctcagcctgggcaatatagtaagacctcatctctactaaaaatcaaaaaaattagccgggcgaggtggcatttgcctgtagtctcaggtcctcgggaggctaaggtgggaaaattgcttgagcctggaaggtcgaggctgcagtgagctatgattgaggcactgcactccagcctggcctaccgaatgagaccctgtctcaaaaaaggattcaacctgaggaagctgactaaaaaaacaaacttcagagaggagagaaatgcctcctcatatacaagggacccccaataagattataagcagatttctcatcaaaaactttggaggggtcaggtgcagtggctcacatccataatcccagcactttgggaggctgaggcaggtggatctcttgaggccaggagtttgagaccagcctggccaacatggcgaaactctgtctctaaaaatacaaaaattagccagggatggtggcgtatgtgcctgtaatcccagccatctgggtgcctgaggcacaagaatcgcttgaatctgggaggcagaggttgcagtgagctgagatcaggacactgcactccagcctggatgacagagtgagaatctgtctcaaaaaacaaaacaaaacaaaaaaacaaagtttggaggcaagaatacagtgggctgatatattcagagtgttaaaaagaaagaagacctgtcaactaaccatctaatacccagcaaaactgtccttcagaaatgaaaaagaaattaagatattcccaggtgaacaaaaatggagggagttcattagccacaagacctgccccgcaagaaatactcaagtgagtcctgcagagggaaattaaaggatattaaacagttactcaaagccatataaagaaatgaagatcttggccgggcacggtggctcatgcctgtaatcccatcactttgggaggccgaggtgggtggatcatgaggtcaagagatggagaccatcttggccaacatggtgaaaccccatctctactaaaaatacaagaattacctaagtgtggtggcttgtgcctgtagtccccagctactcaaggaggctgaggcaggagaatcgcttgaacccaggaggtggaggttgtagcgaactgagatctggccactgcgctccagcctggtgacagagcaagactccgtctcaaaaaaagaaatgaagaaaaaaaaaaaagaaaaagaaatgaagatctcaaaagtgaaggatatgtgcaattttaaaagctaatattactgtaacaatggtttataattgcatttttgtgttctacatgatttaagagactaaaatgcttttttaaaattagtctaaaagctagtagtattgtaatgttggtttgtgaatccacattttcttttcttttcttttttttttttttttagatggtgtcttgctctgtcacccaggctggagtacagtggtgtgatatgggctcactgcaacatctgcctcccgggttcaagtgattcttgtgcctcagcctcccaagtagctgggattacaggtgtgtgccaccacacccagctaatttttgtatttttagtagagacggggtttctccatgttggccgggctggtgttaaactccgacctcagttgatctgcccgccttggcctcccaaagtgctgggattataggcgtgagccaccgtgcccagcccacattttgttttctacataatttaaaataatttttttggtaaaataatttctaaagcatttaaaataattatttactttatggtttggggcacacagtttataaaggtataattttgtgatatcagtaagcaaaaaggttgaggacccagctgtaatggagtggagcttttctgtgttactgaaattaagctgatagaaatttaaattagtgttataactttaggatgttaaatgtaatcctcatggtaatgacagagaaaatcactgtagaatatacacaaaaggacatgagaaaggaatttaaatattttaatgtacccccaaaaatcaactaaacacaggagtagacagtaatgcaggaaactagggacaaaaaccttaaggcatatacaaaacaaaatgacaagccaggcgcggtggctcacgcctataaccccagcactttgggaggccgaggcgggtggatcacgaggtcaggagttcaagactagcctggccaagatggtgtaaccccgtctctactaaaaaaacagaaaaattagccaggcatggtggcggggacctgtaatcccagccacccgggaggctgaagcagagaattggttgaacccaggagacagaggttgcagtgagccaaggtcacaccattgcactccagcctgggcaacagagtgagactcgtcgcaaaaaaaaaggaacaaaatgatagaaataagtccctgtttattggttaattaccttaaatgtaaatggattaaactctccaatcaaaagacaaagattgtcaaaatggtttttaaaaccaatctgggctggacgcagtggctcacacctgtaatcccagcactttgggaggccaaggtgggtggatcacctgaggtcaggagttcgagaccagcctgggtaacatggtgaaacccaaactctactaaaaatacaaacattagctgggtgtagtggtgcatgcctgtaatcccagctacccaggaggctgaggcaggagaaatgcttgaacctgggtgacagaggttgtagtgagctgagattgcaccattgcactccagcctgggcaacaagagcaaaactccatctcaaaaaaaaaaaaaaaaacaaaaaacaatcctactatatgctatatataagagactcacggccaggtgcagtggctcaagcctgtaatcccagcagtttgggaggccgaggccagcagatgacaaggtcaggagatcgagaccatcctggttaatatgatggaaccctgtctctactgaaaagtggaaccctgtctctattaaaaaatacaaaaaaattagccatgcttggtggtgggtgcctgtagtcccagctactcaggaggctgaggcaggagaatggcgtgaacccgggaggcagagcttgcagtgagccgagatcgcaccactgtactccagcctgtgcaaaagagcgagactccgtctcaaaaaaaaaaaaaaaaaaaaaaagagagactcactttaaatccaaatgttgctggtgaaaggatagaaaaagatattccatgcaaatagtaatgaaaagggatcggggtggctattctactatcagacaaaaagagttacagaattgcaggaagaaatagacagttctacaataaaagttggaagctttaatatcccactatcaataatggatagaaaaataaagaaactttacatgataaaccaactagatttaacagacatttatagaacactctacccaataacaatagcatacattttctcaaatgtagatgggatgttttccaggatagactatatgttaagccacaaattagtgtcaatagattttaaaagatatacaaagtatgttcttattgcaaccacaacaggataaagttagaaatcagtaacagaaggaaaattggagaatccacaaatttgtgcaattaaccatatactcttagtcaaccaaagggtaaataaagaaattacaagagaaatttaaaaatacttaaagatgattgacaatgaaaacacacataccaaaatttatgggacagtgaaaacagtgctaaaggagaaatttatagctttaaatatatacattaaaaaataagaaaaatctcaaatcaacaacctaaactttaccatttaaggaactagaaaaggaagaaaaactaaactcaaaactagcagaaggaaggaaataataagattagaacagaggtaaaggaaatagagactagaaaacaatagagaaaatcagtgaaaccaaaagttgaatttttgtaaaggtaaacagaattgacaaacctttagccagatggatcaagaagaaatgagagaagacacaaatgattaaaaccagaaacaaagtagacccttactattgattcaacagaaacaaaaaggattatgacaggatggtgatctgttgaataccaacagattggataacctagatgaaatggacaaacccctagaaacacaaaacctactgagactaaaccgtgaaaaaatagaatacctgagtagatctataattagtaagaggatagaatcaataatcaaatatctccttgtaaagaaaagccctagacacgaagccttcaccagtgaatttaaccaagcatttaaagaagaactaacactatttcttctcaaatttttccaaacagttgaagaggagggaatacttctgaattcactctatgaggccagaattatgctgatatcaaaactagaaaagataaccacaagaaaaatacacatcagtatccctcatgaacattgatgcaaaaatcttcaagaaaatactagcaagtaaattcagcagcatattaaaaggattatacaccatgaccaaagtgggatatatttctggaatgcaaggatggttcaacatatgaaagtcagttacctaatatgctgttttaacaaaatgagggacaaaatcacatggtcactccactggtccataaaaagcacttgacaaaattcaacacccttttatggtaaaaacactcaacaaactgggaatagaaactaccccaacataataaaagccatatatgaaaaacagtgaacaattatacttaatggtaaaaaacggaaagcttttcctctaagatcagaaacaaggcaaaatgcctgcttttgtcacttcagttcaacacagtgctggaaattttagccagagtcattagccaagaaaaagaaattaagaggcatcaaaattgggaaggaagaagtaaaagtatctctgtttgcagatgacatgatcttgtatgtagaaaccctaaagattccacaaaaaattgtttgaactaatacatgaaactgacatagtagcagcatacaaagtcaatgcacaaaaatcagttgcatttctaaacaccaacaatgaataatatgaaaaagaaattaagaggaaaattccacttaaaatggcattaaaaagaataaggaggtgaaagactcatacaatgaaacatgaaacattgctgaaagaaattaaagacataggtaaatagaaacacattgtatgttgagaaattggaagacttaacattgtgtgtttggtttttggagacagggtcttgctctgtcacctaggctggagtgcagtggcacaatcacagctcactgcagcctcaatctcctaggctcaagtgatcctcccacctcagactcccaagtagctaggactacaggcatgcacaactatgcccggctttttttttttttttaattttttgtagagatggggtctcactatgttgctcaggctggtcttgaactcctgggctcaagtgatcctcctgccttggcctcccaaaattgtgggattacaggcatgaatcaccccgactagcctgacttaatattgttaagctgtccataccacccaaagtaatttataagttaattcaatacaatttctatcaaactcccaaggccattttttggcttgggagttttagaatataaaaatttattctaaaattcatatgggatctcaggagaacctgaaaagccccaacaaacctgaaaaagaacaaagctggagatctcaaacttcctgaacttaaaacttaactgcaaaaatgcagtcattgaaacagtgtattggacttggctgtggtatgaagaaataagaaaaagaagagaacagcatgatacataaaaatagacatagagaccgatgaaatcaatagcccagaaataaaccctcttatatagtcaagtgaaatttttttttttttttgagacagactgtcactctgttgcccaggctgcagtgcaatggcgtgatctcggctcactgcaacctccacctcctaggttcaaatgatgctcctgcctcagcctcccgagtagctgggactacaggcgtgtggcaccacacctggctaatttgtgtatttttagtagagacaggatttcgtgttagccaggctggtctggaactcttgacctcaagtgattcgcctgcatcagcctcccaaagtgctgggattacaggtgtgagccaccgtacctggcccagtcaagtgatttttgataaggacgtgaagattgttccacagggaaaggacagtcttttcaacaaatggtataggggaaactggatattcacatgcaaaagaatgaagttggacccttacctaatactacattcaaaaattaactcaaaatggccggggcctggtggctcacacctgtaatcccagcacttgggaggcccaggcaggcggatcacttgaggccaggagtttgagactagcggggccaacatggggaaactctgtctctactaaaaatataaaaaattagccaggtgtggtgatgcatgcctgtagtcccagctactctggaggctgaggcatgagaatcacttgaacccgggaggtggaggttgcagtgagccaaggttgcaccattgcactccagcctgggcaacagagcgaggctccatctcaaaaagaaacaaacagacaaaaaactcaacaatgaaaaaacccaattcaaaaatgggcaaaggacttgaatagatgtttccccagagaaggtaaacaaatgaccaataagcatatgaaaaatgaccatcactaattattagggcatgcatgtcaaaactataccccacacccattaggatggctactgtcaaaaaaaagaaaaaaaggaaataacaagggttggtaaggatgtgagaaatgggaaccctggtgcattgttcacaggaatgagatgatgcagccaatactagaaaacagtatggtggttgctcaaaaaaattaaaaatagaattaccatatgataccaaaattcagtcctgagtacagtatgtacccaagataattgaaagcagtatctcaaagagatgtttgtacactcatattcataggagccttattcacagtagttaaaatggggaagcaatccatgtgcgtctatcaacggatgaatggataaacaaaatgtagtatgtacatacaagagaatatgagtaagccttaaaaaggaaggagttctgatatgtgctataacacggatgaaccttgaagatactgtgttaaggagataagccagtcagaaaaaaggcaaatactgtatggttccatttgtatgaggtatttagagtattcaaaatcacggtaaaaggaatctgaggagattaaaaaaaaaagagtagtcaaaatcataaagacggaaagtagaatggtagttgccaggggctggggggagggatgaatggggaattattgtttaatagagtttcagttttacaagattaaatattcgtggagatggataatggtgatgattgaagagcattatgaatgtattgaataccactgaaatgtatactttaaaaagggatactggtaattttacgttatgtgtattttaacattaaaaaattgggggatgagggctgggcatggtggcccacacctgtaatcccagcactttgggaggccaaggcgggcagatcacgaggtcaggagatcgagaccatcctgcctaacacggtgaaaccccgtctctactaaaaatacaaaaaaagcggggcgtggtggcgggcgcctgtggtcccagctactcagtaggctgaggcaggagaatcgcttgaacccaggaggtggaggttgcagtgagccaaggtggcgccactgcactccagcctggtgatagagtgagattccatctcaaaaaaaaattaaaattggggcatgagggcagggtgcagtggctcacatctgtaatcccagcactttgagaggcccaggcaggaagatcccttgtgcccaggagattgagaccagcctgggcaatatagtgagaccttgtctctacaaaaaaaaattaaaattacctgggtgtggggcacacgtctgtagtcccagctacttgggaggctgaggtgcgaggatcgcttgagcctgggaggttgaggctgcagtgaactgtgattgcaccactgccctcctacctaggtatatttgttttttggtttttttgttgttgttgtttcttgttttttgagacagagtcttgctctgtcgcccaggctggatgcaatggcacgatctcggctcactgcaacctccgcctcctgggttcaagtgattcttcctgcctcagcctcccaaatagctgggattacaggcatctgccaccacgcccagctaatttttgtgtttttagtagagacggggtttcgccatgttggccaggctggtctcgaactcctgacctcaggtgatctgcttgccttggcctcccaaagtgctgggattacaggcgtgatccaccacgcccagccctgtttttgtttttgttttttcaacagatgtaatttctgacttgtataccttttcaatcaagaatatgtatggactgcagcctgatgaagtttttcactcctttagtaatgtcctccttgttttacattttcaaagcctgcatagttacagattcatttgttttcaacgtttccccaggggaagacggaatctatcactgtggtgaagctgctgagctgctttgatgacctggtggcagcaggcacagcctctggcagggttgcagtttttcaacttgtatcttcattgccagggagaaataaacaggtgagtactcatgatcttaacacgtgttaacttcttggcacattcctcatggatttttaaaattagaaatcctcatctgcttagaaagtttatgctcagagaaagccgggcacgactttctctgcccaggctcatgcctgtaatcccagtactttggaaggccaaggcgggctgatcacgaggtcaagagatcaagaccatcctggccaacatggtgaaaccccatctctactaaaaatacaaaatttggccgggtgcagtggctcatgcctgtaatcccagcactttgggaggccgaggcaggcagatcacgaggtcaggagatcaagaccatcctgactaacacagtgaaactccatctctactaaaaaatacaaaaaattagccgggtgtggtggcgggtgcctgtagtcccagctactagggaggctgaggcaggagaatggcgtgaacccggaagacggagcttgcagtgagcggagatcacgccactgcactccagcctgggcgacagagggagactccatctaaaaaaagaaaaaaaatacaaaaattagctgggcgtggtggtgcgtgcctgtagtcccagctactcgggaggctgaggcaggagaatcacttgaacccgggaggcagaggtcacagtgagctgagattgtaccacgctactgcactccagcctgacggagcgagactctgtctcaaaaaaaaaaaaaatgctcagagaagcttaacactgtgctgtttataattggagaacatttttgtgctgggttggacacttggcataaagtacatgtgggtcatttcatttttgcttaatattctcaaggtatgctctctgtgggttttgaaggtgactagacagatggaactttgtgcagggttctgcttggaaaacgagattgggaaaaccagctcttccctaactaggagtgattgtataccttttccatgtagccccagctcacagcatttatcctttttttttcttgtgtatatttttatcccttgttcatagcttcggagatttgatgtcactggtattcacaaaaatagcattacagctctggcttggagccccaatggaatgaaattgttctctggagatgacaaaggcaaaattgtttattcttctctggatctagaccaggtaaaattattttcagaaatactgttggctcttaccttcttacatttggaaaaactatatttataacttgtatttttagtcaacttgtattcttgatcatcatccctttataatctcaattgttatttgtaacatttacttttatagacttatgttttataagcttccacttctatgactaaggagttggcctactggaacattcacttttttcattccactgttgtgtattacttttacttgaaaaagaagctattatcattcctacttccttgaaaggttagtaggagtgatgccaagcacttctgaatcctaactgtggacaagtcagtgatttcaatggatggaggactctgccagccacctggcctgtgtgagatgacctcatgtgacaggaagtggcagaggaggttaggtggcagtatggtgaagatgaagaaactggagtgccaagagatccaggaactagtccaggggtgcaggcttgcacctcacagagcttgctttcaaactgtgcttctgcttcgacgcccgtgccttttccactgcacgtatggcttgatgatctgctgggttttatttgttttgtcatgtgtctgcaaccaaactgaactccttggtggcacagtcctttctttttcttatttgtagccttcattcctagagcactataggaattcagcaattttttttttttttgagacagtctcgctcttgtcgcccaggctggagtgcagtggcccaatctcggcttgtgacaacctccatatcccgggttcaagcgattctgccacctcagcctcgcaagtagctgggattacagggacctgccatcatgcccgactaatttttgtatttttgtagagacggagttttaccatgttggtcaggctggtcttgaactcctgaccttagatgatctgcctgcctcggccttccaaagtgctgggattacaggcgtgagccaccacgcccagccaagaattcagcaattattagctgcatgactttcagtccctctgatccaagactgacctagtacaaatattctctagtagtagttctcaagctttgtagtcacaggatccctttacactcttagaaagaggaccccaaagcatttttgttcatatgggttatctctaccaagtacaccatgttagaagttacaactgagaaatttaaaaatatacatatttttttgagatggagtctcgctctgttgcccaggctggagtgcagtggcgcgatctcggctcactgcaacctccgcctcccgggttcaagggattctcatgcctcagcctcccgagtagctgggactacaggcacctgccaccacgtctgactacttttttgtattttttgtagagatagtgtttcaccgttttagccaggatggtttcaatctcctgaccctgtgattgaaatctcccacctcagcctcccaaagtgctgggattacaggcgtgagccactgcgcctggctgaaatttaaaaatattttactttgaaataataaatccataacatctgcacataagtgacatattttgtgaaaatatctctatagctctattttcaaaacaggtgagaagagtgagtggcattgatttatatttttacaaatttctttattatctggcttaatagaagatggctggattctccctaatctcaagtaatcagggacacaaacactgcggaaggccgcagggtcctctgcctaggaaaaccagagacctttgttcacttgtttatctgctgaccttccctccactattgtcccatgaccctgccaaatccccctctgtgagaaacacccaagaattatcaataaaaaaataaattaaaaaaaaaaataaaaaataaaaaataaaaaaataaaaacacacctcaccaagctcagccaccaacttaaaaaggactggacaatacttttaccactttcccttctcagaattcaggcctgtcctcggaatgctacagggtacagcccatttgagctcctgtatggatactcctttttgttaggccccagtctcattccggacactagaccaacttagactgtgccccccctcaaaaaaaaaaaacttgtcatccctactatcttctgtctagtcatattcctattcaccattctcaactaactcatacatgccctgctctggtttacactgccggtttacactgtttttccaagccatcgcagctgatatctcctggtgctatccccaaactgccactcttaactcttgaagtaaataaataatctttgctggcaggactgtgctgaatctccttaggcactctctaatcagatatcctgagtcgtcccaattcttagaccttttatacctgtttttctccttctgttattccatttagtttctcaattcatccaaaaccatatccaggccatcatcaatcattctatatgacaaatgtttcttctaacatccccacgatatcaccccttaccacaagacctcccttcagcttaatctctcccactctatgttcccacgccgcccctaatcctgcttgaagcagccctgagaaacatcgcccattctctctccataccaccccccaaaaatttttgccgccccaacatttcaacaccattttgttttatttttcttattaatataagaaggcaggaatgtcaggcctctgagcccaagccaagccatcacatcccctgtgacttccacgtacgtatacgcccagatggcctgaagtaactgaagaatcacaaaagaagtgaatatgccctgccccgccttaactgatgacattccaccacaaaagaagtgtaaatggcctgtccttgctttaagtgatgacattaccttgtgaaagtccttttcctggctcatcctggctcaaaaagcacccccactgagcaccttgcgacccctgcccctgtccaccagagaacaaccccctttgactgtaattttccattaccttcccaaatcctataaaacggccccacccctatctccctctgctgactctcttttcggactcagcctgcctgcacccaggtgaaataaacagccatgttgctcaaaaaaaaaaaaaaaaaaaaaaaaaaaaaaaagaagatggctggattctgcattcaatctgttgccatacattgttttgattgaagtgtataaagaaaaactggctttacacagacatgtagttggaaatgggaggagtattttgatagccttttcagatagttgtggacattctttaataatatcctcatatgactacctcataaagcaaatggtagttgctttaaaggttacggtgacaaatgacaaatggtagtttctttaaaggttagtaaaaatgtggaatctgaaaccacatggatgaatttttcctactctgttacattaaaatctactttacccatgttggattttgtaacattatgtattggtcacttagaaaatactattcacagagtgatgcagatcttccaaatgttgacactttttttttttttttttttttttttgagacatggtcttactcctctcacccaggctggtgcacagtggtgcaatcacggctcactgcagctttgacttcccaggttcaggtgattcccccaccttggcctcccgagtagctgggactatgggtgcacaccaccatgcccagctgatttttttgtatttttatagagacagggcttcgccatgttgcacaggctggtcttgaacatctgggctcaagcaatctgctcaccacagtcttccaaagttcttggattacaggtttgagccaccgtgccagctgataaattttctaatacaatatcaaaaaaataccttcattaacatcaacatcattgtaatcgggaaagtctagctataaggaatcatgtcaagttcacagggacagatacaagttttcagattgctaatctttgtgtgagagcaacaaataccattacttgttttccttgaagtgacaggcttttttttttttttgagaaaatgtctgctaaatacccaaatttgaataattacagcatttcaaataaaaatggtgttttgtgaaaaaagcagctggctcagctcatagctgcaacagttgcacaagtggtttccttgagagaaccactgagtgtatttcagtgtgcagcagaagggagaatacaaaagtacctatcctctggccaggtgtggtggctcacacccgtaatcccagcactttgggaggccaaggcaggatgatcacttgagcccaggaatttgagaccagtctgggcaacatggcaaaaccccatttctaccaaaaaacataaaaattagccaggtatggtgatgcacacctgtaatcccagctactctggaggctgaggttggaggatcagttgagccttggaggtggagattgcagtgagctgagattgcaccactacactccagcctaggccaagagccagaacctgtctcaaaaaaaaggtttgcaacattttcatgtaatggaaatttctttatcttgattttggtgttggttacatgactataaatttgtcaaaattcatagaattgtatacccaaaaagggacgaaatttactgtaagttttaccaacaaatctgatcactgccccctacttccctcacaaaatgtcagtgatgttacagcagtatttctgaaataattgatgaaacttttcatatatatattggatttcatatatatgaaatatacatatatttcatatatatataatgtatatatatatatattttttgagacagagtctcactgtgttgcccaggctggagtgcagtggtgcgatcttggctcactgcaacccttgcctctgggttcaagtgattctcctgccgcagcctcccaagtagctgggattacaggcatgtgccacctcgcccagctaaattttgtatttttagtagagacgaggtttcaccatgttggccaggctggtctcgatctcctgacctcaaacgatccacccacctcggcctaccaaaatatagggattacaagtgtgagccactgcacccggcctgatgacacttttctgtaaaagtaacttacagaatcagattttttatacaatgaaatatgctttgtgttagcagtcgtatgccttctagaattttattttgtgtttatatataaaatatggtttttttttcttttttaaagacagagtctcactctgctacctgggctagagtgcagtggtgtgatcacaactcactgtaacctgaactcctgggctcaaatgatccttctgtctcagcctcccaagtagcggggaccataggcacgtgccaacatgcctggctaataaaaaaaatttttttgtagagacatgatctcacaatgttgcccaggctggtcttgtaaagtatcattttatgttaatagcattttatatatttaatatcatttaatttcttctaaccttctgttttctattaccctttcagttggcaaggatataatgtcctcaaagctgctttgaaccctttgtgaggggagactataatatgaacttacagagctgattattgtcgcaataattttatagaatgttccattccattgttttataatagaataagcaatacacacagtgcaacagatttctgtttagatctttatggattcttctttgaactctctgcatgtttactgcatcatccctgagcctgctatggtgcacagtaaagaatgtatctactgaggacatgtttttaaaaattatgcagattttaaaatgtttcctgtcaaactggatgcagcatgagggagatgttagtatggactcttttcccatccgtcaaataatctcgctatggtgggttgagagtgaatctgcagagagtgaaagcatgcgttaagtaaggtgcaagctgacctaagcacagctagcgggaaggacactgacttgtcctaagggaggtccattctttagcctggcgctgatgtgaggtgtaaccagactttctctgccaggggctctgtaactcccagctggtgttggaggagccatcttccattgtgcagctggattatagccagaaagtgctgctggtctctactctgcaaagaagtctgctcttttacactgaagaaaagtctgtaaggcaaattggaacacaaccaaggaaaaggtaagtttcacaagtttgccagtttggcctaaatgctgggccttgttgtagaaggtgctttagggtttcttaggtctcctgtttgccggagacctcctgtttgcaaacccacagcgcctctaagcctggggttcctggtggggccctgtgcctgcttaggatttctcctcccagaggcagacaagaagagtgtgttcttcttgtcgcagagctgtaggagcctgcacacacagccactctgcctctcagggtgccacagtcagcgcagagaagcctcaggggtggcctggtctatctgttccttgtggagccacctcctccacacagccctggtgaggggtcagggttgtggggctcactcgttattcagcacgtgtttaccatgcacccctgtgcactgtggcaggctcagcagtgacatggtaaacacggcagatctgagccctccgttgtggaaatggaaacacagatagaacacttgttgaccactgtgtcagctgctgtggaccaaaatacacaggatgctgtgtgagtttagacacacttttgtccaggtgaagggtcagggaagacatcctgaaggcatgggttccaggttgagagatcattcctcctttgaccagtgatgtggaggaagggcatcgagaagtccaccagccataccagccgtgtgggaaaagacaactggaacacctggggaacctgtaattcatcatcccaccctagcctgtaaagcactcttgtaggactctgcagcgagtttgcgtggggatggggtgaggaggggtaggtagagcagtggagctgacccctcctatgccaaggaggaggtagactggggccaacgtgggggtgggaagcagagggcggcattagtacagatcatgcgttgatgagtctacagtcatggattgtcgattggccgatgggagctggaagagttcccgtcttgtgtctcccaggaaagggcactgtttgcctgcatagaatcaggggcagggcagctgatggtcacggcatgtggggagggcttgaggctggccctgtggagagtgacagcagggactgggaaacatggtgagattggcaggcgttgatgaggccctgcggctggtggtgccgttggggacaggccgtcctggagagtcgggtgaggcggagccagcccctgtggtcgtagtcactgcccgttattctgtgttctgggctttgcggcaacacacaagtttattctcttttctgcatggcagccctccggctgttaaaagacgctctcaaacctcccctttcttctattttcgatgctgaacaccttcttttttctttttctttttcttttttgtttgagacagagttttgctcttcttgcccaggctggagtgcagtggtgcgatcttggctcactgcaacatctgcctcctgggttcaagcgattctcctgcctcagcctcctgagtagctgagattacaggcatgtgccaccacacccggctaattttgtatttttagtagagacagggtttcaccatgttggtcaggctggtctcaaactcccgacctcaggtgatccgcctgccttggcctcccaaagtgctgggattacaggtgtgagccaccacatgcggcctgctgaacaccttcttaatcccatcaacaatctggcctttttatatctgcagtctccctttcggtccctggagaactcagtggaatttatggccctgcagatcttagttctgctgctctctctgccagtatcctactcctctggcattttatcctggttcgtctgtcaatgttttactgcactgtcttggaaggaaggcagagtgtaaagagaggcattgaaaaccaattactttacatgtgggtcctattcccaacaatctctcttaaaacctggcccttggccggacacagtggctcacgcctgtaatcccaacactttgggaggccaaggtgggcgggtcacttgaggtcaggagttcaagaacagcctggccaacatggtgaaacctcctctctactaaaaacacaaaagtttgccaggcagggtagcaggcgcctgtaatcccagctactcaggaggctgaggcaggagaatcgcttgaaccggggagacaaaggttgcagtgagctgagactgcaccaccgcactccagcctgggtgacagagcgagacttcatctcaaaaaaatcgaaaacaaaaaaacaaaaaacaaacctggccctttaacctcttgtgtggagacccaggcagtttctgtaaacctctcctagtgcgtctgtgcagtcaagtctttagggaacattgattgaaagcgtgctctgctccccaggaacgttttaggatgcagaaacaaataaatgtgtccccttctcagaaggagagagattttactgagccttggggaaatgagggctaacagaataagaggaaatgtttttaacatctgtgtcttaaagacttgctttctgctgtagactattgtgtgcgtctatccctggaagcagtgcttccctcacaactgtttagtgagcggagctaggcatgtacacgtggaggcgtgacagcaagtacggaggcatccaaggagacaaggcctctgccctcaaacacaatgagagagactgtcggtcagcaggaggagagtagaggctgtcagtgctgtaaaggagcgggctaggtgaagcattagggagtgctaggcatggggcaggaagttgcatttggataggatggtcaggaaaggcctctacaagggcagtgatctttgagctgaagcctgggaagagctgctggaagagcattccaggctcagggaacagcatatgccaagacctcaattgggcaagagcttagatgttcaagaagccagaagtgactagggcactggctatggctggagtccaggggagccgtggggaggctgacacgggagtccaggggagccgtggggaggctgccatgggagtccaggggagctgcgaggaggctggcacgggagtccaggggagcctggcatgggagtccaggggagccgtggggaggctgccacgggagtccaggggagccgtggggaggctggcacgggagtccaggggagccacggggaggctgctgcaggagtccaggggagccgcagggaggcaggggagccgcagggaggctgccttgggagtccagggaaaccattgactgagatggagactggagactggggaaggctgggccagaggtcaggacatcaggacctctgctgtggacataaggggtttgacgggcctgtcaggtggctgcgtgggagtcgcagaagagagttctgtggaccggtctggagcccagggaagaagtcttgaccagaggggaaaatgaggtcaccagatacaggtgacactgacaccctgacattggatgaatccacgcagggaatgtctgttcattcagcgctggagctttgcgccaagcctctgccctgctccagtactcctcatcgggggatatctgtgaacaaggcagaacagatctctaatctcagggagctgtgtgcagagtagtgaacagataaacatgtcagagggtgcagagccagagagggaggagcaggagacacaggtgtctctttaataggatgacagggaaggctcctctgaggaggtagcatgggctgattcctgaaacaaagaggcaactagtgcgagaagaccttagagagaggctctggaggcagagggccctgcgcaccgaggatctgagcagccaggctggctgtgtggagcacggtgtggggagccccctcccgtcggctttgtgggccctgcccatggggctctttcagtccagtgctgtggtcagtcacagagggctgtggccaagccagggaggtcactctggctgctgcttggaatatgctggagggggcaggtgtggcagctcagcagggccagcaaggattctgggtgatccgggtaggagaagacaggatggggcggggttggtggtcggactgcttccaaggcagagctggcagatttgctgccacgttggttctgaggtgtgagagggatgagttggagatgattcctaggtctgtggtctatgcagctgggtgagtggacatgctgtggattgacgcagagaatcctggaggcacggggagaaggaggagatggaacagcctgctgtggccccgccatgtcctctccctgcagtggagagctggcgtgggaggcgggtggcgggtgtacctctcggggagctgtgcgctggcagccactggcatgcagacaggagctcgcctagggagatttgggcaggcttgtgttctgaagaggaaagggcatcaggagagaacaggagttggggggtcagaggagtcggaggccatatggagggacatagcagctgctgcgagaccgggggctgaggcagcttcgacgggcctgagtctgtagcatggaggctgtgcacagccctcctcatcagcagggccaagggattggaagggctgaaagaggagttgacggcgagtatggagagcttttaggaggagtgtttttgtagaagagaacaaagaaagacaaataggtggtgcccaggggggaaccatgtggcctggtgggagttttgggagaggggccgtgtggcagcacattggtgtgtgacgcgggtgcctgtggagggaacacagtgctggtggggacagagtgcaggcggtggcctcagttgggccctctcatgggcagcagtgtagggttgaccagaaaccgggacagagactctcttccagagaaagggcagggcactgagcacagggcaggtgcaggcaggtcaggaggcccagaggtagaagacgaggggtcctcttcccgtcgagtccgtgaacctcttcagaccggatgatgtgtgttacatccagaaaacctcagaggccctagccatctgcaaccgtgggtttgctgtcctgtgtatttatgttgcattgtttcatgtgtcagagccctctgcagacctgttactgtgtcccctgtgagtctagtactcagggaagccctccctggcagtagcactttgccctggggaaggagaaggagacgcagcaatctgtaggtgtggcgcccgcatgtgggtaagagccagcagccggttctggaaccccgcgactagcacatctgtttggatggccagtgggtgttagctgttgagatctctggcagggcttctgtggatccttcttctcactcagcttagactttcaggctcccattttgggtgctgtcagctttcagcgtatcagctctgtggcaccatacattatgcacaaaatcataaaacaccattttatagctagaatttgttagccagaacacactccttacatatcaacgtggtctataaagggaattaaaatttttttaggtaatcaatgaggtttttggaaatcatctctaccgaaattaagaaattatattaatttgtttatgattttagaatcctgcaatacttagaccttaaaagttggagcttcagtgtcaaattcagaaagcaccagcaagtactgcagaatcgcactgcaagtggatggtggctgagtcgggggcttaggacaatttgtacctggctctagctggttcttcacaacttcactgcctttgaccaacccactcatcagacatttccgttctttttattttttagagacagggtcttgctgtgtcaccaaggctggggtgcagtggtgtgatcacagctcactgcagccttgaacagctgggttcaggcgatcctcctccctcagcctcccgagtaactaggactacaggcacgcaccaccatgcctggctaaattttttaatttgtagagatggtgtctctctaggtcacccaggctgttgtcaaactcctgggctcaagcagtcctccctccttggcctccaaaagtgctgggattacaggtgtgagccaccatgcccagctattcagcagttttagaggcagccactcccaggaccttgctcagcagggctcctttcccttcctccagggtaagagtccacctggtgttcaggacctcgccttctcatgcccactcagatgcaccaccttgatctgagctctttgagcagctctttgagcctcagatggcgcttccagatgctgatgtgattgttcacacaggtcagcacagtgttatgagacaggctgaggacctcatcttatttattttttattttacccagagcatcaaacacgatgtcttacagaatgtaggaatcactaaatgtttgttaacatgagtgctttagttacataagatgaaccagtcaaaatggaaatgacaagagatttttcagaggtcctacaaatagaaggaaaacatttaaaaattggatcgccaagagaaattgattgacaggaaaggcagaggaagagattatgggctcccttgctggaattcctctggttcgctctatttagaggacatctccagaacaaacccaccaaaggcagtaatcagatacgatgctgttgatagagttgtccataaaagatccacgatgtcaaaacacccttggttcgtcctaacgatcattgtttcaaagctgaatttgatatataatatcctccttggaccctatccaaagggatttagttactgaggtgccagagggacctagtgagattctggtgtgcgaagaaaccccgcaaataactatctgtttgcctatgtgggtgggccctgggggtggcctctagggttgggtgtgctgctgtgtgcagggagtgtgggaacaggcacagcacaagttggccgaggtctggtggggaagcagtggcacggaggcagctctcaactgtgacctgcctgtagcctcgttcaggacaattgagcacttatggggacttagtgtcacaagcattgcttttgtgctgcatgtaagtaatctcattaattcctcacttcagcctttgagatgggagttactctgcctggtttacagaatgggaaacgggtccagaaaagttcaataattgcacgtaccacatacccactaggtgtcagggctggacatcgagcccagggctagctctaaaaccagtgctgtttctgcttttcacaatctgagaagtatttgggagaaggaatcagccaggcatagggctgaactgaaatgcttacatgtgaactctgttagcatcctgagaaataacgagaactcagattgccagtgggagtgtagattgtataatcacgtttaaaaagcttgaagttgtcttctaaacttgaatatgctctcagcaacccagcgattaccccacagcccaccaactgcatcctgagtgtccgtgacagactctgacacctgtgggctaaggggtatgcacagaaatgctcatagcacaattgctcaaaatagctttaaaaaataataattgaaatatccatcaacaagaaaatgaataaatgaattgtggaatacattaagtcctcgtttaatgtcattgataggttcttggaaactgcgacattagcaaaacaacgtataacaaaaccagtgtttttccctcaccaatgttgttgaaggagatggtgttatctgaggacctgctctatgtcatttcgcttacagttgtagtttctaagaacctgtggacgctgagtaggacgtactgtaccattcagcagtagaaatgaattagtgcgacagcttctttttatcaagaaggataaatctgagaaacatagtgttaagtgagaaaaagcaaaagagtacaattagcatcatacattttaataaaaatgaaagataaacaatactaaattatattgtctttagagatacatagatatgtgattaaaccaacaaaaaagtgaggaaatgataaaggcaaaatgcagtccagtggttccatctggggcacaagggggcaggaagtgttaggagcacaggagaacattggttgggtgactgatgatttctttcctaagtttggggatgggttcccaggtgtacctttccttgctaggcttcataactgcatggatatatgtacatatacacagtggtgcactgcataacaacatttcagtcattgacggactgcatgtatgacagtggtcgcagaagattataatggagctgaaaaaattcctatcagctggtgtcttagcgccacacattacgtgttctgtttttagatagacaaacagtcatcattatgttacaggtgcctacagtgttaagtacagtcatatggagtacaggtttgcagtccaggggcaataggctagactaagcttgtccaacccacggcccaacacaaatttgtaaactttcttaaaatgagattttttggccaggcgcagtggctcatgcctgtaatcccagcactttgggaagccaaggcaggtggatcacttgaggtcaggagttcgagaccagcctggccaacatggtaaaaccccatctctactaaaaatacacagttagctgggcatggcggtgcacacctataatcccagctacatgggaggctgaggcaggagaatcacttgaacccaagagggagaggttccattgcattgagcccagattgcgccattgcactgcatcctggacaacaagagcaaaactctgtctcaaaaaaaaaaaaagaggttttttttgtgactattattattattattattatttttagctcatcagctattgttagtgtattttatgtgtggcccaagacaattcttcttcttccaatgtggcccagggaagccaaaagattggacagccctgggctagactatgtgggtgtgtcataggctgtgccatctaggtttgtgtaagtacgctctatgatgttcacacaacgaagacatcgcctaatgacatatttctcaaacatccctgtcactaagtgacctgtgactctatatatagcatattcttttgtttgtgtcagatatttcataatttcagaaagaaaaaatatcaagcttgggggcaggaagggacattggtgcctctgatgggtttagagaaattctgaaaaggcaacaatatagatgggttgctgtgaagctcattcattcaggatgtggactgagcacagcaatcagacgtcagaagcaacagaatcagagcagggaaaggatgagcagacctggattcttcaccttctgcctcagtttcctctcctccaaaacgggagttgtaatacagtcatgtgtcacctaacaactggaatatattctgagaaatgcattgttaggtgacatctttgttgtatgaacagcattgagtgtactgacaagcgtaggtggtaggtacagcctacttccacctgggctaaatggtacagcatattgctcctgggctacagacttgcaccacatgtgactgtactgaatactttaggcagctgtagcacaacggtaagtaattgtatgtctaaacatagaaaaggtaccataaaaatatggtattataatcttatgggaccactgttgtatttgcggtccatcattgactaaaatggtttgttgttgttgtttttgaagcagagtcttgctctgtcacccaggttggagtacagtagtggcactatctcagctcactgcaaactctgcctcccaggttcaagcgattctcctgcctcagcctcccgagtagctgggactacaggcatgcgccaccatgcctggctaatttttgtatttttagtagaggcatggtttcaccatgttggccaggctagtctcaaactcttgacctcagatgatctgccgtcttggcctcccaaagtgctgagattgcaggcatgatgcatccagcctgaatacaatgttatgtgatgcgtgactgtatctgccactcatggttgttgtaaggattagacacgagagtgggatcaagtgccaggcacagtgcaggctgtgtgagtactcagtgaatggttccctgtgtgctaatggggcacacacctgtgagggtgtggtcgggcctctgttggtacagggatgacagtgtggtttgacaaaaaacaaacagtagaaagggtgaaaaatcaattattgtcttagccaaaaaattcttgttgtacttaatattaagggttgacaactgcattactttaaatcagtccatgtctgttttttgttctttctttctttcttctaattttagtactgggaaatttggtgcttgttttataccaggactctgtaagcaaagtgatctaaccttgtatgcgtcacggcccgggctccggctatggaaggctgatgtccacgggactgttcaagccacgtttatcttaaaagatgcttttgccgggggagtcaagccttttgaactgcacccgcgtctggaatcccccaacagtggaagttgcagcttacctgagaggcacctggggcttgtttcatgtttctttcaagaaggctgggtgctgagttggaatgaatatagtatctatct

SEQ ID NO: 15851 - DNA, 58351 bp, Homo sapiens
ggagcggcggtgaaggtcctgggtgaggtagggttggatggtgcttgccgcgtatcatggctgcctccggaaaactcagcacttgccgtctccctccgttgcccacgattcgagaaatcattaagttgttaagactgcaagcagcgaagcagctatcacagaatttcctcctggacttgaggctgacaggtggatggcttagcagtgctccccggatgtctccccagtgtccgtgggggcgtgggccggggggtcttgcacgtccccgcgggcgggtgtccaggcactggcgtgcgacgggcttttggtcaggtccttcgacctctttgtatcagaactccggtcccaccgcccaggagacacgtgaagtgcgttgattgctcacaaaactccgcgttcgggggggtgtagcctgccggcaggctgcataaatgccaagctccctaggggaggaagggttcatgggtcgtgaaaggcgctagtgaatattggaatctgggtcactgtgaaatcaatcattctgaaatagtacagcacatgctgactgcagttgctttacatgcagtttaaagttaccagaatttaaattgatgcgaggattttatcaataacttggtgaaaagagtatccctcgtatgattcgttttttaaacgtttacctgttcagtctaagcctcgggggcgctaatattcattcataagtacatattacacaagcaacattgtgctagtgccgggggtaggatatgggcgtgaacaaggcggtgtttcctcgaggagcttacttttagcaagtttacattcccacacctaattgtttaaagttactttttatgagatataatttatgtgcaataaaattaataagtttgaagtgctcaatttgatgagttttgacgaatgtatttatatattggtttaaccaccatcaccattgcttagtgatgttctatgagatgaggttgcaaaaatatattacaaatacgtctactaagtcacggctggagtacttaggttttgagattttcatatttcattctatttagtcccacttcagaagttgaaaagagcagtaaatcacacccaaaaagttcattttcacttaaatgaagcacactccagaaaacataaaatgttttatttcttggacatgtagtctttattctgcctgtaccaatatgactttggataaaataatttaactcaagttttctcttttttttttttttctttttttaagatggagtttcactcttgttgcccaagctggagtgcaatggcatgatctcagctcactgcaacctccgcctccccggttcaagtgattctcgtgcctcagcctcccaggtagctaggattacaggcgtgagccaccgtgcctagctaattttgtgtttttagtaaagacagggtttcactatgttgctcaggctggtctcaaactcctgatctcaagtgatccactcgcctcggccttccaaagtgttgggattacaggtgtgagccaccatgtccagtagtttcctcatcttttaattggaagaagggcctactactttaaaagattgcccactctaaaattctttggttctagtaatagctagtaccagccttttctgcttgttattagccacattctaaatataaatcaccattctcagggcagaagttataggtctgtgtattttttaaaatccttcaaatacattttctcatgagcctttatcttcaggagtaagtttcaaattctagatattatccactctttctatgggaaccagagttaacggagatgagggtacttagctgaggttagaagctcaggcagaagagagcaagattgaaatccaagctcattgatttgatagcgcttctttaatattcatttgtatttcaatgtgcctgaaaagtttgagagcagagacctgcctactgttgtagctctccattttaaagaaggagagtattaaatttattccataatgtatcattcctgttccctctgagaggcattggctttaggatttatacctatgttgaagtccatgaccttgtacaaataaaacaatagacaaggaaactgaaaagttaagagaaatgaaattgggataggagtccttggttaacatgtaaggattaggtgagaatgtgtgtaaatccatcataatagataagatggtcagtggatgctaattccctccctgttaaaagactaaaccatttttggatggctgagaaactagtttccgcattttagctgacaaagttatgttgttgaaaacaagcaaaaataggactgtgaacacctacaagaagtgctggtatgtttttagtgactaaatttccactatcctaggaagaccagttccttggatttccatatctcagaatcactaagaccagcccattgcatgtttttccagatgtgatgactggttgcacagagtcagtactctacctttttatgatgtcttaagggctgctaacttgaatttgattaattaaaaaattaatttttctgtattaacatgcatgtgtgcaaagctttaaaaaccctcaactgctcaatttaactttttcctgaaaatgactaagaattcaaatttctgaaaatcttacgatctaagaacttattgccattgccatagtgaccaccaccaagatgtctctagataaaaataagacttcagcactttttgcttttggatttcactagcaatactgaagattctgaatgtgaaactagtattgcttattcagatattcaatgttcaataactatagaaaagtgctgcattcttatccagtctgttcttaggagtcggttggtttcaaatcagtttgaaaggaatttgcatgggacagatggaaactacaatattagctaaatttaagctaagaaactttgtcatgataatcctgtgtgtgttaagggactggtacagttcaatggtgatgtggtagcatattcgattgccacttcatgttaatttaggtagagagttaaatagtcaaataaatattatacataaaggatcaattgattgggtaatggctgaatttttatagaagatttttctctctaaatttcatacgttgaaatttgccaagttaattgagataactaaaactctttttcctctagataagattgtaaggaaagctggcaatctgacaaatgcttatgtttacgaagtgggccctgggccagggggaatcacaagatctattcttaatgccgacgtcgctgaacttctggtggttgaaaaggacactcgatttattcctggattacaggtgagatgcttaaagtgtctgctttaggaggcaaaagctgaatttaaatctttatgccatgatgcttaaaccccaaggtatccaaagattatgtaggtttttcctcaactatagatccccaaggccccattccagagattttgattccatagtctggagaaatctggaaatctccatttttaacaagcactctcagagggtctattgactacaccttgaaaaaaacctgctttaagcatttatgctaaacaaattaattgttttgtgtgatttttttttttaagtctgctaatagctatgcatgtcgtggcccattccttcaaaaataaataaaaataaataatggccagtaatgactcattggtatgacttttgagaacttcatttaggttcaaaaagcatttccacaaacaaaagatgagtaagacatatgcacgtttgtcatcatgagagactaattatgaagcttaagcattcttttataaggtaaattttttaagtgaaggaaggaagttgtacttttatagatttaggatgaggtttaaatgaaatgatacatgcatctttaaaatacaggcactgttattgtataagaaatgagagttgaaggaactgggcatgtttcaactggagaaaagaggccctgggtaagagtgtatatagcagcacatccaaggttgggggtacataggataagcttgttttgatcttttctaagaaagagctaaaacaaatagatggaaattgagggaggcaggattgaggatttgaaataaggaggaacttactttttttaaaacgctggcaaacagtgaaatagattgtatcagggatcttgtaaagggatttcctcataggggaacacttaatgtcttaaaggcctttgattcctccataattctaaaattttaaaagagtcctgaacctttggctcagatgagaagcaatttatcatgtgactataatagaataatgtagttatctacgttattacttccatacaaaaggacaaattgattttaaacgagtatattctcatactaacttgtatatatattaatggaaaaatgttaatttctgtcagaacggtttgagaagttgtttttgaaaacctagaactttgtgtgcatgtatctgatttttttaagaaacctagcagtttttccctaatcttgctttatctagtttttatgctttaaaaaattacataatatttccttttatctagttttaccagtctatactaacagaattggtttcagatactaaactttatgttgagatagtcacatggcacatattccttgatcaaatgtggaatttaatagtgatttttgttttgaactgtgttcttattttaagaattatatataagttggaggtggacgtgggaatattattatttttggtgagatcatgagattataaaaagaaactaaataactgtataatccccttcgggcttattcgtgtagccctttttggacatagggaatactcacctgacttttttgctcttaaaaagacttcttgtccctcatatctcaccattcgttgggtttattctttcttattaggccagggggtgaaccagatttccattcattcccacatattcccctctttgatatgaacaaaagatctttgaaggcagattgttgaaaagagcgactgccacccttctcttctcagtttcccccaaacccataagtcactgcgttcctaattccagccttgttttatctcattcgatttatcatcatctgacatactgtatatatgttcttcccatttgtttgttaattgactcacctgtctggaatgtaagtaccatgagggtagaaatgtgtgtctgttttgttccctgctgtacctctatctcacgtaacagtgcctagcacatagcaggtgttcagtaaatgtctcacatgagaaacaaaaaagttgaccactatttctgcatctgtgtatatatatacacaaatgtatatgtatctctcatattaattaaatgtatcattaaatagtgaaagtaaatatttgtgtagcattgataatgaaaaagttttatgctcttttttctaaatgtgaaggctgatttcaagttaaattactctagaggaaatgtatatttgacttctcatttgtttttagtagaaacaaaattaattcttagtatcttatatgcaggaaaggaatttgccttaaaaagaaatgttgggtactaaaatatcaaataggcctttttttccccagtgaggaatgtttcaatatgtaaaactactttgttttagaggtactaaattaatcataaaactgagtaaaagcagaaagaaggtgatctattttaaggataccattttagtgatttctaagctaatagaattactttttaaagaaattgtaataatttataaaataccttctagctgaaagcctgtcatttgtagcttaattcaattcctacagtattttcatgaggcagtttaggggaaagaaaaactggtgctaacatacaggattcatgctcagcatgttataaaggtaagaaaaacatgtctagtatgtttagtatagtatagttttgtggtaaagacgcagacttcagcatcagactgcctgggtttaacttcagattctactactagttgggtgactttgggtaggtaattttgtcctctgtgcctcagtttgctcttaggactcatatgaggattcagtgtatgcctgatacttagaaagcactgaataatatcttagttataagtaatcagttaaattattatccccatgccttgattacctctggtgattaatgactgatcaggagactgctgatctggaaagaggtataggaggaagtcgtgttattccattggagcactagaaaattctccagtgctatggaaacattggggtgttttccaactcatcaaacttgcattggacacctagggtttcttttcttgatgttgtcacattctgattgtgcatttctaggtttttaagtttttcgttgtttcttgttacatttttatgactgactggattctctgtgctgtggagaggagtgaggagatttcctgaatctcaaggagcttgaggccttgataggtttttcctctttctgaactggaaataacttagatttcctgacatctcagggaatttgaagctttgataggttcttctccatttgtgaactggagataaattcgtaaatcactcgtaccctttcagagaagtagtacagatttcctctcattttttttttttttctgtttattttagagcaaacctgtgcaacacacggcccacgggctgcctgcggcccaacacaaattcttaaactttcttaaaacattatgaaatttgttttgcattttttttaagctcatctgctatcgttagtgtattttatgtgtggcccaggacagttcttcttccagtgtggccgagggaagccaaaagattgcaattgcacagcactgttttaaaggcttcatatattaaaaataataatagctaatatttatggagagtttatcacagtaaatactttgtgatatggtttggctctgtgtcctcacccaaatctcctcttgtagctcccgtaattcccatgtgttgtgggagggactcagtgggagatgattgaatcatgggggtgggtctttcctgtgctgttctcatgatagtggatgggtctcacaagatctgatggttttaaaaatgggagtttacctgcacaagctctctctttgcctgttgccatccacgtaggatgtgacttgctcctacttgccttccgtcatgattgtgaggcctcccccagccatgtggaactgtgagtctaaacctcttttgtaaattgcccagtctcgggaatgtctttatgagcagcagcatgaaaacgagctaatacactttgttttacagctttgttgagatacagttgatgctcagtaaactgcacatacttaaagtgtacaaattactgaggatttgtctgtgtgtatatgtgtgtgtgtgtgtgtgtgtgtgtgtgtgtatgtgtttgagacatggtctcactctgtcacccaggctggagtgcagtgacacaagcacaactcaacagctcactgcagccttgacctcctgggctcaagcaatcctcccacttcagcctcttgagtaggtggaactacaggtgcacaccaccatgcctggctgagttttgtatttttttgtagaaatgggatttcaccatttctacatggtggtctcaaactcccgggcttaagcaatctgcccacctcagtctcccaagatgctgggattacaggcaagagccaccgcgtccagttaactgagttttgacatatatgtgattgcatgaaaccattatcacaatcaagaaaataaacactcatcgtcctcaggattcctcatgtttctttgtaatctgtcccttccttccccctttatctatctcagacaaccactaatctgctgtcactgtagattattttttatttttcagaattttatataaatggaatcatacaatatgtactttttttttggtctggtatcttttacttagcataattattttgcagttcatccatgttgaggtgtttatcagtagtttgctcctttttattgctgaatagcattccattttctgaatataccaaatttgtgaatctattcacctgttgatagactttgggtttttcccttttttggctcttatactgtaataaagcttttatgaacattcatatgcaagtgtttgtgtggatacacacttccatttctcttgagtaaagacctaggagtagaatatccgggtcctgtgtagaatatccgggtcctgtggtagacgtatattatactttttacagaaataccaaattgttttataagatgactgtgccatattacattcccaccagctgtatttcagagctcccattgctccacatgcttgctcagacttggtatggtcagtctttttaattttagccatcctagtgaatatgtaatggtatcctcttgtggtttttatttgcatttccctaatagataataatactggacatacgatgtgcttatttgccatctttgtatcttctttggggaattatttgttcaaatatttttagtacttttactttttttgtcttattgaattttaagagatatttatatggttcagatgtgaggctttgtcagatacagattttacaaatgttttctcagctgtggcttacctttttattttcttaacaatgtctttgaagaacagaagtttcatgtttatgaagtgcaatttatcagttttttcttctagactttatgctttttatgtcttatttttaaaatatttgccaaaccaagatcactaaaaatttgttttatttatatataatttaatatatatttatatatataaatatataatttaatatatatataaatatataatttaatatatatttatatataaatatataatttaatatatatttatatatataaatatataatttaatatatatttatatatataaatatataatttaatatatatatatttatatataaatatataatttaatatatatataaatatataatttaatatatatttatatatataaatatataatttaatatatatataaatatataatttaatatatatttatatatataatttaatatatatttatatatataaatatataatttaatatatatttatatatataaatatataatttaataatatatttatatatataaatatacaatttaatatatatttatatatataaatatacaatttaatatatatttatatatataaatatataatttaatatatgtttatatatataaatatataatttaatatatatatataaatatataatttaatatatatataaatatataatttaatatatatatataaatatataatttaatatatatataaatatataatttaatatatatataaatatataatttaatatatatttatatatataaatatataattatgtatatatataaatatataatatataaataatataaaattattttataattttagcttttacatttaggtctttgatacattttgagctaattcttgcatatagtgtgaggtaaggtttaggttctttttttaacaccattttttgaaaatactgtcttttcctcattgaattgccttagtactattgtcaaaaatcagttggttttatgtgtgtcggtttatttctgaacttccaattctgttctatttatctataggtctattgtttcaccaacagccacctgtatttattactatagactgaagactgaaaaagccttcatttttgccttcatttttggaaaatattgtggcagtattttgttttattactctaaaaaagttgctccgccattttctcacttgcattgtttctgacaaactttttgcattgcaaaaagtttctgacaaatcttttttcatccttacctttgttcttttttctctggctgcttttgatactttctactgtttttgagcaatttcatcatgatgtgcttacagtagctttgttcgtgtttcttgtgtgtagaattcattgagcttcttggatctgtaggttttcctgtgctttttgttgtctaatgtctgaaaattttgtttcatctattttctctgttttttaaattggtttaaggtaggagaatatgcctggtcccttagactccatctttgtcggagtaggaagtttcaggattcttcttaaccattaaattatgtggttgttttgaggaatttttggagagagaaagtaagtcattgtattgttagtattgcctttggttttttgtttgtttgttttttgagacaagagtttcgctcctggtgcccaggctggagtgcagtggcgtgatctcggctcactgcaagctccacctcccaggctcaagcgattctcctgcctcagcctgacgagtagctggaattacaggcgcccgctaccatgcccagctaattttttgtatttttaatagagactgggtttcatcatgttgtccaggctggtctcgaactcctgaactcaggtgattcacctgccttggcctcctaacctttgggttttcttataggtaaacactggttatttccatacttcattggcatagtggaaagttcatgggattgagcatcaaatagtctagtgaccaaatctcagatatgccacctactagctttgtgaccttaagcttgctgttaaaccttttttagcttcaactttctcatctgcagcatgggaataatagttctcttctgtggatattgcaaagatggatagaaatggatgtaaagagcctggcataatcccagtagccagtaatagttgctattttaattattccccttccagtcatcttattaagagacatatgaggtaatttcagcgtccaggcagaaagagctatttttagttagagataatgaagttttgaaattctttaatctctaacaatttttttaaaaaggaagattgccttccttgctattgtgacgtaactatttactttacacatgtaacttacttgatgttaccatagttaatcataacatagacaaaactcaacaagtaagcaaaaagtggcttacagccaaagtgactttttagtccatacaaagtataagtacggagatcagtggtagaagcaggcccactgacaactgtaagaagtaacagttgttacagtaacagaaagctataaaagacaaatataaacgcagaagaaacaataataataatagggtagcaaaaacaccttcgtaactattgaggccattattctaaagacaacagtaaccctaggtcatcaagaaaagggtgaaatttggtttagtgttcttggcctaaggaagaggattgtgccatatagcatccctatacattggcctaaggaagaaggttgtgtcgttggcatacctgtacgttgtgtacaatgtataatgataaaattaggataattagcatatccacctcgaacatttatcatttatttgtggtaagaacacacaattattatgtgtcaattaaaaataaaacaaacaaatagaataaaatctgatatggtttggctatgtccctactcaaatctcatcagtgagctctcacgagatctgatggttttataaggggcatttctcccttttgcttggcacttttccttgctgccaccatatgaagaaggacgtgtttacttccccttccaccatgactgtaagtttcctgaggcctccccagccatgctgaactgtgagtcaattaaacatctctcctttataaattacccagtctcaggtatgtctttattagcagcatgagaacggactaatacaaatctaatgtcaaatttaaaaaagagagtgaaagatttgataatgacattgaaatatccaacaaacttaaaattcctataaaaataattttagatatttgtagtatcatttaagatacgagtggttatgtgatttctgtttgtttttgctctgttcataaatttaaaatactgagaaagtctgaaaacgtacatttttaatacaattcaagttattttacatactaaaaaaaaataaagcaagctaattgacattttgacatcatgctgtaaccttccctctaaaagtctgaaaagtctgctgtaacatcttaattttttaatgaataaatagcagtagtcttttatatgtgttatatataagaatacaaattttatctttcacctactatattttatactatagattctttccttctcatacagtttgcttaacagttttgcccagccctgttacaaatatttatttcaacagcatttgggccctactatgtggcaaatcaggaagaagataattaacgtaactacagtgttggctgccatgaaccccttacatgagaaggtgacataaaatatgcaaaatgggtattcaatgtagtatttcttcttaaggaatcgataattttgtgtaagttctaagaattgcctaaattctttcctcatccagtaaaatcaacaaaaagctgcctagccaaaccacaattacttgccccctgcagaggagctttcactaagactttggttagagaagagatttttttttaaatggccacagaaagaatgcttctacatttgtgttttaacttgtattaaaggcattgtttattacattgtttcatgtaccctttacaaagcataataccagggaaaaaaaaattatctcttggagtcttggtacaactactattgaaaagcaaaaattatatatttcattatgtaaatcacgagagctagctgtcatgattgttaggattgttagctcttgtgttttacatatatgcttcccctcttcatggtttgattttcggtttcttcttttatagccttatgtaatgatgccttttactctaaactggcatacatctcattttggaagaatatagaattgaacactaaaataaaaatgaaagaagagtttgagagtgtctgtaaaaatactcatttggctgtaatctggtgcctgcatttgtgattggctgtgcctttaagcacattctgtgaaaacacctccagggttttgaagtgtaatgctccattgttattctcgaatgcatataatagtgattttcccaccccctccaccataccccatgtatcattatggtagtgaaaacatttctgctactggttggctagaaggtcttcatgtgttattgcctaatatcatttgaagtgtttaaaagggtactgtctataatcataatatcaatttagtctgtctagcactgtttccccataattgctttaaggacttcacataaatctgttaacatgagcgttcattccttctgcagtggggagttgcaaagtagatcaagctacaaattgtcaagaaggaggtgtaccttttaaagtgtggggaggatttggtttgtcattgactgagattgaaaagtgaatgggaatccaaaagaaatgtagttttaaacctaggaaaggagctgggtatggtggctcacacctgtaatcccagcactttgggaggccaaggcgggcagatcacttgaggtcaggtgttagagaccagcctgggcaacatggtgaaacctcgtctctactaaaaatacaaaaattagccaggtgtggtagtgcacacctgtaatcccagctcttagggaagctgaggcaagagaattgcctgaatcccaggagcagaggttgcagtgagccaagattgcaccactgcactccagcctgggcaacagagcgagactccatctcaaaaaacaaacaaaaaacaaaaacaaaaaagaaaacccaggaaaggaaggtaaatttatttatattatattagcttttagatatacagttgtacctgtcagggtgggaaaagttaacacttcaaattaagttaacgtcaaacagccaaatttacattgttctgttgtgttttagtcctaactactaattattaaatactttctatatattgacatcatgagacttaagctattagttctgcctctttgtttttggcgtgctaatttgttttaactttgtgaacataattatagaaaaaattttagcgttttccattgatgataagtactgtgattaaatatgtggttttatacattaagagcatgccgcatagagagctgtctctttttaaatttttagtatattgaaatcgttatattttccaagatttattgcctggaactcaccagatcaagttttactaactagtggtaatttaaaataatctataagtacattagtatcagaggcatgcaattatttttgctaaactaccatggctaaacatatcaaactagatgatttccagacttaaaagtatgtttagcctcttaccaatagaggcgtttcagctatttatttctggaagattatttgtataaatctgcctgattgacttgtgaagtaaatctttgcaagtttctagaccctacaaatttgggaagccaacatctcccaggctaaaagagaaagtttccagctttacagagacctgaatgccatttggtcattcacttattcatgcacttcttaaatatgtattaaacactcaccatgcattgctgtagctacaggggctataaaggtagataggaaatgggtcctgcccttaaggagcatatgtccttgcaggggaaattgagatacagtttgtaagtgctgtaaagaggcagacgcacagtacagtgttgacacaaaggtggactaatccacaagccatgtttcttggtccagtgtctcctctctggcttctgtgatcatcttgtttatcctccctcttggttgtatgagttgggcaaggagaggtgttaggagaaaaaaaatcagctttaatggacctagagaattaggaccaaggtaggctcagggcaaatgttccctttgagcctgttcaccatccctataaagtgctgggcacattctagaatcttggcaactgagttgaagccaaggttctccgagctctgacttaatgtgggaagagagtcacttcttcccttgaaatctaccttagcagtgatgtttcttctcgttgatacattcactcctgccttttaagtaaatttataagctcagagacttttttaatatttaactaaggacttcaagaatcagttttgtgttgggcatggggcacttaacacaatatgaatttatagataacttagctataaagttttttgaattaagtgccaactcttcagtactgtgagagtgtggtggtagagtaggtggaatgaagaagaaaaagactacaagggaaaaagtgctttttttcccctttttgctcacaaagagaaggaaaaggaaagaaagcaaatgattagtacgtggaaataggttgggaagtagctattgttaaacatccagggtaattcattaggtcgataaggggtatggatcaacaaatattaagattagggatgctctggtcagaggagtatctcggagtgccaagtggagactggcatcgacaggtgactttctacttggctaaatctacgcatatattaagttaaagatcttgatgatatatagaatcctttgtatatatatttaggctataaagatttagttaaattaagcttatctttcatatggttgactcctgattaattctctgtatttcatgataatgtccttagtctctaatttaaaaacttattgataggagtgagtttattgctaaatctatatagaaatagaagtcatcctgaaggtcaaaattacactaatatatttgtaaaattgtaagctagtgttgtactgtctgttactatccctaatcattcataggtgttaaaatgaaacgccaccattgtctgttgcaatagacgtgatgcagtatttgttcattaatgatcacccctggtctctgacttttttaactgattttttaaatgcacaggtttaaaaagtttagttttgttactcgcataagtatatgagctcattttactgatctttttataaactagatgctttctgatgcagcacctgggaaactgagaattgttcatggagatgtcttgacatttaaggtagaaaaggctttttcagaaagtcttaaaagaccctgggaagatggtgagtgcttttgggtagttataaaacatttcttttatgattatttatatcacaaatgttcattttatgatacatttattacaaatgtcttatatgtttatattttaaattatctgaacagaattaaataatgtgtattataattttctcttgctacttgcttccaaattataaaatctagttactttttttagttctaattcatttgtctcatttccaaatgttttgtattctgtgcaaataaactaaccattttttgtgataccatataaggatagggtaaactatcaattgttatttgttccaaatagtggaaaaaaagaagtgctttagtaaactaagccatgcccaagccattgttttaactttttctattattcttcacattcaatgaccaaccaaggcagtcttcattcacagacagtgtttattgggtacctgctgtgtgcagcccttcagaatgcatagataaatagggtatgtttcttcctataacagactctcagaacaaacggaggagggcttaggtgcctccacatctggctgcccccatgtctctggcctcccccatgaccagactccttcagttgggccgcacttgcagtctctgccagctgacaggccctcctgttcttagcatgcagtcttcaggtttctgccccagcccagccacactggaaccacaatgccttcctcattacctgtttcaaaccttatctgactgagttctcccaaattcatttaactgtaatccatagtcttccggaggatttctcttgctctttttctccctgataccagcccctcctgtttttccttttacatttgtgaactttttctaactattcttagctggtggttgtttttctacccactttgtacagattgttgtttctggggtttttctttttgggcaaatttgccagattactccattcctatggtttcacttaccacctacgtattgcagacattcacatctttatatgctgcctgtacccccttcctgggcatctgacctctgacagcttcatctaggtgttccataggcactttaacctcatcatgtccaaaatgaattctctttttcctcaagccaactctttttcctgtatttcctaggccagaaattcaaggacttttctctgagtaactgagcagtaattaagtataattttttcctcaataatccaaagcagattgtgagaaaacattgcttttgaataataagtgaaaaaaaaaatttagccatgtctatttatatatttttctttgatgctattaatatccagtctgattttactcgtcactgaaattgtattcagaatatattgatggaatcatttcaggttgttttttcctctgccaccagatcctccaaatgtacatattattggaaatctgccttttagtgtttcaactccactgattatcaagtggcttgaaaatatttcctgtagagatggaccttttgtttatggcagaactcagatgactttgacttttcaaaaggaagtggcagaggtaagttttaacattttgtgactattttatcacatgttcaaattccaaagcaaaataataatactgcatttttaccacagtctgtgttttctaagttaatatcttattacacacacaagaacccagcagcagctcagccaaaagttaaaactttgatgatgatgacagatgtaactgctgtgggcttctgggaaaacatgaatgatgtatgttagccaaggaggtagtgtggtaaacacagggatgcaacagccatcgatgccactggagaaagacaaaagtgatgccctgttggccatacccaggattggcacgtgataccttaaaattgatcctttaggcttaatggcatggcagttaaagaatatgataattggccgggcatggtgactcatgcctgtaattccagcactttgggaggccgaggcaggcggatcacgaggtcaggagtttgaaaccagcctggccaacatggtgaaaccccgtctctactaaaaatacaaaaaaaaaaaaaaaaaaaaaaaaattagctgggtgtggtggggggtgcctgtaatcccagctactcaggaggctgagccaggagaattgcttgaacctgggaggcggaggttgcagtgagcaaagatcgtgccactgcactccagcttgggtaacagagcaagactctgtctcggcggggcatgcgggaagaatgtgataatcaatttggagctgagaaagagaaggggattgagggtctcattattcagtatataaattgtacttcctccctcacctcagtgaagtctgctatgcctgcattcccatggcagaagtgttctgggttcactctagaaagtaaaccctccagggtaagcaggggtggtgcttgagctgcaaaggtataaggacggatgtgcagactcttaagtggttttttaaaaaaattttattatgacatataagtacaagagtatacagccatcccttggtatccataggggattgattccagaacccccacaaataccaaaatctacaagtgctcaagtccctgatgtcaaacagtgtagtatttgcatataacctgtgcatatcatcccatatactttaaatcatctctacattatttgtaatacctaagacagtataaatgttttataaatagttgttacactgtattatttgaggaataatgataagggaaaaatctgtacatgttcagtacagatgcaaccatccttttttattccctgaatatttttgatctgggattggttggatccatggatatggaacccacagatactgacggatgactgtataatgtacatggatgacttaataaagggcactcctgaatccccatgtacatggatgacttaataaagggaactcctgaatccccacccccaacatgggtaattaaatcactagtacctttgagaccccattgtattccttactctgattgcatctcctttccatcccatgctagtaaggtgatcactactgtgaattttggatttattcccttgcatagtcttatcacacagatttatattcctatgatgaatacactttagttttgtccttttttttttttggacagagtctcactctgtcacccaggctggagtgcagtggcacgatcttggctcactgcaagctccgtctcccgggttcacgccattctcctgcctcagcctcccgagtagctgggactacaggcgcccgccaccacgcccggctaattttttgtatttttagtagagacggggtttcaccatgttagccaggatggtctccatctcctgacctcgtgatccacccgcctcagcctcccaaagtgctgggattacaggcgtgagccactgcgcccagcccagttttgtccacttttgacaactgggtttatataatgtgtattcatatagtatgtattgtttttatcctgaacattctttgtaggattcactgacgttgcttatgactgtagtttatttaggtagctatatatactacccactatttgactgtgtaagatccttatctattcattctcatgttggtggaccatgaattagtttcatcgttctgtttttacaaacaaaactgttgtaaacatcccatactgtgtcagttggggcacatgggcaacatttctctagggtatttacctgggagtggaactgcaaatcttcaccactgcatagataatgctaagttgatctctgaaatcatcacgcctgtttatattcccaccagcagtgtgtatgagttcattttgctccatattcttgccagtactcactattgccagacttgtacatttttattaatctcagggtaatggaatgtcattgtgttttcttttgtccttgctggtttgtagcaaaatggggcactattgtgtgtttactggcctttttgagttccttgtttttagtgcatgctttttgctcacctttcttttgggttgcttatctttttcctactgatctggaggagttctcacatactctttaatactcttcatactagtccttagttaaatgtgttgagcatttcttctactctattgcatgttgttattttctttttatggtgtcttttgaagagcaagcattcttaattttaaatttatgtctagtgctttttgtgttttgttgaggaaacacttttatcttgagttcatgaagatattcttctgttatcttctagaagctttatgtttacctttcacatttatatctatagtccactcgggtttgatctctgtgtatagtgaagtagaagcaattttactatttttaacatatgggtcccaactaacctagctccatttactcacaagtcagccctcgttgatccctgtcagcacctctgtcagcattggtctggttagatacatcatataagcattggtctgattagaaacatcaagaaaaaaatgacatgaaatccaggaagcagagggctccctacaggacagagagaaaggagtcctcaggaagaacaaccagtccagattggagccaattaaaaggggaatttgataaaactactgtcaagtttgcatagagtcaaaaaaaagttgcaaaaactcaggagagtttaagattgaattcatgataaataaatagaaaactaaatataacagggagtgaatcaagggaaatataccattattggaatgagaagtacaaaaatattatttggagataaataattattttgaaaacctaagaaaaaatgagagacatatataaaaataactacaaaacctaactgagaatctcaaggtcactgagataaatccagaaaaatatcatagccccagaaggaaaaatgattattttaaagaagctgatttttccaagaattctgtatatctaattataatcctcaaagaacttatcttgaaatacgcagttctaaggatcatctggaggaatagacctgcaacaatacataagaaatgttgaaaagggagagtgatgagaaaagacttccttgtcatatgctaaaatgtatggtgaagctttaataattaaagcagtatgagaagcagcacgtgacagagcaattactagactagaaagcccgatgcagacaccttagcagtatctgataatggtcagatcaaaaatcagcagtgaaggaaagaattaagtaaatgcatggatatttggttaactattatgaaaaaaaattatctctaaattccatttgggtctttggatcttctctttctgtcctcattacattcatgccttccttggcatttttctatgtatgtatgtatgtatgatatttaaagtagatgttttggccaggcgtgctggctcacacctgtaatctcaacactttgggaggctaaggtgggaggattgcttgagcccagagttcgagaccagcctgggtaacatagctccctatgttaccttgtctctacaaaaaataaataaaaaattagccaggtccggtgctgcatgcctgtggtctcgactactcaggaggctgaggtgggaggatcacctgagcccaggagatcaaattacagtgagccgtgatcatgtcactgcactccagcctgggcggcagagcaagaccctgtctcaaaaaattgaacaaataagtagctgttttaagatccttgcctgctaatttcattacctctatcatttctgtactcttttagtgattgatttccccttcttgctataggttgcatttttctgtttctttgaaagcctgataatttctgacaaaacatcaggtattgtgagagttttattttttttaatgctgatgagggctggattttgtggtattgggttgagtgttgggtttgttgtgacacatagataagattgcttgaggcttttattgttctggtggatccagggtagcttttaatttggggctcgttgagccccagtactacatcatgccctttctgaggaaggcacccaacgccctgcatgttacaaggcctcttgagccatgtgagccccagttgctcctgccttcccctggttctagttcaggctcccaagcctcaggcacctgcagatcagtgctcagcaggggacttgggggacccttgggacccttttgctacctcaggagctctgcctcacattctctctccctctcctgttcctgtctcccccacccgctgctcctgcacacgtgtgagcaccgcgtgtgtgcgttttccatgtctctggtagtctgccccacaaattctgcctgccgaggcctcccagatctccaggtctggctccctgagcccaggagacctctaggctcagtttgagctgccccctgcctctgctgcagcctgagaagggcctccagtcctcttcaggccgggcatctaaggctcatctcctttccatttcagtaatgacagtcctgctccacctgttgtcctgtttatgcaaactcttgtttcctatgacttattcagctttatacttgtttcagaacaaaactttttaatgccagaatttgtttgaaatcaatagactctactactacataagcttaattctttaaatgccttcctctcagataatttgagtgtatcataagaatttcatttcttagatctatccctctctttttacccttgtttctgtttaggggaatcatttccaacaagggcacttttgccttatctgctcctcaggggcatttggcaatgtctgacatgtttttggttgtcacaccagggagggggctctggtctctagtggatagaaggttagggatgctgggaagcattcttcagtgcacagcagagcctcccacagcgaagaaccacccaacattaatcagcccaagatgtcagtcatgccaaggttggaaaactttcctttagatgatttggccataaaatctttctctcaggagtcttggaacttcccatcataaaaacgtaggaccgttgcatgtttgttaggaaccctgagatgatatcaccacttttcttaaggtctttgtcatttcctcttcatgaacctgctaattctcttgggttggtttgaattgggcccatgctgagttttctttgttgtttttctcaacctttggatatgttggttctgacagaaaccattcttgtttcctctgcacttatacaacttctgacaccagatgtgtgggttttttccacaccaagcaatctccaattctccgaacaccagctgggtatcctgcagtttcattcaattctgacactgtccacatgtttttagtgttagatcccacaagttaagggccaagtcccacaagactgcgcctcacttcagatgacagtcacaaatctgggcctctaggagttctgagcgaccagctataaaataaatcagagggttccatgtccccctcctcagattgaatcatttttcagaatggctcaaaaactcagggaaacaccttacctacacttgagtaatgggtaatcaattggtctcagtgaccagccccatcttgagctacctagaggcctcatcctaagttatctcattactgtaaactctgggggacttgtgaatttaaagcaagacatgccgattactcaggaaatttcaagggctttaggagccagcgacaaagtccaaatatatttcttattaaaccacatctgtggatttatttttctcagccgacatgattattttggtatttctgctcttgaataacacaatagagatacaaaatactatgtactctatttgtgtggggggaaacacaaagaaacagaggcttaagaagaggtggagtaatattttcggtgactcagcatgtcagttgtggttattaataatagtgttgcttcgacttcaccatatgcaattctttttctttaacaaaaaaagttgattttagttcaattttagcatgaatattgagaagagtttatatagagtctataatttatggaatgccttagaagtctaggtaacactggtcctctgattttcacattttgcaagtgaaagtttcagtgggagaatatatatatactatattagtccattcttttcttttttttttttttttttttttgaggccgagtctcgccgctctgtcacccaggctggagtgcagtggtgccatctcggctcgctgcaagccccgcctcccgggttcatgccattcaactgcctcagcctcccaagtagctgggactacaggcgcccaccaccacgcctggctaattttttgcatttttagtagagacggggtttcaccatgttagccaggatggtctcgatctcctgacctcgtgatccacacgcctcagcctcctaaagtgctgggattacaggcgtgagccaccacgcccagcccctatgttagtccattctatgcactgctataaagagatacctgagactgggtaatttattttaaaaaaaaggtttaattggctcacatttctgcaactctacaggaagcatggctggggaagcctcaggaaacttataatcatggcagaaggcaaaggggaagcaggcatggtttatgtggctggagcagtaggaagagagtggggaggtgctacacactttacaacaagcagttctcatgagaactcactcactgtcgtgcaagagggaaatctgcccccttgatccaatcacctttcaccaggcccctcctccaacattggggattacaatttggcgagatttgggcagggacagtaattcgcaccatttcatatagcagcattttcttatatgccatttactcttgacatggctgtatatgtaattttgtattttagccacaggaagctctttttaacatttactttgattggctttgttaattacaaaacagaaataaatgagcaccgtcgtcttattcctgtctctagcactacaggatctaagtgtaagaattcagctcatatgcattaagggacatatagacaatatgaagttacagttcataaaatataatcagactgttaagcagtaagtgagaactaatcccatctaacctcattttattaatataaatgatgaactgaggctcaaaaggtttaatgccttccagaaggtcatggagtagttacagggaaggctgaacttgagtacaggtagtgtgttttctgctaaagtcatgatgtgcaagttctcgatgctgctggccctgtgttcttttctttctgggtccagcatcagcctctttttctcccaccatctccagaggaccctggctgttgatgagcacatcccaagcagggagggagtcaccctctccattaattaccttacatagttctcattgtccctgatatatggctgtgtagcttctcaagtgtaagcctaatttttctccttgtacttaaaattattttagattaataagaaaaaaaaaaccactgtccttgtaaattctttgaccccttgtttttctcatactccatcaaaatgctttttaaaagctcaagggttagaggtttccttttaaagaaaaattaactagtttggtttcctgaccttttgttgctaaaatcatctatcttgtaatggatgttgaatttttatagctttcccaatagtacatctatcacagaaacagtaatgtatatttgaggttgatagaacatttcagttttatgctagctttgaatgaaatcttttgtagagctttctggtctgtgatttgaatttttccttaatgagttagggacagctatgtgtgctgcttttttctaaattgaaatatatgattcgcatgttttcatctctacagcctggggatatatgctacaaagattgaattgaatgggtcaggttaatggattgggacacatattcccctgacgtttctggatgtgttctaagtgaaatatacttaaatacttaaataagatcttttttgaattgtgccagttggatattaaaatttgcaatgcattttgaatttttgaattttctgccagtagtaagattaagctccttttttactttatgaagaactagaaatatttttgaccacttgatccataagcttattctttaacttaaatctctacttctgtcattttttgtagctgtatgagagtatatgtgtcttggttttacattttagtaagaaagattatattttgtcttacatgctatagtaactcatcacttatcttgagtacggcatcccaataatttcaactctccaaacagacaagagccagacagtttaaaataaaaaggtcatggggaagaggtatgagatgaaaggttggctttgagtacaatctataactttgcccataggaagtttcttccatatctcacacagaacctattttttaatcttccttaaggcaaagctctaataaggtaaattatatggttttcatccacggcaggctacaagcagcaaaggaaaagaagtgattagactatgtgtgtgcattgcagtgaagcgggaaagagcaaacccagcagctgcaaaccagctcagaaagcactgtgtcttttactgttgagcagtggggccccctgcctgcctacctagccccaggattattccagtaatcattggtgtttgtaatgttgcccctgaatcattcagaagagggttagaatgtcctttgagctcttaagaacacagagaggcaagatacattttagaaagataagcatccctaaatttttttacccaccactcagctctgttcaattttaatatattgccatatttttatatcttttttaaagaaataaaatattgttgatatgtttggagccctcttctatcccctttctttcccttctatgagttgtactatcttaaactttcgtcatcattatttccatacatattttatccttacattgcagataaatacaccacacacacatacacacacacacacacacacacactcagagtaaatgataggagtagtcttttcaagattttatacaaatagcattatactgtacaaattttctgtgacttgattattttttattccattttgggattcaatctcgtattccattatcagaattatcacagtttattttttcgttcacatgttgatttttattatttttttcatttcttgacattacacataataccataatgaacatttttatacctatcgcccgtgtaagtatgtatgtacgctgtgctctaggatatgttcttagagacctagagggtcatgaggttttacacagcttcagctctactgtatattgccaaattatgctacaaatgcttgtacagatttcctctctcactagcagtatctgaaagttcctatagctgcagatatcctccaatatcaggttctgttaggttttttttttaattgttcatttcatgtgtatgaaattatatgtaatgttctaatttgcatattcctactttgtactgtggtggagcatagtttatattatggtttatttggatttctcttatgtgagttgccttatatattctattagctatttatcttatgattattgatgtacaggaatttcatctgtattctgaacactataaatttcaaatactttctcttagtctgtgacttacaaacatttataatgttttattatacagaaattaaaaattttaataaagtacagtagtttttgttgttattgttgttgaggagggcgtcttgctctgttgcccaggctgatcttgaactcctggcctctggcagtccacctgttttggcttcccaaagcactggaattacaggcatgagccactgttcccagccaagatcaaaaaaatatatatatatgtatatatacatatatatatacacacacacacatatatgcacacatatatacacatatatatacacacatatatacacacatatacatatacacatgtatatatatacatatatatacacacatatatacacatgtatatatatacatatatatacacacatatatatacacacatatatatacacacacatatatatatattttgtccccaaagcaaagctatataagaaaagacatacatagatacatatattttagaaagatgtatatacatacatatatacatatatgtgtgtgtgtctgtctgtctgtcttttcttatatagctctgcttttacatctttaggaaattcttccctaccatggaagtcatagatatttgcttataaaaattttaaaattttgcttttcacttattgttaatttgcttagagtttttttggttatggcatgagataaggacctactgttttctcctatggatatctaattacaccggtgtcacttaccgaatgatccttccttttctgttagcagttgctacatcgcatctatcgtgtgttaaatatctaatgtgcttgggtctgtttctgaggcatttgttttattgatctgtctgggcctgcatcaatttgatgtctggtagggtgagctcccctatcattgttggtattcttcaggagcgtcctggccattcttggccttatataaattttacatggaatttaaatatatatataatacatatggaaattaatttttaaaatcttgttggacttttaattgaaattgcattgcatttatgaattaattgaaatatacctaattaattgcaaaacaaaaatgtttgagtgtttaaaagaataaattactaggttttacaaaaattatttgtcaagaacagccaatttcccaagggttctgaatactcaaggttttactatattaagtgaatttgaaaagcacaccatttaaaatgttcattcatatattggggtgattcagaaaattaagtgtttaagcatctttcatttttcattatgcttgctaatttcttcatcaagtatttattgattgcttgttttatgtaggaccttctgctatagaatataacagtggttcaaaaatcccaacagccattggtagagcaaatgttcttatttttgtagtgcattatatatgacataattcacatttcttaggtgtacctcagttgatgttggaggaaaatattccccatgtttgctgtgtgtcatgtgtcagatagcccattcttttcaaatttgcctcaaaaagtccacctagtgttcagaaataatggaatgttgactctttttcatctaatcaggctggactaattatttgctaaaattcatttttgtctctctctagagacttgcagccaatacaggaagcaaacagcgtagtcgcctctctgttatggctcagtacctctgcaatgttcgacacatctttacgattccaggacaagcttttgtccccaaaccagaggtaagtttctgcttatttgttgtagtatatcggaattaggacgtttgttcccctgaggatgtgtcataggaaataacctctaggatctaacctttgtttatgtgcaaactgacactgtactttacttctgaataagaaccacaaaaatcgtaatatgaatagctagttcttactataattgttctccttaggtagggtgactaaatgtttaggttcatgcatgttatcctggtggcagtatcattcatcatcttcatcttcatgatgttactcttaaagtatccctgtatggaagataagttacacggtcacccaatatttgagaaaagaaataaaatacttttgtgttttctgttagagacctctaactaaagctacatcaaacattatttacttaacacttttttgggagaccttattatggtagtgttatttgtggtaaatcatctgtggaagaaacagttggatattaaactaggctttgatattatatgctagttatgtgagtaagtgctagttacagaaacagagtttctctgccaaaaattaaaattaaaaaaaccgttgtctgttttagcaaaaccactgcttggtgagttattacaagatgtgtactattaaaaactcatctttttcttcagtgaatgtatattgagcatttactgtttgaaaatgcgttgggtagcaaggggagtctacagggatatgagcctaatccgatacagagtctgccttcagggagttcacagcctcatgaggaatagaaatttctcactggtccctaaaactctcaaatataaggtcttgcagagtgtcccttgcatcatgtatccttcataaataacaagagatagcatggaaaaaaatgcattatgtgactatagatttagatatagattctagatttagaatggagaccctaaccaatagtgttagatctacttgtctgtcttgaagacgcctaagtgatctccatgctctttgctgccaccttcatacttctttgccatttggccagttagctgagcgttcaggtgactaggaagtcaggccatcttccccttacgtaacagacataattgtcagctttttctaaatcgagctcagggagcttgctatcggtgccacctcccttcagcatctcagacttcagagacattgcgaatgacttctcctagaataattagatccaagacagaatttgatgactggaggtatcttataggttatcttcaaatttaaaacatttgtgctttcagggactttctctcctagtacaggtggccattataatgaaaaaaataaaaataaaaaaccagtgaccatgtagcttgatttcttcttgtcatgcacatgtgtgtgcatataacattttaaatagtgtaagactcattatatcaaaaaccaagatccttactcataggcctctatagttatggttatgaccattatccagaatctccaggctatttaagttttactaacgggttcttaggatagatattcgaatatttttagtggaagctttctaactctgttttagttacctagttgagattatttgatggagtttcgaagttattatccactttatctttgatttagtggtaaggtacatatgtagtttatcaattaaaatttaccttctctgggattaaggccacaagaaaatatttattatttggaaaaaagctagctatgtctttgattcctttttttattgagggatgtttacgttttggcaaattaaacattttcatagcaatttacttcactttttttattatattgtaactattacatacaggggatttatttgtaatccagaaaagcacttatcaaggacttgtaggtgtgcaccaccacaccggctattttttgtagtttttcatagagacaggattttgccatattggccaggctggtcttgaactcatggcctccagtgacctacccgctttggcctcccaaagtgccgggattacaggctaaattttagttctaaaagaattctctgctgctttgaagtagttttaccatattagggcaaagcagaaatgttctgaagaaagccagaaaatattttgctgacagttacattgagcaaatgttttaaaaattcattttcttgggccgggcacagtgactcatgcctgtaatcccagcactttgggaggccgaggtgggcggatcacgaggtcaggagatcgagaccatcctggctaacatggtgaaaccccgtctctactaaaaatacaaaaaattagccgggcatggtggtgggcgcctcaagtcccagctactcaggaggctgaggcaggagaatggcatgaacccgggaggcggagcttgcagcgaggcgagatggcaccactgcactccagcctgggtgacagagcgagactccatctcaaaaaaaaaaaaaattcattttctcaaataagaaagaggaagagtttttacagagatgataaactaattcaaggctagtactctaactaaaccttctgcatacaagaagagaaagtcctagacgcacataattgcaacacaaggtaagataagctaagcgctaaaaatagaggttgggcagattcctgggtggttgagagagggagattaatgctcagaagaaatttactaacattcattacttattctcaatcaaaactctaagaatcagatatagagaatttcttttgtgatacaatgaggggcttacttacaaccactttcgggattttttcctgtgagagtctgctgtcccttctgtttctcaatcttttaactaactcaatcaagctttaatggcagaactttcactaccattgaactattacaatcctgttctgactagttgaactgaattactgctgaactttactcttattaagctctctagtgtagttcccaaaatttgaacccaaaatactttgtgtctgcaaaacagacaacctctgaggttcttaaaattagactaattaattggtctactttagtgtctcttaaactattagagtctgtagtatgtagcttttaagttagaatttttttaattttgtgttttcatttcactgttaatgaaattatttacatttacaagacaatgtcttttgcaatgcaaattcagaactaaaattgttttcatgacagaatacaacctgtttcttaagtttctcaagctagcttttctctattagcctctgtagatccctgagaatccacatatttctggggttccacgcttaatcttttttttcagctactctgcacatttctcaagtttgggaaatactgagctattagctagatcctcaaaattctgtctttttttttatgaattatggtgataggcttcataatctaacatagttcgtaaagagtggaaaggctttttagttctcaacactatttttttttttttttttttttttttgagacagagtctcactctgccgcccaggctggagtgcagtggcacaatctcggctcactgcaacctccaccttctgggttcaaatgattctcctgcctcagccttccgagtagctgggattacaggcgcccgccatcatgccccgctaagttttgtatttttagtagagacgaggtttcaccatgttggccaagctggtctcgaactcctggcctcaggtgatccatccgcctcggcctcccaaagtgctgggattacaggcatgagccaccacgcccagccagttctcaacactattctctactctgacttagtagaaaaatcatttagttatattatgagagttgtaacgggttctttttaattgacactggtagaggcagtagacttccaagtaagctagacctgctggaattccagtactgctagttttgagagcttggtcgggttaataggctgagtttactacatccagatttgaccaataataccacccttgaaggacatttgtgaggaatagaaataatcaatgcagagtgcctaatatgagtatctggcagtgaatgctgccagtcaaagtagttgttattgttatgatataaacaaatatttatggactaagttgtagtattctgatataaaaataaggattataatttttaagctatatatagaatttatatttaatttttcctatttggaagtgtggtatatagaacaagttaccttcaaacatggtacacatttaaagcataaatagtgtccattaaattgtagatgaattaatgatatatccatgacatataaagaaaagattggaacttgagacatccactcttgacttttgaagagcgttttagaggcttccaaccctgcttgttcacagctattgaggccttgacctctgtgggagatagtcttgagtttggtgggtggatgggtccacagaagagacaactgtttttcatgcttttgtgttttttgaaatctgacattgaggatgttatttctgctgtatatttaccttgtattcaagaatcattttggtatgaggtcagaacactagtgttttcctacttaactaagactcttctgtctttggtttgtattctcctcctagaatcagattgagatgggattttcataaaggtgatgtattgacaagggccctcaggagaaggggcatgagggtagcaggaaagggcaggggaagagctaagtaaacatattgttcctcctggaggagcttcagcctagaaccacggcgggaggagaagctgtgtagcacaaattgccccacgcgtctgtgttcccttgaggcaagggaccagcttattggaacctgtgccagccagtctttgcagggagcagtggggcagtcacttcccagtagaggcagctccatctctgggagccattagcacccatcagtgccagcagctgggggtggctgccctggcccagtggaaggagcttggccaagacacagcatcctgtctagcttcctaccagtagacaaagctgtcagattacttacatggccacctctctgccgcagttgcttggaagttctaaactaagtttcatgtttaattgctttagcatgcttcaaccaggaacatttaatagcattttttctctcttctttttgtttgtaactttagtctttcatctttatcagttgtttttatacttattatacctgcaattttataagttgcctcaaattcttttttaaagcccttgagtccaaaataaaaataaatataaaccaaaagccatttttataattaaagtagtaccagagtcatcctccttaaaaatcaggtaaaatacgtgttgaatagagataagagtatttgctattacaattttaattcagtactaggcatgcttccataaactgctcaagaataaatggtaagtattctaaatccaaggagggaaaaaacaaaattgcatttttgcagacagtacttttatgtatgtataaaatgcaatgaaattaatacaaaagtaactggagataatgataataatgtgatagtgttctgcagaattataggctaggctaaaaatctcaaaagtcaagtaagttagtatttgctaaagtcatgtagctgacaatatagtgatgaaagacatatgagaaaacattgtccacatccaaaactgaacttctgtctaactaccctagtgggcctgccctccctgcacctcttattcactatgctgactaatggcatcatccacccaggtcatccaagcctaaaccttggaggtcatcttaagcaccacctccccagacctttacaactgctgaccctcagaactagtcagtcgttaaccagcttctgacattacctaaatttctcccaaacccatcccaattttgtacccaattcttctgacttaatttaagtctatcatttttgtcagaattactagatgaattcttcagtcatatgtatagatatacacgtgctccacaggttaaaaaaaaaaaaagtatgatatttttggtcttttgggttttgttttggtaactttttatcaaagaagaatgaataagtatattcgataaattagactatgatttctcaaactcagaactgttgacatttggggccagataattctttgttgccagagtctgtcctgtgcattgtaagatacataaaggcatccctggcctcttcctactagattccagtagcactacctcagttaagataaccaaaaaagtgtcccagcattgccgaatgtcccctgcaggctaaactcaccccagggagagccactggattagactaagaaccattgagtaacactagtcatatgctttctgtgcaccaactgctttctgtgtatcatctcatttaatccccacgagaactctgagggtagatgccattcttaagcaaaccaagaccttagttaagtaatgcatgctgtgtaaccatgcacccacaccagggcttgcacccgggtagtttgactccagaacctggttccctcaggttggaaccatctccccacttactagctgtgtgaacttgggcaagttagggaacttatgtcacctctgtcgccctcagtgtcctgtaagatcctgagaatagtgcctacctggtagagttgttaggtttaagccaggactggcatgtgttaggttttagaccaggactggcatgtgttaggaagcacttgccatgacatgtcactgagaatgcagagctaaaaatgacaccacacctcccagtctagttggagatgcaatcatgtaaactcataatttcatgacttcttaaatagagcgtttttacacagtacacattacttaagtcttggtgtgctcatgtgagctattgtgaggattaaatgagagcatttattaaattcatagtttgttaaatagagcattttctgcgagtgcagatgcgggcttgaacttctaggctgtcaggattgagtttacaggagaggtccgtgtgaatcctgaagggtgagcaggagctttggtagtgagggagtgaggctgggaggagtgcaggtggaggaatgaacacagcgggataggaattcctgtaggaatagagagactccacatcatttattgcaggattgccacttccaaacaatacactgggccattatttcatataaaatggctggttttctgagagtttgaaacattcgtgtttctacttaggaagaaaatactccagagctaaataaaaattatttttgaagtatatatagaatgatatagcagatataaagataacttttactgtaggactaaaggctacatagactatgtaaacccagccacattcagcaaagtgagagaagaactattaatgggatcaaagcagttctagcacattaatttgcatgaaatcattctttgcatcagaattctttttagtatgacacttgtgtataaaataacattttgaccactcaaaaggaatacatactttaaacaatcatttaaccttctacaaaatgatccccttcctaattcccgtttgtgataataccttttcgttttagctattccagtaatagctaatgacattgttgcagaagagaatgtctacccagtaaaataggtataggatatgttagtctatttctgtatgcacaaatgaaagttatttacttacgtaaaatatattcttcccacttcctgagttattaatgtacaaagaaataatcttttttcccctttaccattgaatcattgacaatgactaagcttcaattaacaaataaattgttagaaacaatagtgggcagtgtttcctagatttttatttacttgctaaaatatttgaatcacatatcataatttatattttaaaagcattctttaaaatatattttgacattcattaattgaaacagcttatttgtaagaatgtttttgttaacatgaatgaaatttgagagaaaaagtgacaaaggtaacttttatcatccaaatatgaataaatgagagaggaagtgggatggtagtaaatccagaatgtgataggataaatgaacttaatctgtggagaatcctcttgctagaagcagaagaagggagttcttaaacattttaaaacaaacttttgttcttatcacttagcttgtacttaatgctttaagagtcctagagattttagtttggtttggctttctttactgtggtagcatttaccaatttcttcagttctgcctaatcttagtttgcatataatattgtcagctcttacaaatatatgtagatagttttctaaaatgaaaaagaaatgggctggtcacaggaggtggggacttgggatggatggttttagcagcatctgaatggagtaggcagctcttgtattcctaatgtactttcacacactgtagctttaaaacagaagcaagttgctgtgttgttgccaaccagatagcaaagtggataatattcttggttaacaccagggcaaggtactttttatacttggcagtttagttcttttataaaatccagtttgaaaggtgtatcagcaaattatcttgaaaaagctatcaaataattgccttatgaatgtaatcagaacctctttcaattataaatctttaagtaaaacatggaaacaataatggaaaaaataaagaactcttcagacagatgtaattgtatatgatagttttattggcattttaaactactttgtagttgttaaagtattttacattctactttctttgtagggaaagttaagcataattctgatttttttttaatctaaaagtcccatttggcacccaaaagttccatttcatatgcattactcagttatttacacataatccttcagattgtgtgtggaattgttctcgagctgtgtgttagagataggctgctgtgtgggtgggtcgagtctagcttctggattcctttttatacaggaggtgcagaaaatcatgccagagataaacaacagcattgcagaaatgaatccgatatagatagctcctccaggttcatgtttgttgctttctggaactgtcagatccagaaagtttgctatgatctcctttgtgtaccacactgtcgagattaaactagagattcctgcagacatgaaacagactcctccagcaaaggaagcatggctcttggtttctctgtcccctcctaagcgagtacatttcattcctactgtggaagtgcagatccccaaagcagacagaacacacgccaggaccatggtggctctcgcagcctgcacgtggatggggagggacagaatggagtgtttcagggcacagctgaacatcccagtgctgtaccacgtacagtccatccagagcccgtgcagctgtacaatggctgttatgatgttggagtccacatccacattcaccttccagttgggcagcagagtggctgtgagcactccagagaccccagataaggccaggatgaaagcaaggagctggagtcctgctgaggccatgatgttactgttaagtctgtcctcttagaaaatcctgatgtttaacaatgatggctgtcagaattctatctatttctgtgcagtagagaaccaaataacaaagcctaaggaaaaaaggcaaaaccaggattgagcgaaagaaagtaagtaaacaaaaggcttccctttagagtaggagccaagaacacatctgagtatcccccttctccagcccccaagcagatgaggatgctgtaggctggaggagaaaagctcccaccaggccttgaagactggtctgagtgatatgcatgggtggtgttgatacagggcataaagaaagcagttgcccacttaattctttttaaaactcaacatatgctgaaactgtagcgtggacatgtacgttgttaggagatttagacatttgaaattccagctatagtatctgataaagaattttaatagcattataggtttttcaaatgattttattttttatttttattttttttgagatggagtctcactctgtcacccaggctggagtgcagtggagcgatcttggctcactgcaagctccacctcctgggttcacaccattctcctgcctcagcctcccgagtagctgggactacaggcgcccgccaccatgcccggctaattttttttttttttgtatttttagtagagatggggtttcaccctgttagccaggatggtctcgatctcctgacctcgtgatccgcccacctcggcctcccgaagtgctgggattacaggcgtgagccaccacgcctcgcccaaatgattttatttttaatgaaaatactcaatacataataaggaagaaaataaattaaggccaccttttaaagatggtttataaatacattttagaaaagtatttaggaagtggctttcataaacagatctttatgacacacccacagtgccaggcacatagcccaagtgaaccatttgaggaggaaggacagcagtggaaagaagtctgagtcactggcatggttatccctaagttctagttaatacctgtttgcaaaatcctgactgaggttagtacttgttttacttcaggtgcctggtactcaaaacaattaagccactgttttttgtatataagaacatgaggtcctttctaattgggaccagaatcatttcctggcccaaatgaagccggctattctgaacaattcagaagtagtgatggcagatctcaaaaatacataccagaaataaccacatcattagttgtatgtgaaaggataccagaaataaattaaccctttattttctttgtttatttttaagaggaaggaaaagaccacctactttgtggcttggctgtgttttaagaaacaaaaaggctttcgattccatctttctattcctgttcccctatctagcccatctggcactgcttactgccttatttgagaaaaatgtaatggtttctgaaatactgcagtactgactttctttgtcattctgagttaattttgaatggtatgctaaagtggctctgtcgtgattcatatgtattttacaaaaggtgatacaggctcttgagtcaaagacacttgggccagttcttagctttatacctctctgtgcctcagtatcctcttctggaaaatggggaggattgaaatacttcgttcatagggttaaataagttaatacattttaagggcttagaccaatatttaagccacagaaagtcctcagtaatttaaaattgacatcattattagtatttttatttcttatgtattgtgacaattgatgtttaaaattatttggatcttttccctttttctcttccttccttgggctgatttattttcatagaatcttggagctgaaagaaacctcagacagacaatctcaagcatccttgttttttcagatcagaatgttcagataggatatcaccccatgtcatacagtcttcagcagccaacctgcagcgtccagatctctctccacccctcctacctcacagggtcatcccgcatcctttccccttttaccacaacacttcctgctgaaattctttctccccctgtgtgtttcccttgggaaccagggaaaacactgtatctggaggcaaaaagcaccattaactgtctacttcacccactcccctccccaccaaggaaaaaaaggactgtagaggatgttaataggccacatggctcagcttcagatgactcggcaaggagattgatgcctggctttggttaaatatttgaaatagtactaatccattgcctatatttaaagtataaactttgcatagctacaaacattgattctctaagacattagatcctagactatctggattgtgctgttctgtttttgttcataatctgaaaatgtaaatcttaccattttagaaaaggatttccctaggattttaagttcttaagagtcagacttatctgtagacatcagtgtgcctaggattcacctgctatcatacagtttcttttctgttttccaaacttagaccaaaatagaacaaaagttaaagtttctagaaaaaaaatcaagcacatgtttacagttttgtaatagctgctttcaagtttaggttttagcatttcggactccagccagcttgctaaattactgcctctggaccattttcagcttagggattcttcaagtgtggggttgctggaacattttctaacagcatctgcttgctcacttttctctctccctctctctttctttctactttgactgaataacctttgttgtcaatctatgttcagcttaccaattataatccttttcttcccattaactgatatattttataactttcagtatatttcagacatgaagacagtttgttcatcatgattaacaagtactggcagtgatcaattacagacagccaaaatcagtgtaaacaatatgacgtgtcatttaattagcatagtgcttgcttactgttgaatattggattcaaatgcttttttttctgcatagagaacttatgtagaaagaatttgttctccaaatgaaggtcactttctgctcatacaaatatactggcattttagctgcattgcgctttaccctccagccacgagtataataccgtttgtggcctgttctctcaaaatttctatctcgtagagaataaaggcacactttgttccagcagctgtggtggtggtggtagagaaatactgtgaaggcaagcagaagcagaggggaggggtcgcatgtaaacacttacatggtctacagtgaaaactctctcatggtcccaaaacacagtgcacacagaacagaacccaggcaccttcagtttatgaactactcgccaacagaaagtctgttgtagatttcactaaaatgtaaagtcagctttccagacaaggtttatttatatcaaaaataatatttaaaagcagatttactgcttataattcgaactaaataataccgaaagacctattcttagatctctaagcattaagacaggttttatttaccataccttttgtcagtagccttcactgtcttaactccttcggtcagttgtcttcaaattaacctcagttagttatggtgaagaaaaaccatatacgtgaggcttatttcagaaattctggatatgtttataaagctccaataagttaacttgaaaaaagcaaataaaggacaacgtagaaatctgagaggtaaaaactgctgatggtgttagaagataaataccaggttctccatctcattttttgagatgtgggagaattaagaaaggagaggcggggaagggagggaattgttgttacaacaggatttgttgaaacctgaaagctaaaaatgcttttgtgtcactgtgtacagaggaggaattatttgggtgctcacaaaaaggccttcttttcttttaatataatgttttagtcacatagttataacttatttttgaaattttctctatgttgaaagatataatgtattattttatgtcctcagttcaagaatgtggtctgaaatatttttaacaatgtcgtgccttgcaaatgagagttgagactcccttttttccctggtattcttgacttgtctggaacctgaattcataaaattgttaattttcaaaataatcattcagaagaaagttttttaacatatgtatttttttcaataaaagaaaaaagaaaacccagcaacaacttttgactagaatctgatcactaaacctacaggtatttttgtgtgtgtggtgccctgagttttcttgttattgcttccacttagatttgtggagtataactatagagattcaggaaatgttatgaataaattacccaaaatgatgtgatgagacacatcagataagactgtgatcagatactgaggttgtagcccatgaataatggtacagatggatttcactgccatccttttgggttctcatttttttcttcctcagtaagttttattctacaagctataaattcatagccattatacagaaagaagataattttattattggatttttaaatttaacaactgttaataaccatgttagactttaatcatttctttaaaagtagtaaataaacaaacacatgtttcggttatctggattttttgttttggtttgttttaatcctaagttttgcattgagcaagatactctttttcctcttttctaagtctaacatctgtgggtttgcttttcagccatagtattgattacatgttaagtcttagctctctaagtcgttgtaagctttatgtgtactggctttgttctttgattttatttcatgggaaatacaaacaattcagtgcataaataaatactggaagaagttgagttgaattgcagacactaatagtcgcagcagtgtcattagtgctgcatccgaagacacctcaccagggccctccagcgtcctggcttgtttcgctggtcgccatggttgttagtgcagacataagctttgtgaggctgactgatggcagatggagggacccggctgctccccactctaacctctagcataaggaagctggctggaggataaatgggttaagcatgctttaatgtacatttaatgtacatttctattctcaaaacatgttgattatttttttgccttgatgaaaacaataatcctataaaatattaattgcctgctttagaaggaaaacttctgaactggaagcaactttcgttagctatagacctttaatgaaggcagaatttcttatataaaaaaggagctaggaaagtagaagtgtaaatagaaatatagtttatcaacattactatccacttctgatgtggacattaaagggatattaatcttttaagtccagagactctcctaggtaagtcttatgacccctcagcttaaatctcttgcccagccctctcccctgaactcccaagttgtgtttctgtctgctgacttggcgtcactgatggatagctcagacctgtcatggcacaaaactgaattcctgaccattcccaaactgttctccccacggtcttcccaggttcattagtggcaaatccttccttccatttggccgcctgagatcttaaaagtaatccctgattccatacccaacatcccttgagtcaacaagttgttttgtttctgacttcagactagaacaagaaccttccacctctgagctcctcttctgcttccactgtagcgcaagacctctgaggtagaagttcagccccacagggcaagcacttctctctgtttcgttcatcactgattctcctgtgccaggatcagtgcctggcacatagtagggatacaataaatatttgcccaatgaatgaattcagaaactgactttaagtatataatgttaaactataaattgcacttgaatgattaaaaatacaattttatttctaagcaggactagaattttaagtaattttggaactctagtttgtcatcttgctaataacattatctaccatttataacctgctttccatatgccaggtactgtttaaggtgctataatacttaattctcaagacaaacctagcagataagaagaattttatagacaagaaaactggccgggcgtggtggctcacacctgtaatcccaacactttgggaggctgaggcaggcggatcgcctgaggtcaggaattcaagagcagcctggccaacatggtgaaaccttgcctctactaaaaatacaaaaattagccaggcgtagtggcacatgccattagccccagcttctcgggaggctgaggcaagagaatcgcttgaacccagcagacggaagttgcattgagccaagatcgtgtcatagcactccagcctgggtgacagagcgagactccatctcaaaaaaaaaaaaaaagaaaagaaaagaaaagaaaactaagctacagagaagtaacttttgactaaggccataaaatgagtaaattgcaggaatggggttgagtcccaaaacaatgatttttgaaaccctgacatactacatagcattgccccacctctaattagaaaagagcatatttgtaagtcctacctctcttggtagtttataagctatggaaacaaattaacccagaaatctctgtagctttacatatcagcatttacttctcagtcctgcaaagtccactgtgggttgagtgattgcagtccatctttcttctttagaatgttttcatttatcttttttttttttttaattttttaattttttttcttttttcttttttttttttttaattgatcattcttgggtgtttctcgcagagggggatttggcagggtcataggacaatagtggagggaaggtcagcagataaacaagtgaacaaaggtctctggttttcctaggcagaggaccctgcggccttccgcagtgtttgtgtccctgggtacttgagattagggagtggtgatgactcttagcaagcatgctgccttcaagcatctgtttaacaaagcacatcttgcaccgcccttaatccacttaaccctgagtggacacagcacatgtttcagagagcaccgggttgggggtaaggtcacagatcatgttttcatttatctttaagcagaaattactttagcttcccttagtgtgtggtgttgcttagtgatgttaatctggatgttcaggtaggcttttattgtctttctgaaagaatcagtaatttaactgagtattttggaaataacaataccacaccttttcatagagcttaacagtttataaagcattgcactccatcttctcatcactggatcacagtaacaggcttatgagagagacctctaccctaatcaaagaagcctggggatcagggttaaggggaaacactttggtggctgacattttcttcaagaaggagtttgaaggccaccactagaggcagtgtgaaccatcagagtgtttttttgtggtggaatttgtggtttaagagcacttggctatggtgtggaggatttaaagagatcagaattggagacagacagactctgggaggctgtggtaatgggagcgattaaatggaaataactagatgagtagagatattgcataggaaatggattcaagataaagggtgttcataaattctggaaatataattaaatatatataatgtagtcaagggcatcttcggtctgtaaaaagaacccaaaatttcctgtctacattttgaaaacaaatttgtagaaggggctttgggcttgtattggtttcagatgtttcagtggacaaattacagaaaaatctaacagtagactaaactataaggactcattgtttgaaagtcagtactgttcaaggttagttctgcaatttaaaactcttcttaagtattccagctcattctgtttttctgttccttcaaactgaacttttcttggctgtgtgaaggttgattatacaaattaggtcattcttgtcttacccaactaaatcagagtcaaggggccaggaggaaaaagcactcagggcacatagcactgtcgcacctgctccaaaatttacactttctataagcctagctgctgaaatggcctgctgtaacaccaagaccagttttagctagtagctgctgggaccacctactgtgactctaagactggttttacctgctgtcgtcactcaccaatcagagcttgtccacacccaaaagcttctctagtgccaatgagctttctttcaaaacaacacataacatttctctaataaaactcccaaccttccttttgttctttggacatactgaagaccacctggtctgtgtgtaggccctaatttacaattcttgcttcccaaataaaacattgaatttggagatttgtctctatattttaggtttacttcaacagctatgagatggctgcctcagctgaccctttcatcaagaagcaccatattctacggccaggtgtggtggctcatgcccataatcccaacactttgggaggccaaggcaggtggattgcttgcggccagaagtttgagaccagcctggccaacatggtgaaacccagtctctattaaaaatacaaaaattggccgggtgtggtgccacccacctgtatttccagctactcaggaggctgagacacgagaattgcttgaacccaggaggtggaggttgcagtgagccgagatcatgccactgcactgcactccagcctgggcgatagagtgagactctgtctcaaaaaaaaaaaaaaaaaggcagcaaagtattctagagttctcttcccctctcccaccaccaccccagactatgctttaatgtctcactttccagaactggctcatttggtcattcttttttttttttttttttttttttttgagacggagtctcgctctgtcgcccaccctggagtgcagtggcacgatctcagctcactgcaagctccgcctcccaggctcacgccattctcctgcctcagcctcccaagtagcggggactacaggcggccgccaccacgcctggctaattttttgtattttttagtagagacggggtttcaccgtgttagccaggatggtctcgatctcctgacctcatgattcgcccgctttggccttccaaagtgctgggattacaggtgtgagccacagcgcccagcctcatttggtcattcttaactgtgagcgagactggggaagtttgtatctggcttttcatcccccctggtgagctgtatccagcagggactcaggctggctttgtgggtgtcacagggctctagctgcacttctagtgaatttaatctccaggatttgagttgactgtgtgatactttcccaagcaactaggattgttccccaaacctgtgattctcatttctgcccacacgagggctttggaaaagccccaagaggctcaggcccaacccagtggcttttatttaattttctgggatggagccccatccttgtatttttcaaatgctgtccatttaattctaatgaaaagttggggttctgaattttaaaaaaaatgttgtgatggttaacactgagtgtcaacttgattggattgaaggatacaaagtattgatcctgggtgtatctgtgagggtgttgtcaaaggagattaacatttgagtcagtgaggtggggaaggtagacccgccctcaatctgggtgggcaccatctaatcagctgccggctcagctagaatataagtgggcagaaaaatgtgaaaagagagactggcttagcctcccagcccacatcttttctcacgtgctggatgcttcctatcctcaaacattggactcccaagttcttcagttttggaacttggactggctctccttgcttctcagcctgcagatggcctattgtgggaccttgtgatcatgtgagttaatacttaataaactcttctttatatatatatttaatatttacatattatatattaaatatatattatatattatatataatatatatttatattatatataaatatatttaatatttatatttaataaactcatatatatatattccattagttctgtccctctagagaaccctaatacaaatgttttttcttctttgctttccattcaatcttgaaaataatgacagttcagagtaagataaaatagttacctgttccagccctacaaatttaaagtgatttgacctaatcctaaaataatgttcttcttctgtcccagccttaggaaattaacagtatcagctatgaatatacgaatgtactgaccaagcatcttcagtgtgatgtctagtccgtttgataattatggtttattatgaattactatatttgtatgcatgttctatttctcagtcttttaataatattactagcagcatttatcaagtgccttctgagtttgtttagattgagagcctctctgaggtcctgtcttctctctgagggacgggagttgctcaggacctgcagcgctggggtccagaccctggcagttgccaatgtgctgccacacccatggcccggctgggcagcctcgaagctgcctcaggcagctcctgccacatccacaaacccaagcgggagcacagcccgggacaggaaacacagggcacgtccagatgctgctgcttcacagacaccaagggcgtggtttgtggaaaaggcctagttttaggaaggtcttttccctctgatcatccaggaactccagattaaatgtaacagaaaacctttatacaacaattgtcagttcttgttccatttgtgctttcttgaggattacacgtgcatctccctgaaattgtttaatctcttgggaccaagagacactgactcatcttgttgttgttattactaataggtgtaatttacatacatacatatgtacatttacataatttacacagtaaaaaaactcttcatccccctcaccacatttcttagtcttatttctcttgtgatctgagtttgctgtcattctcttggcctcagttcttcctaccacatctgctctgagaggaaacactatgtgactgtttaaaatctgttctttttttatgatcccaagaagaaagagaaaaaaacaaagatctgtaggaagaaaaaagggtgaggacagaacttctgcagaaataaatattgttacaataacacaaattgtaaactttaggataggtactgaccgtgtagttgatctttattgaaccagttggtttgaaatacttagaatgctgtcagctttaaggttttacagtggaaattctttccttaaattggcttttggacatggatcacaggtagagtgaaccaattccagaaaatgtgatctacattcacatttgtcagtattttctttttctatgacatgcataattatcatatcacaggcatcagtgacttgctgcctctacctgggattctccttacctgggaaagttgtaacctcgaggcccgtgatgtcctaaagtggactgtcattagcttggtggaggtacttgaagagcaagcagacactggagggtggggaaaccaagcatccggaggcactcatcttgctccgttgttttacccgacagtgaagtggctctcccaagcccctgtcctcctgcgttccattttgtggtgcctatagcctgcaagatgccatatgcttcctgttcccaaccacccaggtctgcccgtgatcatcccacttcgaactttgaatccttcttatatgttgttctttaaagtcttactgattattccctgtggtcttttttttttttttcactagcccttctgttgtcttaagttatggctgtgtcttggctatttacatagtaacttcctcatcattttttcatctccactatcttgtcctctaatggtcttgaacaccgtgagagtgttgaatgaagacccttttgtagacagtggccagcattgtttctgtgtctgtgcatgtggtcgtgacttagcttttgggcatatgataatcatcaggaactgagttgtacgtctcttcagtgtcctctgtatatcatgttgattacagttctcagttgtaatatctaatatctaagatttaagatttaatatctccttagcccgggtcccttgtgagttccaagtgctgctctgagctgataaccagtcacgtcctagacaccctggcctggaaactaggacatctgcctcgggcctgttatggccaaggctgctaacactgagaaacagtcttagcttgttacagcgttgacgtatagggttagaaaggcaaatatttaaattcattttaaatcctttcatttgaaattttagtaggtcattttggtatactgatggactgagtttggaaaaggctggcggcattaaactagaatattttaagtacttctgatgcctttgtactgatttcttttttgtaatcaaacccattaatagacttaaaactcaaggaagaaaaaataatacttgtaattttaaataagcattcaattataagtaaaaaacatttttgtattcgttaccatagttaccaagcagctttcctatagttctagaaaaaaatgggctccatcattcagagtaattctgaaaggtgcctttgggggaaagggagaggaaggggtggtacaggagaggtcctggccgtcccagaagcaggagacataactggaagagctttgttgacgctgagttttacagaatctcccactaaatagtaactgcatttgtgaggggaattctcttttagccgtgacataatataagccaacttaacagagtattggaattgtattcaaactttagaagtcgacgctatagtttacatggggtactactatatttgttcagggttttaaaactttatttaaatcaagcaaaagttagacacttcctgtatttgcaaataccaactatatctcaaaggaatgaaatcaggcaaataaagatgaggccaaaatttaaaatctaaggaagctgaaagtggcagtttctgtactggaagagagtgcatctatctctgtatttgtgcttttggtcttaatagtttgtaagccttatgtagagttttgataatatttcatggttttaggcctaggcagggattagattttatctcagattttgctaagagtatttcttctggagactagcaggctgctagtaagaattgatagaattggctctttgtcactgggagaactggagttgaagggttacaggagatgagtcctggagaacgggaggcagggacaagggtgccaggaagctcaggggatgaaagggaaatggagagtccagtgagagaaggctggcgaggtgtagagagtggccagacacatgcctgacagttgggaccacttctctatacaaatcaggaggaggcgaggtaggcaggatagttcagagtttgtgggaaggaacctgacatctgaagtcagtggagtgtgtcttgggctgctgcctgcactctgccattcatagatcaggtcttctttttccttccccagaactgccctgagctgaaaccacctttcttctctccctatagcagtacatctaccccacctacaccctgcatccactccacagccccttgtcttcttcagtccctctttccctgatgaccacagacctctccaagctgggcactgttctatggtgcgttttgttaaagtctaagggaagtcctgtaggaagaggtagttgttactaaacttgaggaaacatgaaacaacatatagcacacaattcaaaaaacttactaaaatttattaagagcatttgacatcttagttaagtcactgttcataactactgttccaccatagaatcttcacaagaacagcctgctggacttcacaagaaggctgatggatgttgggggtgggcatttggggtgtggaaaggccgcttggcacattctcagcatgcgccagcccacaccgccccttaccaccaaagccttctatttcccattccatccagtaggagcagctgtagctgacctgaaaccttcggggacaggctcattgattgtttaaatagggaggtgcaagctctcaggggtccggggccttgatgacacagctcaggcaccacaggcacctcccacaagcgcgtcaggctgtgtgaggctgagcacagcttattttcactttcttgtccataaagtctcacatcatattcagttgttttccttctaccctaaaagaaacacaaccagaaaagccagtctcccattttcatctgtttaaggaattatgtagccacaaggatctttagaagcaagtcctcttaggagaaaatgacaacctctatgggatttcaacaatggagttccttttgaaaagcagtggtgcagcccacacctcctaaattgccgtactttcttcgccttttgttgagtctgtatgagatcctcattaacaagtttaacaattcctggagactgaggcttttgtcaattatgacgagacttcccatttcctagaccatggtctccgttagcatttttgtgtgtgtagttactgttttgaatccatttccctctgtctttaaatgtttttcctttggtatttgaatttgtccttgtgaatcaccatgagtccatttttggaacaaatcagggtataaatctcttataagatatgcctgaaaagttttatcttctgacaattaaagaatctccacagctggcagtagcttaaacactatcaaacagtgacattttttgatggtttccattttcaatttcagtcctgcctatgcctttcggggcatttaaaattgctactagaaagttctgtggcttttcagactacactcatgaattcagtccagctgattaatcagtgtctaccgaaaataagtggtgtctctatctgggaagtttagcactgagtggtccctgggggcctgtctgccatctctctgtgtcttgaagctgctgctgcggcttatttttttcctcattcaaaaactaaaatattctaatgccatctattatctgctgactgactttaatgatttggattgatttttaagccattgtgaaactgtgttttaaaattaagtgaccatcaagcacaggtctggtggatgtcattagagaacaggtgcagccggctgatttctccatgtcatttgcgaatccagaatgtaccatcttccatgcctagagatgaaaccgaagtacgtggaaaggtctgtttatgaaaacaggctgttgacagcccatcctcctgttttacaaggatgagttgattgatcacactatgccacatatcatgccacagaatgataatatgtttgcttacaacgaaggtggacgtgggcgtggtgcacttcactcccttgatacagcccaagatagagcagccattcaagctggtggaaaaagtggttcagaatgtatttcagttccgaaggaaatactgccatcgagggctcaggtaagaatgccttttcttctcttcagttgcagtctttataaaatcctcaggcactttttaagagtgagaaccttgtttgctctattcttaaagctctgagtattacacttagttcaggcctgtgacggacaagacttcactgccaatgaggagagagcaaagacttgctagacctcaggtggcctctctcagggtggcttaaacataagcgcagcctggagttggtgactgcacagctcacagaggctctgtaccagggagctcgtggttccccagtgaggactcaagacagataataatgggttttttaaatgcttgctttctaccgagttgccctatctcttctttaaggacacacttgagaactaggaagcaaatatgacttctgagcagccaaaatcatatcacgaagtcctcacgtaagcacgtttccatctcacagaaagctgctgctgccaagaggctctcaggaatcactgggaaaacctgacagggcctggtggtctagaggtcgcccacctcgatgggctctgaaggaccacagccttgttgcagatccagaaagagccaagaagctgtttagttaagcccagtgatagtctgcttaagaaggcaggaaagtgtatttgtaaaagatttccatctacgataatctatccatagtccgctgtttaaagaggctcggcgtgagaggcacatatttctcattttctaaaacctcctcacatggcttcattgtaattctctctttcacaaggtccgaagtgtccctttagcatatgaaatgacagcagattattttaggggccagctgggcatcagctcctaagagtgctgcagtccacaaagcccattgctgaggatgccagatggcagaagctggagcctcagcctgccacttgttgcctctaattaagccagaattcccaccttaccagatagttcctgcttctctagcagagacttaaggtgcagagctggtgacagagatgccactggccagccattttggctgcagcccccagctactgtgcactgctggtgagtgaaacagaagctggattttggctcacacttacccctcacgcagagcaggacccacacagctgtacctgatagccctgattcatgggggaggagggagcacaaaactatgtccttttatgtgcttttggaaatcctggaattggtctgagcctagagctggcactagcgtttccaaggcaaccccccagctaagtgaagggccctattcatttcagatacaccatcctcaggacagacatggaccagatactgtgccacccagggtaacaggtcaaaggactttgacttattggtgttcttcagatattagaaactgccatcatcaggccctctttgccatgaaactgaactcaaagatctgtcacctcaccctgaaagtgtgggggacatgcaattccttgttgaaaggaccatcagcctataagcaacatgctatctatctcccctggccatgacaccttccaagccccttgggatgagctctgtaagagccctgagacttgaagaaaaatgcaatccaggcctaactccgcagcatttcaagcagttctgctattcattttaaaacaatggttcaatttggatagatgaaatttaaaatatatcctctacttcaaatcagttttaaagatgcttgaaaaataacaagaggaataattatattttcctatcagctattttcaaacttttagcaaaaaaaagtaactcttttagcgtgaagagttctaaaggctgatacattcaaattctagagaatcaaaactgatgatttgtcacacaagaaataatacaactttcacattgaaacatgaggcacatcaagcttatgtttctacaagaatgcagctgagcagatgttactttaaacttacttacttacctttaaaaagtacatgtactgatttagctttggagaatgctttcccattgtgtgcttgcctcgcgcctcaggttagagctgcctcagtggcgggccgtgcctcttatctggtgctatataatccaagaggctcctgccactctctccagctgtcagtagccagcaactgtgttgtgttgttttcaaatgagggttaaaaagtgtcatgatttgcagaatttaagtaaaattcttatttttctgtctgtctgtcttcccctcagaatgttattccctgaagcgcagcgcttggaaagcacgggcaggctgttagagttggcagacatagaccctactcttcggccccgccagctctccatctcacactttaagagcctctgtgatgtatacagaaaaatgtgtgatgaagacccacaactctttgcatataatttcagagaagaactcaagcgaagaaaaagcaaaaatgaagaaaaagaagaggatgacgcagagaattacagactctagctgctgcctgggggcgagcagcctaccagatgtcgatttgcactacgtggagcttcttatataggtactcttttgtctttacagaatgacgatacaaatgccaatgaccagatgtgacttattttccttttactatacagcttggcagagaaaataaatatcatcaaataagatacagtacaagctttcttttaatatatactgtatagatagttatgacatgtttagtataaacagcatctattacaatctatcttacaaaaatgaagtatctgcacattttgcccctaaaccacattaaaataacttaaatatgctttaaataaagcaaaaactaacaaacagctgaaagaaaatgcccagaggattttaaaaaatggccctttgaaaactattaatcacgacttccccagccttactttttccacataacttaattattagaatgtaattttaaggatcctaaatcatttgatacctgctcaaagtggatataaactaagtaatttacagattctgaccagtttcatctaggtttctgatccacaataaattaaaataacttaaatctttacaaccattttgtgggaaaatgtatactgcacaaaacccaggaatgaacagtttttttttttttttttttttgcaatttccactttaccaccagtttaaaagtaaaatgaggaatttaacccatatctggattgaatcatactatgattttccgtggctctctgtttcataaaaacactcctcactgacaacagatgttaaactctggacactgaattctcgctctagaacagaatttaggtcgatggtggcattttcagactgactgtcaagggactggtgacggatctgcgccttgagcaaagttcctctgtccctcttggtgctgttggcttttcgtttaatggggcagaagtgcccccggaccagtttgggctgctctcctcctttctgaccctcacccgactccgggccaggctgctgctcagcctcggggtgaacgtctgggtcctcggaaatcctcagtctctggaactgaatttcgatgtctttagtagggctgccctgcttcacagtctgacggtggtcatcatcttcatcgctcaggatgtcactctctttgatgagattgtcggcaaaatctgccaagccggggtgtgggtatttcccgggagaagtgctcttggagtcctgcctgccctcagccgtggggcagccgctgctctgggtgccgctgctcaagctgccctcgtcagagtccagcaaggttcccttgccagtctcaccggtccactcgttgctggaggaattcttcaggacttttaaagacctggatgaagctacagtgagaaaaacacatttcgctgtgatacagaaacaggttacacaatgtgtaatgtttgcctcaaagcttgtgtaagatttaacattaagattttattttatgatatgacttcagttagcaactatcctggtaattaggcaaaaatgtagctactgaaaacatggacatttttgacttaggtttacagttgtaagttaggcaattcagcatttttagattaccagagctcaattatgtaaatagaactagacactagaaactactacatgggctaagattcttattttgccaaggagtaagttgaaaagttaattggtaataataaatctaggctcctttctttca

SEQ ID NO: 15852 - DNA, 39417 bp, Homo sapiens
tttagtgtttcaactccactgattatcaagtggcttgaaaatatttcctgtagagatggaccttttgtttatggcagaactcagatgactttgacttttcaaaaggaagtggcagaggtaagttttaacattttgtgactattttatcacatgttcaaattccaaagcaaaataataatactgcatttttaccacagtctgtgttttctaagttaatatcttattacacacacaagaacccagcagcagctcagccaaaagttaaaactttgatgatgatgacagatgtaactgctgtgggcttctgggaaaacatgaatgatgtatgttagccaaggaggtagtgtggtaaacacagggatgcaacagccatcgatgccactggagaaagacaaaagtgatgccctgttggccatacccaggattggcacgtgataccttaaaattgatcctttaggcttaatggcatggcagttaaagaatatgataattggccgggcatggtgactcatgcctgtaattccagcactttgggaggccgaggcaggcggatcacgaggtcaggagtttgaaaccagcctggccaacatggtgaaaccccgtctctactaaaaatacaaaaaaaaaaaaaaaaaaaaaaaaattagctgggtgtggtggggggtgcctgtaatcccagctactcaggaggctgagccaggagaattgcttgaacctgggaggcggaggttgcagtgagcaaagatcgtgccactgcactccagcttgggtaacagagcaagactctgtctcggcggggcatgcgggaagaatgtgataatcaatttggagctgagaaagagaaggggattgagggtctcattattcagtatataaattgtacttcctccctcacctcagtgaagtctgctatgcctgcattcccatggcagaagtgttctgggttcactctagaaagtaaaccctccagggtaagcaggggtggtgcttgagctgcaaaggtataaggacggatgtgcagactcttaagtggttttttaaaaaaattttattatgacatataagtacaagagtatacagccatcccttggtatccataggggattgattccagaacccccacaaataccaaaatctacaagtgctcaagtccctgatgtcaaacagtgtagtatttgcatataacctgtgcatatcatcccatatactttaaatcatctctacattatttgtaatacctaagacagtataaatgttttataaatagttgttacactgtattatttgaggaataatgataagggaaaaatctgtacatgttcagtacagatgcaaccatccttttttattccctgaatatttttgatctgggattggttggatccatggatatggaacccacagatactgacggatgactgtataatgtacatggatgacttaataaagggcactcctgaatccccatgtacatggatgacttaataaagggaactcctgaatccccacccccaacatgggtaattaaatcactagtacctttgagaccccattgtattccttactctgattgcatctcctttccatcccatgctagtaaggtgatcactactgtgaattttggatttattcccttgcatagtcttatcacacagatttatattcctatgatgaatacactttagttttgtccttttttttttttggacagagtctcactctgtcacccaggctggagtgcagtggcacgatcttggctcactgcaagctccgtctcccgggttcacgccattctcctgcctcagcctcccgagtagctgggactacaggcgcccgccaccacgcccggctaattttttgtatttttagtagagacggggtttcaccatgttagccaggatggtctccatctcctgacctcgtgatccacccgcctcagcctcccaaagtgctgggattacaggcgtgagccactgcgcccagcccagttttgtccacttttgacaactgggtttatataatgtgtattcatatagtatgtattgtttttatcctgaacattctttgtaggattcactgacgttgcttatgactgtagtttatttaggtagctatatatactacccactatttgactgtgtaagatccttatctattcattctcatgttggtggaccatgaattagtttcatcgttctgtttttacaaacaaaactgttgtaaacatcccatactgtgtcagttggggcacatgggcaacatttctctagggtatttacctgggagtggaactgcaaatcttcaccactgcatagataatgctaagttgatctctgaaatcatcacgcctgtttatattcccaccagcagtgtgtatgagttcattttgctccatattcttgccagtactcactattgccagacttgtacatttttattaatctcagggtaatggaatgtcattgtgttttcttttgtccttgctggtttgtagcaaaatggggcactattgtgtgtttactggcctttttgagttccttgtttttagtgcatgctttttgctcacctttcttttgggttgcttatctttttcctactgatctggaggagttctcacatactctttaatactcttcatactagtccttagttaaatgtgttgagcatttcttctactctattgcatgttgttattttctttttatggtgtcttttgaagagcaagcattcttaattttaaatttatgtctagtgctttttgtgttttgttgaggaaacacttttatcttgagttcatgaagatattcttctgttatcttctagaagctttatgtttacctttcacatttatatctatagtccactcgggtttgatctctgtgtatagtgaagtagaagcaattttactatttttaacatatgggtcccaactaacctagctccatttactcacaagtcagccctcgttgatccctgtcagcacctctgtcagcattggtctggttagatacatcatataagcattggtctgattagaaacatcaagaaaaaaatgacatgaaatccaggaagcagagggctccctacaggacagagagaaaggagtcctcaggaagaacaaccagtccagattggagccaattaaaaggggaatttgataaaactactgtcaagtttgcatagagtcaaaaaaaagttgcaaaaactcaggagagtttaagattgaattcatgataaataaatagaaaactaaatataacagggagtgaatcaagggaaatataccattattggaatgagaagtacaaaaatattatttggagataaataattattttgaaaacctaagaaaaaatgagagacatatataaaaataactacaaaacctaactgagaatctcaaggtcactgagataaatccagaaaaatatcatagccccagaaggaaaaatgattattttaaagaagctgatttttccaagaattctgtatatctaattataatcctcaaagaacttatcttgaaatacgcagttctaaggatcatctggaggaatagacctgcaacaatacataagaaatgttgaaaagggagagtgatgagaaaagacttccttgtcatatgctaaaatgtatggtgaagctttaataattaaagcagtatgagaagcagcacgtgacagagcaattactagactagaaagcccgatgcagacaccttagcagtatctgataatggtcagatcaaaaatcagcagtgaaggaaagaattaagtaaatgcatggatatttggttaactattatgaaaaaaaattatctctaaattccatttgggtctttggatcttctctttctgtcctcattacattcatgccttccttggcatttttctatgtatgtatgtatgtatgatatttaaagtagatgttttggccaggcgtgctggctcacacctgtaatctcaacactttgggaggctaaggtgggaggattgcttgagcccagagttcgagaccagcctgggtaacatagctccctatgttaccttgtctctacaaaaaataaataaaaaattagccaggtccggtgctgcatgcctgtggtctcgactactcaggaggctgaggtgggaggatcacctgagcccaggagatcaaattacagtgagccgtgatcatgtcactgcactccagcctgggcggcagagcaagaccctgtctcaaaaaattgaacaaataagtagctgttttaagatccttgcctgctaatttcattacctctatcatttctgtactcttttagtgattgatttccccttcttgctataggttgcatttttctgtttctttgaaagcctgataatttctgacaaaacatcaggtattgtgagagttttattttttttaatgctgatgagggctggattttgtggtattgggttgagtgttgggtttgttgtgacacatagataagattgcttgaggcttttattgttctggtggatccagggtagcttttaatttggggctcgttgagccccagtactacatcatgccctttctgaggaaggcacccaacgccctgcatgttacaaggcctcttgagccatgtgagccccagttgctcctgccttcccctggttctagttcaggctcccaagcctcaggcacctgcagatcagtgctcagcaggggacttgggggacccttgggacccttttgctacctcaggagctctgcctcacattctctctccctctcctgttcctgtctcccccacccgctgctcctgcacacgtgtgagcaccgcgtgtgtgcgttttccatgtctctggtagtctgccccacaaattctgcctgccgaggcctcccagatctccaggtctggctccctgagcccaggagacctctaggctcagtttgagctgccccctgcctctgctgcagcctgagaagggcctccagtcctcttcaggccgggcatctaaggctcatctcctttccatttcagtaatgacagtcctgctccacctgttgtcctgtttatgcaaactcttgtttcctatgacttattcagctttatacttgtttcagaacaaaactttttaatgccagaatttgtttgaaatcaatagactctactactacataagcttaattctttaaatgccttcctctcagataatttgagtgtatcataagaatttcatttcttagatctatccctctctttttacccttgtttctgtttaggggaatcatttccaacaagggcacttttgccttatctgctcctcaggggcatttggcaatgtctgacatgtttttggttgtcacaccagggagggggctctggtctctagtggatagaaggttagggatgctgggaagcattcttcagtgcacagcagagcctcccacagcgaagaaccacccaacattaatcagcccaagatgtcagtcatgccaaggttggaaaactttcctttagatgatttggccataaaatctttctctcaggagtcttggaacttcccatcataaaaacgtaggaccgttgcatgtttgttaggaaccctgagatgatatcaccacttttcttaaggtctttgtcatttcctcttcatgaacctgctaattctcttgggttggtttgaattgggcccatgctgagttttctttgttgtttttctcaacctttggatatgttggttctgacagaaaccattcttgtttcctctgcacttatacaacttctgacaccagatgtgtgggttttttccacaccaagcaatctccaattctccgaacaccagctgggtatcctgcagtttcattcaattctgacactgtccacatgtttttagtgttagatcccacaagttaagggccaagtcccacaagactgcgcctcacttcagatgacagtcacaaatctgggcctctaggagttctgagcgaccagctataaaataaatcagagggttccatgtccccctcctcagattgaatcatttttcagaatggctcaaaaactcagggaaacaccttacctacacttgagtaatgggtaatcaattggtctcagtgaccagccccatcttgagctacctagaggcctcatcctaagttatctcattactgtaaactctgggggacttgtgaatttaaagcaagacatgccgattactcaggaaatttcaagggctttaggagccagcgacaaagtccaaatatatttcttattaaaccacatctgtggatttatttttctcagccgacatgattattttggtatttctgctcttgaataacacaatagagatacaaaatactatgtactctatttgtgtggggggaaacacaaagaaacagaggcttaagaagaggtggagtaatattttcggtgactcagcatgtcagttgtggttattaataatagtgttgcttcgacttcaccatatgcaattctttttctttaacaaaaaaagttgattttagttcaattttagcatgaatattgagaagagtttatatagagtctataatttatggaatgccttagaagtctaggtaacactggtcctctgattttcacattttgcaagtgaaagtttcagtgggagaatatatatatactatattagtccattcttttcttttttttttttttttttttttgaggccgagtctcgccgctctgtcacccaggctggagtgcagtggtgccatctcggctcgctgcaagccccgcctcccgggttcatgccattcaactgcctcagcctcccaagtagctgggactacaggcgcccaccaccacgcctggctaattttttgcatttttagtagagacggggtttcaccatgttagccaggatggtctcgatctcctgacctcgtgatccacacgcctcagcctcctaaagtgctgggattacaggcgtgagccaccacgcccagcccctatgttagtccattctatgcactgctataaagagatacctgagactgggtaatttattttaaaaaaaaggtttaattggctcacatttctgcaactctacaggaagcatggctggggaagcctcaggaaacttataatcatggcagaaggcaaaggggaagcaggcatggtttatgtggctggagcagtaggaagagagtggggaggtgctacacactttacaacaagcagttctcatgagaactcactcactgtcgtgcaagagggaaatctgcccccttgatccaatcacctttcaccaggcccctcctccaacattggggattacaatttggcgagatttgggcagggacagtaattcgcaccatttcatatagcagcattttcttatatgccatttactcttgacatggctgtatatgtaattttgtattttagccacaggaagctctttttaacatttactttgattggctttgttaattacaaaacagaaataaatgagcaccgtcgtcttattcctgtctctagcactacaggatctaagtgtaagaattcagctcatatgcattaagggacatatagacaatatgaagttacagttcataaaatataatcagactgttaagcagtaagtgagaactaatcccatctaacctcattttattaatataaatgatgaactgaggctcaaaaggtttaatgccttccagaaggtcatggagtagttacagggaaggctgaacttgagtacaggtagtgtgttttctgctaaagtcatgatgtgcaagttctcgatgctgctggccctgtgttcttttctttctgggtccagcatcagcctctttttctcccaccatctccagaggaccctggctgttgatgagcacatcccaagcagggagggagtcaccctctccattaattaccttacatagttctcattgtccctgatatatggctgtgtagcttctcaagtgtaagcctaatttttctccttgtacttaaaattattttagattaataagaaaaaaaaaaccactgtccttgtaaattctttgaccccttgtttttctcatactccatcaaaatgctttttaaaagctcaagggttagaggtttccttttaaagaaaaattaactagtttggtttcctgaccttttgttgctaaaatcatctatcttgtaatggatgttgaatttttatagctttcccaatagtacatctatcacagaaacagtaatgtatatttgaggttgatagaacatttcagttttatgctagctttgaatgaaatcttttgtagagctttctggtctgtgatttgaatttttccttaatgagttagggacagctatgtgtgctgcttttttctaaattgaaatatatgattcgcatgttttcatctctacagcctggggatatatgctacaaagattgaattgaatgggtcaggttaatggattgggacacatattcccctgacgtttctggatgtgttctaagtgaaatatacttaaatacttaaataagatcttttttgaattgtgccagttggatattaaaatttgcaatgcattttgaatttttgaattttctgccagtagtaagattaagctccttttttactttatgaagaactagaaatatttttgaccacttgatccataagcttattctttaacttaaatctctacttctgtcattttttgtagctgtatgagagtatatgtgtcttggttttacattttagtaagaaagattatattttgtcttacatgctatagtaactcatcacttatcttgagtacggcatcccaataatttcaactctccaaacagacaagagccagacagtttaaaataaaaaggtcatggggaagaggtatgagatgaaaggttggctttgagtacaatctataactttgcccataggaagtttcttccatatctcacacagaacctattttttaatcttccttaaggcaaagctctaataaggtaaattatatggttttcatccacggcaggctacaagcagcaaaggaaaagaagtgattagactatgtgtgtgcattgcagtgaagcgggaaagagcaaacccagcagctgcaaaccagctcagaaagcactgtgtcttttactgttgagcagtggggccccctgcctgcctacctagccccaggattattccagtaatcattggtgtttgtaatgttgcccctgaatcattcagaagagggttagaatgtcctttgagctcttaagaacacagagaggcaagatacattttagaaagataagcatccctaaatttttttacccaccactcagctctgttcaattttaatatattgccatatttttatatcttttttaaagaaataaaatattgttgatatgtttggagccctcttctatcccctttctttcccttctatgagttgtactatcttaaactttcgtcatcattatttccatacatattttatccttacattgcagataaatacaccacacacacatacacacacacacacacacacacactcagagtaaatgataggagtagtcttttcaagattttatacaaatagcattatactgtacaaattttctgtgacttgattattttttattccattttgggattcaatctcgtattccattatcagaattatcacagtttattttttcgttcacatgttgatttttattatttttttcatttcttgacattacacataataccataatgaacatttttatacctatcgcccgtgtaagtatgtatgtacgctgtgctctaggatatgttcttagagacctagagggtcatgaggttttacacagcttcagctctactgtatattgccaaattatgctacaaatgcttgtacagatttcctctctcactagcagtatctgaaagttcctatagctgcagatatcctccaatatcaggttctgttaggttttttttttaattgttcatttcatgtgtatgaaattatatgtaatgttctaatttgcatattcctactttgtactgtggtggagcatagtttatattatggtttatttggatttctcttatgtgagttgccttatatattctattagctatttatcttatgattattgatgtacaggaatttcatctgtattctgaacactataaatttcaaatactttctcttagtctgtgacttacaaacatttataatgttttattatacagaaattaaaaattttaataaagtacagtagtttttgttgttattgttgttgaggagggcgtcttgctctgttgcccaggctgatcttgaactcctggcctctggcagtccacctgttttggcttcccaaagcactggaattacaggcatgagccactgttcccagccaagatcaaaaaaatatatatatatgtatatatacatatatatatacacacacacacatatatgcacacatatatacacatatatatacacacatatatacacacatatacatatacacatgtatatatatacatatatatacacacatatatacacatgtatatatatacatatatatacacacatatatatacacacatatatatacacacacatatatatatattttgtccccaaagcaaagctatataagaaaagacatacatagatacatatattttagaaagatgtatatacatacatatatacatatatgtgtgtgtgtctgtctgtctgtcttttcttatatagctctgcttttacatctttaggaaattcttccctaccatggaagtcatagatatttgcttataaaaattttaaaattttgcttttcacttattgttaatttgcttagagtttttttggttatggcatgagataaggacctactgttttctcctatggatatctaattacaccggtgtcacttaccgaatgatccttccttttctgttagcagttgctacatcgcatctatcgtgtgttaaatatctaatgtgcttgggtctgtttctgaggcatttgttttattgatctgtctgggcctgcatcaatttgatgtctggtagggtgagctcccctatcattgttggtattcttcaggagcgtcctggccattcttggccttatataaattttacatggaatttaaatatatatataatacatatggaaattaatttttaaaatcttgttggacttttaattgaaattgcattgcatttatgaattaattgaaatatacctaattaattgcaaaacaaaaatgtttgagtgtttaaaagaataaattactaggttttacaaaaattatttgtcaagaacagccaatttcccaagggttctgaatactcaaggttttactatattaagtgaatttgaaaagcacaccatttaaaatgttcattcatatattggggtgattcagaaaattaagtgtttaagcatctttcatttttcattatgcttgctaatttcttcatcaagtatttattgattgcttgttttatgtaggaccttctgctatagaatataacagtggttcaaaaatcccaacagccattggtagagcaaatgttcttatttttgtagtgcattatatatgacataattcacatttcttaggtgtacctcagttgatgttggaggaaaatattccccatgtttgctgtgtgtcatgtgtcagatagcccattcttttcaaatttgcctcaaaaagtccacctagtgttcagaaataatggaatgttgactctttttcatctaatcaggctggactaattatttgctaaaattcatttttgtctctctctagagacttgcagccaatacaggaagcaaacagcgtagtcgcctctctgttatggctcagtacctctgcaatgttcgacacatctttacgattccaggacaagcttttgtccccaaaccagaggtaagtttctgcttatttgttgtagtatatcggaattaggacgtttgttcccctgaggatgtgtcataggaaataacctctaggatctaacctttgtttatgtgcaaactgacactgtactttacttctgaataagaaccacaaaaatcgtaatatgaatagctagttcttactataattgttctccttaggtagggtgactaaatgtttaggttcatgcatgttatcctggtggcagtatcattcatcatcttcatcttcatgatgttactcttaaagtatccctgtatggaagataagttacacggtcacccaatatttgagaaaagaaataaaatacttttgtgttttctgttagagacctctaactaaagctacatcaaacattatttacttaacacttttttgggagaccttattatggtagtgttatttgtggtaaatcatctgtggaagaaacagttggatattaaactaggctttgatattatatgctagttatgtgagtaagtgctagttacagaaacagagtttctctgccaaaaattaaaattaaaaaaaccgttgtctgttttagcaaaaccactgcttggtgagttattacaagatgtgtactattaaaaactcatctttttcttcagtgaatgtatattgagcatttactgtttgaaaatgcgttgggtagcaaggggagtctacagggatatgagcctaatccgatacagagtctgccttcagggagttcacagcctcatgaggaatagaaatttctcactggtccctaaaactctcaaatataaggtcttgcagagtgtcccttgcatcatgtatccttcataaataacaagagatagcatggaaaaaaatgcattatgtgactatagatttagatatagattctagatttagaatggagaccctaaccaatagtgttagatctacttgtctgtcttgaagacgcctaagtgatctccatgctctttgctgccaccttcatacttctttgccatttggccagttagctgagcgttcaggtgactaggaagtcaggccatcttccccttacgtaacagacataattgtcagctttttctaaatcgagctcagggagcttgctatcggtgccacctcccttcagcatctcagacttcagagacattgcgaatgacttctcctagaataattagatccaagacagaatttgatgactggaggtatcttataggttatcttcaaatttaaaacatttgtgctttcagggactttctctcctagtacaggtggccattataatgaaaaaaataaaaataaaaaaccagtgaccatgtagcttgatttcttcttgtcatgcacatgtgtgtgcatataacattttaaatagtgtaagactcattatatcaaaaaccaagatccttactcataggcctctatagttatggttatgaccattatccagaatctccaggctatttaagttttactaacgggttcttaggatagatattcgaatatttttagtggaagctttctaactctgttttagttacctagttgagattatttgatggagtttcgaagttattatccactttatctttgatttagtggtaaggtacatatgtagtttatcaattaaaatttaccttctctgggattaaggccacaagaaaatatttattatttggaaaaaagctagctatgtctttgattcctttttttattgagggatgtttacgttttggcaaattaaacattttcatagcaatttacttcactttttttattatattgtaactattacatacaggggatttatttgtaatccagaaaagcacttatcaaggacttgtaggtgtgcaccaccacaccggctattttttgtagtttttcatagagacaggattttgccatattggccaggctggtcttgaactcatggcctccagtgacctacccgctttggcctcccaaagtgccgggattacaggctaaattttagttctaaaagaattctctgctgctttgaagtagttttaccatattagggcaaagcagaaatgttctgaagaaagccagaaaatattttgctgacagttacattgagcaaatgttttaaaaattcattttcttgggccgggcacagtgactcatgcctgtaatcccagcactttgggaggccgaggtgggcggatcacgaggtcaggagatcgagaccatcctggctaacatggtgaaaccccgtctctactaaaaatacaaaaaattagccgggcatggtggtgggcgcctcaagtcccagctactcaggaggctgaggcaggagaatggcatgaacccgggaggcggagcttgcagcgaggcgagatggcaccactgcactccagcctgggtgacagagcgagactccatctcaaaaaaaaaaaaaattcattttctcaaataagaaagaggaagagtttttacagagatgataaactaattcaaggctagtactctaactaaaccttctgcatacaagaagagaaagtcctagacgcacataattgcaacacaaggtaagataagctaagcgctaaaaatagaggttgggcagattcctgggtggttgagagagggagattaatgctcagaagaaatttactaacattcattacttattctcaatcaaaactctaagaatcagatatagagaatttcttttgtgatacaatgaggggcttacttacaaccactttcgggattttttcctgtgagagtctgctgtcccttctgtttctcaatcttttaactaactcaatcaagctttaatggcagaactttcactaccattgaactattacaatcctgttctgactagttgaactgaattactgctgaactttactcttattaagctctctagtgtagttcccaaaatttgaacccaaaatactttgtgtctgcaaaacagacaacctctgaggttcttaaaattagactaattaattggtctactttagtgtctcttaaactattagagtctgtagtatgtagcttttaagttagaatttttttaattttgtgttttcatttcactgttaatgaaattatttacatttacaagacaatgtcttttgcaatgcaaattcagaactaaaattgttttcatgacagaatacaacctgtttcttaagtttctcaagctagcttttctctattagcctctgtagatccctgagaatccacatatttctggggttccacgcttaatcttttttttcagctactctgcacatttctcaagtttgggaaatactgagctattagctagatcctcaaaattctgtctttttttttatgaattatggtgataggcttcataatctaacatagttcgtaaagagtggaaaggctttttagttctcaacactatttttttttttttttttttttttttgagacagagtctcactctgccgcccaggctggagtgcagtggcacaatctcggctcactgcaacctccaccttctgggttcaaatgattctcctgcctcagccttccgagtagctgggattacaggcgcccgccatcatgccccgctaagttttgtatttttagtagagacgaggtttcaccatgttggccaagctggtctcgaactcctggcctcaggtgatccatccgcctcggcctcccaaagtgctgggattacaggcatgagccaccacgcccagccagttctcaacactattctctactctgacttagtagaaaaatcatttagttatattatgagagttgtaacgggttctttttaattgacactggtagaggcagtagacttccaagtaagctagacctgctggaattccagtactgctagttttgagagcttggtcgggttaataggctgagtttactacatccagatttgaccaataataccacccttgaaggacatttgtgaggaatagaaataatcaatgcagagtgcctaatatgagtatctggcagtgaatgctgccagtcaaagtagttgttattgttatgatataaacaaatatttatggactaagttgtagtattctgatataaaaataaggattataatttttaagctatatatagaatttatatttaatttttcctatttggaagtgtggtatatagaacaagttaccttcaaacatggtacacatttaaagcataaatagtgtccattaaattgtagatgaattaatgatatatccatgacatataaagaaaagattggaacttgagacatccactcttgacttttgaagagcgttttagaggcttccaaccctgcttgttcacagctattgaggccttgacctctgtgggagatagtcttgagtttggtgggtggatgggtccacagaagagacaactgtttttcatgcttttgtgttttttgaaatctgacattgaggatgttatttctgctgtatatttaccttgtattcaagaatcattttggtatgaggtcagaacactagtgttttcctacttaactaagactcttctgtctttggtttgtattctcctcctagaatcagattgagatgggattttcataaaggtgatgtattgacaagggccctcaggagaaggggcatgagggtagcaggaaagggcaggggaagagctaagtaaacatattgttcctcctggaggagcttcagcctagaaccacggcgggaggagaagctgtgtagcacaaattgccccacgcgtctgtgttcccttgaggcaagggaccagcttattggaacctgtgccagccagtctttgcagggagcagtggggcagtcacttcccagtagaggcagctccatctctgggagccattagcacccatcagtgccagcagctgggggtggctgccctggcccagtggaaggagcttggccaagacacagcatcctgtctagcttcctaccagtagacaaagctgtcagattacttacatggccacctctctgccgcagttgcttggaagttctaaactaagtttcatgtttaattgctttagcatgcttcaaccaggaacatttaatagcattttttctctcttctttttgtttgtaactttagtctttcatctttatcagttgtttttatacttattatacctgcaattttataagttgcctcaaattcttttttaaagcccttgagtccaaaataaaaataaatataaaccaaaagccatttttataattaaagtagtaccagagtcatcctccttaaaaatcaggtaaaatacgtgttgaatagagataagagtatttgctattacaattttaattcagtactaggcatgcttccataaactgctcaagaataaatggtaagtattctaaatccaaggagggaaaaaacaaaattgcatttttgcagacagtacttttatgtatgtataaaatgcaatgaaattaatacaaaagtaactggagataatgataataatgtgatagtgttctgcagaattataggctaggctaaaaatctcaaaagtcaagtaagttagtatttgctaaagtcatgtagctgacaatatagtgatgaaagacatatgagaaaacattgtccacatccaaaactgaacttctgtctaactaccctagtgggcctgccctccctgcacctcttattcactatgctgactaatggcatcatccacccaggtcatccaagcctaaaccttggaggtcatcttaagcaccacctccccagacctttacaactgctgaccctcagaactagtcagtcgttaaccagcttctgacattacctaaatttctcccaaacccatcccaattttgtacccaattcttctgacttaatttaagtctatcatttttgtcagaattactagatgaattcttcagtcatatgtatagatatacacgtgctccacaggttaaaaaaaaaaaaagtatgatatttttggtcttttgggttttgttttggtaactttttatcaaagaagaatgaataagtatattcgataaattagactatgatttctcaaactcagaactgttgacatttggggccagataattctttgttgccagagtctgtcctgtgcattgtaagatacataaaggcatccctggcctcttcctactagattccagtagcactacctcagttaagataaccaaaaaagtgtcccagcattgccgaatgtcccctgcaggctaaactcaccccagggagagccactggattagactaagaaccattgagtaacactagtcatatgctttctgtgcaccaactgctttctgtgtatcatctcatttaatccccacgagaactctgagggtagatgccattcttaagcaaaccaagaccttagttaagtaatgcatgctgtgtaaccatgcacccacaccagggcttgcacccgggtagtttgactccagaacctggttccctcaggttggaaccatctccccacttactagctgtgtgaacttgggcaagttagggaacttatgtcacctctgtcgccctcagtgtcctgtaagatcctgagaatagtgcctacctggtagagttgttaggtttaagccaggactggcatgtgttaggttttagaccaggactggcatgtgttaggaagcacttgccatgacatgtcactgagaatgcagagctaaaaatgacaccacacctcccagtctagttggagatgcaatcatgtaaactcataatttcatgacttcttaaatagagcgtttttacacagtacacattacttaagtcttggtgtgctcatgtgagctattgtgaggattaaatgagagcatttattaaattcatagtttgttaaatagagcattttctgcgagtgcagatgcgggcttgaacttctaggctgtcaggattgagtttacaggagaggtccgtgtgaatcctgaagggtgagcaggagctttggtagtgagggagtgaggctgggaggagtgcaggtggaggaatgaacacagcgggataggaattcctgtaggaatagagagactccacatcatttattgcaggattgccacttccaaacaatacactgggccattatttcatataaaatggctggttttctgagagtttgaaacattcgtgtttctacttaggaagaaaatactccagagctaaataaaaattatttttgaagtatatatagaatgatatagcagatataaagataacttttactgtaggactaaaggctacatagactatgtaaacccagccacattcagcaaagtgagagaagaactattaatgggatcaaagcagttctagcacattaatttgcatgaaatcattctttgcatcagaattctttttagtatgacacttgtgtataaaataacattttgaccactcaaaaggaatacatactttaaacaatcatttaaccttctacaaaatgatccccttcctaattcccgtttgtgataataccttttcgttttagctattccagtaatagctaatgacattgttgcagaagagaatgtctacccagtaaaataggtataggatatgttagtctatttctgtatgcacaaatgaaagttatttacttacgtaaaatatattcttcccacttcctgagttattaatgtacaaagaaataatcttttttcccctttaccattgaatcattgacaatgactaagcttcaattaacaaataaattgttagaaacaatagtgggcagtgtttcctagatttttatttacttgctaaaatatttgaatcacatatcataatttatattttaaaagcattctttaaaatatattttgacattcattaattgaaacagcttatttgtaagaatgtttttgttaacatgaatgaaatttgagagaaaaagtgacaaaggtaacttttatcatccaaatatgaataaatgagagaggaagtgggatggtagtaaatccagaatgtgataggataaatgaacttaatctgtggagaatcctcttgctagaagcagaagaagggagttcttaaacattttaaaacaaacttttgttcttatcacttagcttgtacttaatgctttaagagtcctagagattttagtttggtttggctttctttactgtggtagcatttaccaatttcttcagttctgcctaatcttagtttgcatataatattgtcagctcttacaaatatatgtagatagttttctaaaatgaaaaagaaatgggctggtcacaggaggtggggacttgggatggatggttttagcagcatctgaatggagtaggcagctcttgtattcctaatgtactttcacacactgtagctttaaaacagaagcaagttgctgtgttgttgccaaccagatagcaaagtggataatattcttggttaacaccagggcaaggtactttttatacttggcagtttagttcttttataaaatccagtttgaaaggtgtatcagcaaattatcttgaaaaagctatcaaataattgccttatgaatgtaatcagaacctctttcaattataaatctttaagtaaaacatggaaacaataatggaaaaaataaagaactcttcagacagatgtaattgtatatgatagttttattggcattttaaactactttgtagttgttaaagtattttacattctactttctttgtagggaaagttaagcataattctgatttttttttaatctaaaagtcccatttggcacccaaaagttccatttcatatgcattactcagttatttacacataatccttcagattgtgtgtggaattgttctcgagctgtgtgttagagataggctgctgtgtgggtgggtcgagtctagcttctggattcctttttatacaggaggtgcagaaaatcatgccagagataaacaacagcattgcagaaatgaatccgatatagatagctcctccaggttcatgtttgttgctttctggaactgtcagatccagaaagtttgctatgatctcctttgtgtaccacactgtcgagattaaactagagattcctgcagacatgaaacagactcctccagcaaaggaagcatggctcttggtttctctgtcccctcctaagcgagtacatttcattcctactgtggaagtgcagatccccaaagcagacagaacacacgccaggaccatggtggctctcgcagcctgcacgtggatggggagggacagaatggagtgtttcagggcacagctgaacatcccagtgctgtaccacgtacagtccatccagagcccgtgcagctgtacaatggctgttatgatgttggagtccacatccacattcaccttccagttgggcagcagagtggctgtgagcactccagagaccccagataaggccaggatgaaagcaaggagctggagtcctgctgaggccatgatgttactgttaagtctgtcctcttagaaaatcctgatgtttaacaatgatggctgtcagaattctatctatttctgtgcagtagagaaccaaataacaaagcctaaggaaaaaaggcaaaaccaggattgagcgaaagaaagtaagtaaacaaaaggcttccctttagagtaggagccaagaacacatctgagtatcccccttctccagcccccaagcagatgaggatgctgtaggctggaggagaaaagctcccaccaggccttgaagactggtctgagtgatatgcatgggtggtgttgatacagggcataaagaaagcagttgcccacttaattctttttaaaactcaacatatgctgaaactgtagcgtggacatgtacgttgttaggagatttagacatttgaaattccagctatagtatctgataaagaattttaatagcattataggtttttcaaatgattttattttttatttttattttttttgagatggagtctcactctgtcacccaggctggagtgcagtggagcgatcttggctcactgcaagctccacctcctgggttcacaccattctcctgcctcagcctcccgagtagctgggactacaggcgcccgccaccatgcccggctaattttttttttttttgtatttttagtagagatggggtttcaccctgttagccaggatggtctcgatctcctgacctcgtgatccgcccacctcggcctcccgaagtgctgggattacaggcgtgagccaccacgcctcgcccaaatgattttatttttaatgaaaatactcaatacataataaggaagaaaataaattaaggccaccttttaaagatggtttataaatacattttagaaaagtatttaggaagtggctttcataaacagatctttatgacacacccacagtgccaggcacatagcccaagtgaaccatttgaggaggaaggacagcagtggaaagaagtctgagtcactggcatggttatccctaagttctagttaatacctgtttgcaaaatcctgactgaggttagtacttgttttacttcaggtgcctggtactcaaaacaattaagccactgttttttgtatataagaacatgaggtcctttctaattgggaccagaatcatttcctggcccaaatgaagccggctattctgaacaattcagaagtagtgatggcagatctcaaaaatacataccagaaataaccacatcattagttgtatgtgaaaggataccagaaataaattaaccctttattttctttgtttatttttaagaggaaggaaaagaccacctactttgtggcttggctgtgttttaagaaacaaaaaggctttcgattccatctttctattcctgttcccctatctagcccatctggcactgcttactgccttatttgagaaaaatgtaatggtttctgaaatactgcagtactgactttctttgtcattctgagttaattttgaatggtatgctaaagtggctctgtcgtgattcatatgtattttacaaaaggtgatacaggctcttgagtcaaagacacttgggccagttcttagctttatacctctctgtgcctcagtatcctcttctggaaaatggggaggattgaaatacttcgttcatagggttaaataagttaatacattttaagggcttagaccaatatttaagccacagaaagtcctcagtaatttaaaattgacatcattattagtatttttatttcttatgtattgtgacaattgatgtttaaaattatttggatcttttccctttttctcttccttccttgggctgatttattttcatagaatcttggagctgaaagaaacctcagacagacaatctcaagcatccttgttttttcagatcagaatgttcagataggatatcaccccatgtcatacagtcttcagcagccaacctgcagcgtccagatctctctccacccctcctacctcacagggtcatcccgcatcctttccccttttaccacaacacttcctgctgaaattctttctccccctgtgtgtttcccttgggaaccagggaaaacactgtatctggaggcaaaaagcaccattaactgtctacttcacccactcccctccccaccaaggaaaaaaaggactgtagaggatgttaataggccacatggctcagcttcagatgactcggcaaggagattgatgcctggctttggttaaatatttgaaatagtactaatccattgcctatatttaaagtataaactttgcatagctacaaacattgattctctaagacattagatcctagactatctggattgtgctgttctgtttttgttcataatctgaaaatgtaaatcttaccattttagaaaaggatttccctaggattttaagttcttaagagtcagacttatctgtagacatcagtgtgcctaggattcacctgctatcatacagtttcttttctgttttccaaacttagaccaaaatagaacaaaagttaaagtttctagaaaaaaaatcaagcacatgtttacagttttgtaatagctgctttcaagtttaggttttagcatttcggactccagccagcttgctaaattactgcctctggaccattttcagcttagggattcttcaagtgtggggttgctggaacattttctaacagcatctgcttgctcacttttctctctccctctctctttctttctactttgactgaataacctttgttgtcaatctatgttcagcttaccaattataatccttttcttcccattaactgatatattttataactttcagtatatttcagacatgaagacagtttgttcatcatgattaacaagtactggcagtgatcaattacagacagccaaaatcagtgtaaacaatatgacgtgtcatttaattagcatagtgcttgcttactgttgaatattggattcaaatgcttttttttctgcatagagaacttatgtagaaagaatttgttctccaaatgaaggtcactttctgctcatacaaatatactggcattttagctgcattgcgctttaccctccagccacgagtataataccgtttgtggcctgttctctcaaaatttctatctcgtagagaataaaggcacactttgttccagcagctgtggtggtggtggtagagaaatactgtgaaggcaagcagaagcagaggggaggggtcgcatgtaaacacttacatggtctacagtgaaaactctctcatggtcccaaaacacagtgcacacagaacagaacccaggcaccttcagtttatgaactactcgccaacagaaagtctgttgtagatttcactaaaatgtaaagtcagctttccagacaaggtttatttatatcaaaaataatatttaaaagcagatttactgcttataattcgaactaaataataccgaaagacctattcttagatctctaagcattaagacaggttttatttaccataccttttgtcagtagccttcactgtcttaactccttcggtcagttgtcttcaaattaacctcagttagttatggtgaagaaaaaccatatacgtgaggcttatttcagaaattctggatatgtttataaagctccaataagttaacttgaaaaaagcaaataaaggacaacgtagaaatctgagaggtaaaaactgctgatggtgttagaagataaataccaggttctccatctcattttttgagatgtgggagaattaagaaaggagaggcggggaagggagggaattgttgttacaacaggatttgttgaaacctgaaagctaaaaatgcttttgtgtcactgtgtacagaggaggaattatttgggtgctcacaaaaaggccttcttttcttttaatataatgttttagtcacatagttataacttatttttgaaattttctctatgttgaaagatataatgtattattttatgtcctcagttcaagaatgtggtctgaaatatttttaacaatgtcgtgccttgcaaatgagagttgagactcccttttttccctggtattcttgacttgtctggaacctgaattcataaaattgttaattttcaaaataatcattcagaagaaagttttttaacatatgtatttttttcaataaaagaaaaaagaaaacccagcaacaacttttgactagaatctgatcactaaacctacaggtatttttgtgtgtgtggtgccctgagttttcttgttattgcttccacttagatttgtggagtataactatagagattcaggaaatgttatgaataaattacccaaaatgatgtgatgagacacatcagataagactgtgatcagatactgaggttgtagcccatgaataatggtacagatggatttcactgccatccttttgggttctcatttttttcttcctcagtaagttttattctacaagctataaattcatagccattatacagaaagaagataattttattattggatttttaaatttaacaactgttaataaccatgttagactttaatcatttctttaaaagtagtaaataaacaaacacatgtttcggttatctggattttttgttttggtttgttttaatcctaagttttgcattgagcaagatactctttttcctcttttctaagtctaacatctgtgggtttgcttttcagccatagtattgattacatgttaagtcttagctctctaagtcgttgtaagctttatgtgtactggctttgttctttgattttatttcatgggaaatacaaacaattcagtgcataaataaatactggaagaagttgagttgaattgcagacactaatagtcgcagcagtgtcattagtgctgcatccgaagacacctcaccagggccctccagcgtcctggcttgtttcgctggtcgccatggttgttagtgcagacataagctttgtgaggctgactgatggcagatggagggacccggctgctccccactctaacctctagcataaggaagctggctggaggataaatgggttaagcatgctttaatgtacatttaatgtacatttctattctcaaaacatgttgattatttttttgccttgatgaaaacaataatcctataaaatattaattgcctgctttagaaggaaaacttctgaactggaagcaactttcgttagctatagacctttaatgaaggcagaatttcttatataaaaaaggagctaggaaagtagaagtgtaaatagaaatatagtttatcaacattactatccacttctgatgtggacattaaagggatattaatcttttaagtccagagactctcctaggtaagtcttatgacccctcagcttaaatctcttgcccagccctctcccctgaactcccaagttgtgtttctgtctgctgacttggcgtcactgatggatagctcagacctgtcatggcacaaaactgaattcctgaccattcccaaactgttctccccacggtcttcccaggttcattagtggcaaatccttccttccatttggccgcctgagatcttaaaagtaatccctgattccatacccaacatcccttgagtcaacaagttgttttgtttctgacttcagactagaacaagaaccttccacctctgagctcctcttctgcttccactgtagcgcaagacctctgaggtagaagttcagccccacagggcaagcacttctctctgtttcgttcatcactgattctcctgtgccaggatcagtgcctggcacatagtagggatacaataaatatttgcccaatgaatgaattcagaaactgactttaagtatataatgttaaactataaattgcacttgaatgattaaaaatacaattttatttctaagcaggactagaattttaagtaattttggaactctagtttgtcatcttgctaataacattatctaccatttataacctgctttccatatgccaggtactgtttaaggtgctataatacttaattctcaagacaaacctagcagataagaagaattttatagacaagaaaactggccgggcgtggtggctcacacctgtaatcccaacactttgggaggctgaggcaggcggatcgcctgaggtcaggaattcaagagcagcctggccaacatggtgaaaccttgcctctactaaaaatacaaaaattagccaggcgtagtggcacatgccattagccccagcttctcgggaggctgaggcaagagaatcgcttgaacccagcagacggaagttgcattgagccaagatcgtgtcatagcactccagcctgggtgacagagcgagactccatctcaaaaaaaaaaaaaaagaaaagaaaagaaaagaaaactaagctacagagaagtaacttttgactaaggccataaaatgagtaaattgcaggaatggggttgagtcccaaaacaatgatttttgaaaccctgacatactacatagcattgccccacctctaattagaaaagagcatatttgtaagtcctacctctcttggtagtttataagctatggaaacaaattaacccagaaatctctgtagctttacatatcagcatttacttctcagtcctgcaaagtccactgtgggttgagtgattgcagtccatctttcttctttagaatgttttcatttatcttttttttttttttaattttttaattttttttcttttttcttttttttttttttaattgatcattcttgggtgtttctcgcagagggggatttggcagggtcataggacaatagtggagggaaggtcagcagataaacaagtgaacaaaggtctctggttttcctaggcagaggaccctgcggccttccgcagtgtttgtgtccctgggtacttgagattagggagtggtgatgactcttagcaagcatgctgccttcaagcatctgtttaacaaagcacatcttgcaccgcccttaatccacttaaccctgagtggacacagcacatgtttcagagagcaccgggttgggggtaaggtcacagatcatgttttcatttatctttaagcagaaattactttagcttcccttagtgtgtggtgttgcttagtgatgttaatctggatgttcaggtaggcttttattgtctttctgaaagaatcagtaatttaactgagtattttggaaataacaataccacaccttttcatagagcttaacagtttataaagcattgcactccatcttctcatcactggatcacagtaacaggcttatgagagagacctctaccctaatcaaagaagcctggggatcagggttaaggggaaacactttggtggctgacattttcttcaagaaggagtttgaaggccaccactagaggcagtgtgaaccatcagagtgtttttttgtggtggaatttgtggtttaagagcacttggctatggtgtggaggatttaaagagatcagaattggagacagacagactctgggaggctgtggtaatgggagcgattaaatggaaataactagatgagtagagatattgcataggaaatggattcaagataaagggtgttcataaattctggaaatataattaaatatatataatgtagtcaagggcatcttcggtctgtaaaaagaacccaaaatttcctgtctacattttgaaaacaaatttgtagaaggggctttgggcttgtattggtttcagatgtttcagtggacaaattacagaaaaatctaacagtagactaaactataaggactcattgtttgaaagtcagtactgttcaaggttagttctgcaatttaaaactcttcttaagtattccagctcattctgtttttctgttccttcaaactgaacttttcttggctgtgtgaaggttgattatacaaattaggtcattcttgtcttacccaactaaatcagagtcaaggggccaggaggaaaaagcactcagggcacatagcactgtcgcacctgctccaaaatttacactttctataagcctagctgctgaaatggcctgctgtaacaccaagaccagttttagctagtagctgctgggaccacctactgtgactctaagactggttttacctgctgtcgtcactcaccaatcagagcttgtccacacccaaaagcttctctagtgccaatgagctttctttcaaaacaacacataacatttctctaataaaactcccaaccttccttttgttctttggacatactgaagaccacctggtctgtgtgtaggccctaatttacaattcttgcttcccaaataaaacattgaatttggagatttgtctctatattttaggtttacttcaacagctatgagatggctgcctcagctgaccctttcatcaagaagcaccatattctacggccaggtgtggtggctcatgcccataatcccaacactttgggaggccaaggcaggtggattgcttgcggccagaagtttgagaccagcctggccaacatggtgaaacccagtctctattaaaaatacaaaaattggccgggtgtggtgccacccacctgtatttccagctactcaggaggctgagacacgagaattgcttgaacccaggaggtggaggttgcagtgagccgagatcatgccactgcactgcactccagcctgggcgatagagtgagactctgtctcaaaaaaaaaaaaaaaaaggcagcaaagtattctagagttctcttcccctctcccaccaccaccccagactatgctttaatgtctcactttccagaactggctcatttggtcattcttttttttttttttttttttttttttgagacggagtctcgctctgtcgcccaccctggagtgcagtggcacgatctcagctcactgcaagctccgcctcccaggctcacgccattctcctgcctcagcctcccaagtagcggggactacaggcggccgccaccacgcctggctaattttttgtattttttagtagagacggggtttcaccgtgttagccaggatggtctcgatctcctgacctcatgattcgcccgctttggccttccaaagtgctgggattacaggtgtgagccacagcgcccagcctcatttggtcattcttaactgtgagcgagactggggaagtttgtatctggcttttcatcccccctggtgagctgtatccagcagggactcaggctggctttgtgggtgtcacagggctctagctgcacttctagtgaatttaatctccaggatttgagttgactgtgtgatactttcccaagcaactaggattgttccccaaacctgtgattctcatttctgcccacacgagggctttggaaaagccccaagaggctcaggcccaacccagtggcttttatttaattttctgggatggagccccatccttgtatttttcaaatgctgtccatttaattctaatgaaaagttggggttctgaattttaaaaaaaatgttgtgatggttaacactgagtgtcaacttgattggattgaaggatacaaagtattgatcctgggtgtatctgtgagggtgttgtcaaaggagattaacatttgagtcagtgaggtggggaaggtagacccgccctcaatctgggtgggcaccatctaatcagctgccggctcagctagaatataagtgggcagaaaaatgtgaaaagagagactggcttagcctcccagcccacatcttttctcacgtgctggatgcttcctatcctcaaacattggactcccaagttcttcagttttggaacttggactggctctccttgcttctcagcctgcagatggcctattgtgggaccttgtgatcatgtgagttaatacttaataaactcttctttatatatatatttaatatttacatattatatattaaatatatattatatattatatataatatatatttatattatatataaatatatttaatatttatatttaataaactcatatatatatattccattagttctgtccctctagagaaccctaatacaaatgttttttcttctttgctttccattcaatcttgaaaataatgacagttcagagtaagataaaatagttacctgttccagccctacaaatttaaagtgatttgacctaatcctaaaataatgttcttcttctgtcccagccttaggaaattaacagtatcagctatgaatatacgaatgtactgaccaagcatcttcagtgtgatgtctagtccgtttgataattatggtttattatgaattactatatttgtatgcatgttctatttctcagtcttttaataatattactagcagcatttatcaagtgccttctgagtttgtttagattgagagcctctctgaggtcctgtcttctctctgagggacgggagttgctcaggacctgcagcgctggggtccagaccctggcagttgccaatgtgctgccacacccatggcccggctgggcagcctcgaagctgcctcaggcagctcctgccacatccacaaacccaagcgggagcacagcccgggacaggaaacacagggcacgtccagatgctgctgcttcacagacaccaagggcgtggtttgtggaaaaggcctagttttaggaaggtcttttccctctgatcatccaggaactccagattaaatgtaacagaaaacctttatacaacaattgtcagttcttgttccatttgtgctttcttgaggattacacgtgcatctccctgaaattgtttaatctcttgggaccaagagacactgactcatcttgttgttgttattactaataggtgtaatttacatacatacatatgtacatttacataatttacacagtaaaaaaactcttcatccccctcaccacatttcttagtcttatttctcttgtgatctgagtttgctgtcattctcttggcctcagttcttcctaccacatctgctctgagaggaaacactatgtgactgtttaaaatctgttctttttttatgatcccaagaagaaagagaaaaaaacaaagatctgtaggaagaaaaaagggtgaggacagaacttctgcagaaataaatattgttacaataacacaaattgtaaactttaggataggtactgaccgtgtagttgatctttattgaaccagttggtttgaaatacttagaatgctgtcagctttaaggttttacagtggaaattctttccttaaattggcttttggacatggatcacaggtagagtgaaccaattccagaaaatgtgatctacattcacatttgtcagtattttctttttctatgacatgcataattatcatatcacaggcatcagtgacttgctgcctctacctgggattctccttacctgggaaagttgtaacctcgaggcccgtgatgtcctaaagtggactgtcattagcttggtggaggtacttgaagagcaagcagacactggagggtggggaaaccaagcatccggaggcactcatcttgctccgttgttttacccgacagtgaagtggctctcccaagcccctgtcctcctgcgttccattttgtggtgcctatagcctgcaagatgccatatgcttcctgttcccaaccacccaggtctgcccgtgatcatcccacttcgaactttgaatccttcttatatgttgttctttaaagtcttactgattattccctgtggtcttttttttttttttcactagcccttctgttgtcttaagttatggctgtgtcttggctatttacatagtaacttcctcatcattttttcatctccactatcttgtcctctaatggtcttgaacaccgtgagagtgttgaatgaagacccttttgtagacagtggccagcattgtttctgtgtctgtgcatgtggtcgtgacttagcttttgggcatatgataatcatcaggaactgagttgtacgtctcttcagtgtcctctgtatatcatgttgattacagttctcagttgtaatatctaatatctaagatttaagatttaatatctccttagcccgggtcccttgtgagttccaagtgctgctctgagctgataaccagtcacgtcctagacaccctggcctggaaactaggacatctgcctcgggcctgttatggccaaggctgctaacactgagaaacagtcttagcttgttacagcgttgacgtatagggttagaaaggcaaatatttaaattcattttaaatcctttcatttgaaattttagtaggtcattttggtatactgatggactgagtttggaaaaggctggcggcattaaactagaatattttaagtacttctgatgcctttgtactgatttcttttttgtaatcaaacccattaatagacttaaaactcaaggaagaaaaaataatacttgtaattttaaataagcattcaattataagtaaaaaacatttttgtattcgttaccatagttaccaagcagctttcctatagttctagaaaaaaatgggctccatcattcagagtaattctgaaaggtgcctttgggggaaagggagaggaaggggtggtacaggagaggtcctggccgtcccagaagcaggagacataactggaagagctttgttgacgctgagttttacagaatctcccactaaatagtaactgcatttgtgaggggaattctcttttagccgtgacataatataagccaacttaacagagtattggaattgtattcaaactttagaagtcgacgctatagtttacatggggtactactatatttgttcagggttttaaaactttatttaaatcaagcaaaagttagacacttcctgtatttgcaaataccaactatatctcaaaggaatgaaatcaggcaaataaagatgaggccaaaatttaaaatctaaggaagctgaaagtggcagtttctgtactggaagagagtgcatctatctctgtatttgtgcttttggtcttaatagtttgtaagccttatgtagagttttgataatatttcatggttttaggcctaggcagggattagattttatctcagattttgctaagagtatttcttctggagactagcaggctgctagtaagaattgatagaattggctctttgtcactgggagaactggagttgaagggttacaggagatgagtcctggagaacgggaggcagggacaagggtgccaggaagctcaggggatgaaagggaaatggagagtccagtgagagaaggctggcgaggtgtagagagtggccagacacatgcctgacagttgggaccacttctctatacaaatcaggaggaggcgaggtaggcaggatagttcagagtttgtgggaaggaacctgacatctgaagtcagtggagtgtgtcttgggctgctgcctgcactctgccattcatagatcaggtcttctttttccttccccagaactgccctgagctgaaaccacctttcttctctccctatagcagtacatctaccccacctacaccctgcatccactccacagccccttgtcttcttcagtccctctttccctgatgaccacagacctctccaagctgggcactgttctatggtgcgttttgttaaagtctaagggaagtcctgtaggaagaggtagttgttactaaacttgaggaaacatgaaacaacatatagcacacaattcaaaaaacttactaaaatttattaagagcatttgacatcttagttaagtcactgttcataactactgttccaccatagaatcttcacaagaacagcctgctggacttcacaagaaggctgatggatgttgggggtgggcatttggggtgtggaaaggccgcttggcacattctcagcatgcgccagcccacaccgccccttaccaccaaagccttctatttcccattccatccagtaggagcagctgtagctgacctgaaaccttcggggacaggctcattgattgtttaaatagggaggtgcaagctctcaggggtccggggccttgatgacacagctcaggcaccacaggcacctcccacaagcgcgtcaggctgtgtgaggctgagcacagcttattttcactttcttgtccataaagtctcacatcatattcagttgttttccttctaccctaaaagaaacacaaccagaaaagccagtctcccattttcatctgtttaaggaattatgtagccacaaggatctttagaagcaagtcctcttaggagaaaatgacaacctctatgggatttcaacaatggagttccttttgaaaagcagtggtgcagcccacacctcctaaattgccgtactttcttcgccttttgttgagtctgtatgagatcctcattaacaagtttaacaattcctggagactgaggcttttgtcaattatgacgagacttcccatttcctagaccatggtctccgttagcatttttgtgtgtgtagttactgttttgaatccatttccctctgtctttaaatgtttttcctttggtatttgaatttgtccttgtgaatcaccatgagtccatttttggaacaaatcagggtataaatctcttataagatatgcctgaaaagttttatcttctgacaattaaagaatctccacagctggcagtagcttaaacactatcaaacagtgacattttttgatggtttccattttcaatttcagtcctgcctatgcctttcggggcatttaaaattgctactagaaagttctgtggcttttcagactacactcatgaattcagtccagctgattaatcagtgtctaccgaaaataagtggtgtctctatctgggaagtttagcactgagtggtccctgggggcctgtctgccatctctctgtgtcttgaagctgctgctgcggcttatttttttcctcattcaaaaactaaaatattctaatgccatctattatctgctgactgactttaatgatttggattgatttttaagccattgtgaaactgtgttttaaaattaagtgaccatcaagcacaggtctggtggatgtcattagagaacaggtgcagccggctgatttctccatgtcatttgcgaatccagaatgtaccatcttccatgcctagagatgaaaccgaagtacgtggaaaggtctgtttatgaaaacaggctgttgacagcccatcctcctgttttacaaggatgagttgattgatcacactatgccacatatcatgccacagaatgataatatgtttgcttacaacgaaggtggacgtgggcgtggtgcacttcactcccttgatacagcccaagatagagcagccattcaagctggtggaaaaagtggttcagaatgtatttcagttccgaaggaaatactgccatcgagggctcaggtaagaatgccttttcttctcttcagttgcagtctttataaaatcctcaggcactttttaagagtgagaaccttgtttgctctattcttaaagctctgagtattacacttagttcaggcctgtgacggacaagacttcactgccaatgaggagagagcaaagacttgctagacctcaggtggcctctctcagggtggcttaaacataagcgcagcctggagttggtgactgcacagctcacagaggctctgtaccagggagctcgtggttccccagtgaggactcaagacagataataatgggttttttaaatgcttgctttctaccgagttgccctatctcttctttaaggacacacttgagaactaggaagcaaatatgacttctgagcagccaaaatcatatcacgaagtcctcacgtaagcacgtttccatctcacagaaagctgctgctgccaagaggctctcaggaatcactgggaaaacctgacagggcctggtggtctagaggtcgcccacctcgatgggctctgaaggaccacagccttgttgcagatccagaaagagccaagaagctgtttagttaagcccagtgatagtctgcttaagaaggcaggaaagtgtatttgtaaaagatttccatctacgataatctatccatagtccgctgtttaaagaggctcggcgtgagaggcacatatttctcattttctaaaacctcctcacatggcttcattgtaattctctctttcacaaggtccgaagtgtccctttagcatatgaaatgacagcagattattttaggggccagctgggcatcagctcctaagagtgctgcagtccacaaagcccattgctgaggatgccagatggcagaagctggagcctcagcctgccacttgttgcctctaattaagccagaattcccaccttaccagatagttcctgcttctctagcagagacttaaggtgcagagctggtgacagagatgccactggccagccattttggctgcagcccccagctactgtgcactgctggtgagtgaaacagaagctggattttggctcacacttacccctcacgcagagcaggacccacacagctgtacctgatagccctgattcatgggggaggagggagcacaaaactatgtccttttatgtgcttttggaaatcctggaattggtctgagcctagagctggcactagcgtttccaaggcaaccccccagctaagtgaagggccctattcatttcagatacaccatcctcaggacagacatggaccagatactgtgccacccagggtaacaggtcaaaggactttgacttattggtgttcttcagatattagaaactgccatcatcaggccctctttgccatgaaactgaactcaaagatctgtcacctcaccctgaaagtgtgggggacatgcaattccttgttgaaaggaccatcagcctataagcaacatgctatctatctcccctggccatgacaccttccaagccccttgggatgagctctgtaagagccctgagacttgaagaaaaatgcaatccaggcctaactccgcagcatttcaagcagttctgctattcattttaaaacaatggttcaatttggatagatgaaatttaaaatatatcctctacttcaaatcagttttaaagatgcttgaaaaataacaagaggaataattatattttcctatcagctattttcaaacttttagcaaaaaaaagtaactcttttagcgtgaagagttctaaaggctgatacattcaaattctagagaatcaaaactgatgatttgtcacacaagaaataatacaactttcacattgaaacatgaggcacatcaagcttatgtttctacaagaatgcagctgagcagatgttactttaaacttacttacttacctttaaaaagtacatgtactgatttagctttggagaatgctttcccattgtgtgcttgcctcgcgcctcaggttagagctgcctcagtggcgggccgtgcctcttatctggtgctatataatccaagaggctcctgccactctctccagctgtcagtagccagcaactgtgttgtgttgttttcaaatgagggttaaaaagtgtcatgatttgcagaatttaagtaaaattcttatttttctgtctgtctgtcttcccctcagaatgttattccctgaagcgcagcgcttggaaagcacgggcaggctgttagagttggcagacatagaccctactcttcggccccgccagctctccatctcacactttaagagcctctgtgatgtatacagaaaaatgtgtgatgaagacccacaactctttgcatataatttcagagaagaactcaagcgaagaaaaagcaaaaatgaagaaaaagaagaggatgacgcagagaattacagactctagctgctgcctgggggcgagcagcctaccagatgtcgatttgcactacgtggagcttcttatataggtactcttttgtctttacagaatgacgatacaaatgccaatgaccagatgtgacttattttccttttactatacagcttggcagagaaaataaatatcatcaaataagatacagtacaa

SEQ ID NO: 15853 - DNA, 56812 bp, Homo sapiens
ggagcggcggtgaaggtcctgggtgaggtagggttggatggtgcttgccgcgtatcatggctgcctccggaaaactcagcacttgccgtctccctccgttgcccacgattcgagaaatcattaagttgttaagactgcaagcagcgaagcagctatcacagaatttcctcctggacttgaggctgacaggtggatggcttagcagtgctccccggatgtctccccagtgtccgtgggggcgtgggccggggggtcttgcacgtccccgcgggcgggtgtccaggcactggcgtgcgacgggcttttggtcaggtccttcgacctctttgtatcagaactccggtcccaccgcccaggagacacgtgaagtgcgttgattgctcacaaaactccgcgttcgggggggtgtagcctgccggcaggctgcataaatgccaagctccctaggggaggaagggttcatgggtcgtgaaaggcgctagtgaatattggaatctgggtcactgtgaaatcaatcattctgaaatagtacagcacatgctgactgcagttgctttacatgcagtttaaagttaccagaatttaaattgatgcgaggattttatcaataacttggtgaaaagagtatccctcgtatgattcgttttttaaacgtttacctgttcagtctaagcctcgggggcgctaatattcattcataagtacatattacacaagcaacattgtgctagtgccgggggtaggatatgggcgtgaacaaggcggtgtttcctcgaggagcttacttttagcaagtttacattcccacacctaattgtttaaagttactttttatgagatataatttatgtgcaataaaattaataagtttgaagtgctcaatttgatgagttttgacgaatgtatttatatattggtttaaccaccatcaccattgcttagtgatgttctatgagatgaggttgcaaaaatatattacaaatacgtctactaagtcacggctggagtacttaggttttgagattttcatatttcattctatttagtcccacttcagaagttgaaaagagcagtaaatcacacccaaaaagttcattttcacttaaatgaagcacactccagaaaacataaaatgttttatttcttggacatgtagtctttattctgcctgtaccaatatgactttggataaaataatttaactcaagttttctcttttttttttttttctttttttaagatggagtttcactcttgttgcccaagctggagtgcaatggcatgatctcagctcactgcaacctccgcctccccggttcaagtgattctcgtgcctcagcctcccaggtagctaggattacaggcgtgagccaccgtgcctagctaattttgtgtttttagtaaagacagggtttcactatgttgctcaggctggtctcaaactcctgatctcaagtgatccactcgcctcggccttccaaagtgttgggattacaggtgtgagccaccatgtccagtagtttcctcatcttttaattggaagaagggcctactactttaaaagattgcccactctaaaattctttggttctagtaatagctagtaccagccttttctgcttgttattagccacattctaaatataaatcaccattctcagggcagaagttataggtctgtgtattttttaaaatccttcaaatacattttctcatgagcctttatcttcaggagtaagtttcaaattctagatattatccactctttctatgggaaccagagttaacggagatgagggtacttagctgaggttagaagctcaggcagaagagagcaagattgaaatccaagctcattgatttgatagcgcttctttaatattcatttgtatttcaatgtgcctgaaaagtttgagagcagagacctgcctactgttgtagctctccattttaaagaaggagagtattaaatttattccataatgtatcattcctgttccctctgagaggcattggctttaggatttatacctatgttgaagtccatgaccttgtacaaataaaacaatagacaaggaaactgaaaagttaagagaaatgaaattgggataggagtccttggttaacatgtaaggattaggtgagaatgtgtgtaaatccatcataatagataagatggtcagtggatgctaattccctccctgttaaaagactaaaccatttttggatggctgagaaactagtttccgcattttagctgacaaagttatgttgttgaaaacaagcaaaaataggactgtgaacacctacaagaagtgctggtatgtttttagtgactaaatttccactatcctaggaagaccagttccttggatttccatatctcagaatcactaagaccagcccattgcatgtttttccagatgtgatgactggttgcacagagtcagtactctacctttttatgatgtcttaagggctgctaacttgaatttgattaattaaaaaattaatttttctgtattaacatgcatgtgtgcaaagctttaaaaaccctcaactgctcaatttaactttttcctgaaaatgactaagaattcaaatttctgaaaatcttacgatctaagaacttattgccattgccatagtgaccaccaccaagatgtctctagataaaaataagacttcagcactttttgcttttggatttcactagcaatactgaagattctgaatgtgaaactagtattgcttattcagatattcaatgttcaataactatagaaaagtgctgcattcttatccagtctgttcttaggagtcggttggtttcaaatcagtttgaaaggaatttgcatgggacagatggaaactacaatattagctaaatttaagctaagaaactttgtcatgataatcctgtgtgtgttaagggactggtacagttcaatggtgatgtggtagcatattcgattgccacttcatgttaatttaggtagagagttaaatagtcaaataaatattatacataaaggatcaattgattgggtaatggctgaatttttatagaagatttttctctctaaatttcatacgttgaaatttgccaagttaattgagataactaaaactctttttcctctagataagattgtaaggaaagctggcaatctgacaaatgcttatgtttacgaagtgggccctgggccagggggaatcacaagatctattcttaatgccgacgtcgctgaacttctggtggttgaaaaggacactcgatttattcctggattacaggtgagatgcttaaagtgtctgctttaggaggcaaaagctgaatttaaatctttatgccatgatgcttaaaccccaaggtatccaaagattatgtaggtttttcctcaactatagatccccaaggccccattccagagattttgattccatagtctggagaaatctggaaatctccatttttaacaagcactctcagagggtctattgactacaccttgaaaaaaacctgctttaagcatttatgctaaacaaattaattgttttgtgtgatttttttttttaagtctgctaatagctatgcatgtcgtggcccattccttcaaaaataaataaaaataaataatggccagtaatgactcattggtatgacttttgagaacttcatttaggttcaaaaagcatttccacaaacaaaagatgagtaagacatatgcacgtttgtcatcatgagagactaattatgaagcttaagcattcttttataaggtaaattttttaagtgaaggaaggaagttgtacttttatagatttaggatgaggtttaaatgaaatgatacatgcatctttaaaatacaggcactgttattgtataagaaatgagagttgaaggaactgggcatgtttcaactggagaaaagaggccctgggtaagagtgtatatagcagcacatccaaggttgggggtacataggataagcttgttttgatcttttctaagaaagagctaaaacaaatagatggaaattgagggaggcaggattgaggatttgaaataaggaggaacttactttttttaaaacgctggcaaacagtgaaatagattgtatcagggatcttgtaaagggatttcctcataggggaacacttaatgtcttaaaggcctttgattcctccataattctaaaattttaaaagagtcctgaacctttggctcagatgagaagcaatttatcatgtgactataatagaataatgtagttatctacgttattacttccatacaaaaggacaaattgattttaaacgagtatattctcatactaacttgtatatatattaatggaaaaatgttaatttctgtcagaacggtttgagaagttgtttttgaaaacctagaactttgtgtgcatgtatctgatttttttaagaaacctagcagtttttccctaatcttgctttatctagtttttatgctttaaaaaattacataatatttccttttatctagttttaccagtctatactaacagaattggtttcagatactaaactttatgttgagatagtcacatggcacatattccttgatcaaatgtggaatttaatagtgatttttgttttgaactgtgttcttattttaagaattatatataagttggaggtggacgtgggaatattattatttttggtgagatcatgagattataaaaagaaactaaataactgtataatccccttcgggcttattcgtgtagccctttttggacatagggaatactcacctgacttttttgctcttaaaaagacttcttgtccctcatatctcaccattcgttgggtttattctttcttattaggccagggggtgaaccagatttccattcattcccacatattcccctctttgatatgaacaaaagatctttgaaggcagattgttgaaaagagcgactgccacccttctcttctcagtttcccccaaacccataagtcactgcgttcctaattccagccttgttttatctcattcgatttatcatcatctgacatactgtatatatgttcttcccatttgtttgttaattgactcacctgtctggaatgtaagtaccatgagggtagaaatgtgtgtctgttttgttccctgctgtacctctatctcacgtaacagtgcctagcacatagcaggtgttcagtaaatgtctcacatgagaaacaaaaaagttgaccactatttctgcatctgtgtatatatatacacaaatgtatatgtatctctcatattaattaaatgtatcattaaatagtgaaagtaaatatttgtgtagcattgataatgaaaaagttttatgctcttttttctaaatgtgaaggctgatttcaagttaaattactctagaggaaatgtatatttgacttctcatttgtttttagtagaaacaaaattaattcttagtatcttatatgcaggaaaggaatttgccttaaaaagaaatgttgggtactaaaatatcaaataggcctttttttccccagtgaggaatgtttcaatatgtaaaactactttgttttagaggtactaaattaatcataaaactgagtaaaagcagaaagaaggtgatctattttaaggataccattttagtgatttctaagctaatagaattactttttaaagaaattgtaataatttataaaataccttctagctgaaagcctgtcatttgtagcttaattcaattcctacagtattttcatgaggcagtttaggggaaagaaaaactggtgctaacatacaggattcatgctcagcatgttataaaggtaagaaaaacatgtctagtatgtttagtatagtatagttttgtggtaaagacgcagacttcagcatcagactgcctgggtttaacttcagattctactactagttgggtgactttgggtaggtaattttgtcctctgtgcctcagtttgctcttaggactcatatgaggattcagtgtatgcctgatacttagaaagcactgaataatatcttagttataagtaatcagttaaattattatccccatgccttgattacctctggtgattaatgactgatcaggagactgctgatctggaaagaggtataggaggaagtcgtgttattccattggagcactagaaaattctccagtgctatggaaacattggggtgttttccaactcatcaaacttgcattggacacctagggtttcttttcttgatgttgtcacattctgattgtgcatttctaggtttttaagtttttcgttgtttcttgttacatttttatgactgactggattctctgtgctgtggagaggagtgaggagatttcctgaatctcaaggagcttgaggccttgataggtttttcctctttctgaactggaaataacttagatttcctgacatctcagggaatttgaagctttgataggttcttctccatttgtgaactggagataaattcgtaaatcactcgtaccctttcagagaagtagtacagatttcctctcattttttttttttttctgtttattttagagcaaacctgtgcaacacacggcccacgggctgcctgcggcccaacacaaattcttaaactttcttaaaacattatgaaatttgttttgcattttttttaagctcatctgctatcgttagtgtattttatgtgtggcccaggacagttcttcttccagtgtggccgagggaagccaaaagattgcaattgcacagcactgttttaaaggcttcatatattaaaaataataatagctaatatttatggagagtttatcacagtaaatactttgtgatatggtttggctctgtgtcctcacccaaatctcctcttgtagctcccgtaattcccatgtgttgtgggagggactcagtgggagatgattgaatcatgggggtgggtctttcctgtgctgttctcatgatagtggatgggtctcacaagatctgatggttttaaaaatgggagtttacctgcacaagctctctctttgcctgttgccatccacgtaggatgtgacttgctcctacttgccttccgtcatgattgtgaggcctcccccagccatgtggaactgtgagtctaaacctcttttgtaaattgcccagtctcgggaatgtctttatgagcagcagcatgaaaacgagctaatacactttgttttacagctttgttgagatacagttgatgctcagtaaactgcacatacttaaagtgtacaaattactgaggatttgtctgtgtgtatatgtgtgtgtgtgtgtgtgtgtgtgtgtgtgtatgtgtttgagacatggtctcactctgtcacccaggctggagtgcagtgacacaagcacaactcaacagctcactgcagccttgacctcctgggctcaagcaatcctcccacttcagcctcttgagtaggtggaactacaggtgcacaccaccatgcctggctgagttttgtatttttttgtagaaatgggatttcaccatttctacatggtggtctcaaactcccgggcttaagcaatctgcccacctcagtctcccaagatgctgggattacaggcaagagccaccgcgtccagttaactgagttttgacatatatgtgattgcatgaaaccattatcacaatcaagaaaataaacactcatcgtcctcaggattcctcatgtttctttgtaatctgtcccttccttccccctttatctatctcagacaaccactaatctgctgtcactgtagattattttttatttttcagaattttatataaatggaatcatacaatatgtactttttttttggtctggtatcttttacttagcataattattttgcagttcatccatgttgaggtgtttatcagtagtttgctcctttttattgctgaatagcattccattttctgaatataccaaatttgtgaatctattcacctgttgatagactttgggtttttcccttttttggctcttatactgtaataaagcttttatgaacattcatatgcaagtgtttgtgtggatacacacttccatttctcttgagtaaagacctaggagtagaatatccgggtcctgtgtagaatatccgggtcctgtggtagacgtatattatactttttacagaaataccaaattgttttataagatgactgtgccatattacattcccaccagctgtatttcagagctcccattgctccacatgcttgctcagacttggtatggtcagtctttttaattttagccatcctagtgaatatgtaatggtatcctcttgtggtttttatttgcatttccctaatagataataatactggacatacgatgtgcttatttgccatctttgtatcttctttggggaattatttgttcaaatatttttagtacttttactttttttgtcttattgaattttaagagatatttatatggttcagatgtgaggctttgtcagatacagattttacaaatgttttctcagctgtggcttacctttttattttcttaacaatgtctttgaagaacagaagtttcatgtttatgaagtgcaatttatcagttttttcttctagactttatgctttttatgtcttatttttaaaatatttgccaaaccaagatcactaaaaatttgttttatttatatataatttaatatatatttatatatataaatatataatttaatatatatataaatatataatttaatatatatttatatataaatatataatttaatatatatttatatatataaatatataatttaatatatatttatatatataaatatataatttaatatatatatatttatatataaatatataatttaatatatatataaatatataatttaatatatatttatatatataaatatataatttaatatatatataaatatataatttaatatatatttatatatataatttaatatatatttatatatataaatatataatttaatatatatttatatatataaatatataatttaataatatatttatatatataaatatacaatttaatatatatttatatatataaatatacaatttaatatatatttatatatataaatatataatttaatatatgtttatatatataaatatataatttaatatatatatataaatatataatttaatatatatataaatatataatttaatatatatatataaatatataatttaatatatatataaatatataatttaatatatatataaatatataatttaatatatatttatatatataaatatataattatgtatatatataaatatataatatataaataatataaaattattttataattttagcttttacatttaggtctttgatacattttgagctaattcttgcatatagtgtgaggtaaggtttaggttctttttttaacaccattttttgaaaatactgtcttttcctcattgaattgccttagtactattgtcaaaaatcagttggttttatgtgtgtcggtttatttctgaacttccaattctgttctatttatctataggtctattgtttcaccaacagccacctgtatttattactatagactgaagactgaaaaagccttcatttttgccttcatttttggaaaatattgtggcagtattttgttttattactctaaaaaagttgctccgccattttctcacttgcattgtttctgacaaactttttgcattgcaaaaagtttctgacaaatcttttttcatccttacctttgttcttttttctctggctgcttttgatactttctactgtttttgagcaatttcatcatgatgtgcttacagtagctttgttcgtgtttcttgtgtgtagaattcattgagcttcttggatctgtaggttttcctgtgctttttgttgtctaatgtctgaaaattttgtttcatctattttctctgttttttaaattggtttaaggtaggagaatatgcctggtcccttagactccatctttgtcggagtaggaagtttcaggattcttcttaaccattaaattatgtggttgttttgaggaatttttggagagagaaagtaagtcattgtattgttagtattgcctttggttttttgtttgtttgttttttgagacaagagtttcgctcctggtgcccaggctggagtgcagtggcgtgatctcggctcactgcaagctccacctcccaggctcaagcgattctcctgcctcagcctgacgagtagctggaattacaggcgcccgctaccatgcccagctaattttttgtatttttaatagagactgggtttcatcatgttgtccaggctggtctcgaactcctgaactcaggtgattcacctgccttggcctcctaacctttgggttttcttataggtaaacactggttatttccatacttcattggcatagtggaaagttcatgggattgagcatcaaatagtctagtgaccaaatctcagatatgccacctactagctttgtgaccttaagcttgctgttaaaccttttttagcttcaactttctcatctgcagcatgggaataatagttctcttctgtggatattgcaaagatggatagaaatggatgtaaagagcctggcataatcccagtagccagtaatagttgctattttaattattccccttccagtcatcttattaagagacatatgaggtaatttcagcgtccaggcagaaagagctatttttagttagagataatgaagttttgaaattctttaatctctaacaatttttttaaaaaggaagattgccttccttgctattgtgacgtaactatttactttacacatgtaacttacttgatgttaccatagttaatcataacatagacaaaactcaacaagtaagcaaaaagtggcttacagccaaagtgactttttagtccatacaaagtataagtacggagatcagtggtagaagcaggcccactgacaactgtaagaagtaacagttgttacagtaacagaaagctataaaagacaaatataaacgcagaagaaacaataataataatagggtagcaaaaacaccttcgtaactattgaggccattattctaaagacaacagtaaccctaggtcatcaagaaaagggtgaaatttggtttagtgttcttggcctaaggaagaggattgtgccatatagcatccctatacattggcctaaggaagaaggttgtgtcgttggcatacctgtacgttgtgtacaatgtataatgataaaattaggataattagcatatccacctcgaacatttatcatttatttgtggtaagaacacacaattattatgtgtcaattaaaaataaaacaaacaaatagaataaaatctgatatggtttggctatgtccctactcaaatctcatcagtgagctctcacgagatctgatggttttataaggggcatttctcccttttgcttggcacttttccttgctgccaccatatgaagaaggacgtgtttacttccccttccaccatgactgtaagtttcctgaggcctccccagccatgctgaactgtgagtcaattaaacatctctcctttataaattacccagtctcaggtatgtctttattagcagcatgagaacggactaatacaaatctaatgtcaaatttaaaaaagagagtgaaagatttgataatgacattgaaatatccaacaaacttaaaattcctataaaaataattttagatatttgtagtatcatttaagatacgagtggttatgtgatttctgtttgtttttgctctgttcataaatttaaaatactgagaaagtctgaaaacgtacatttttaatacaattcaagttattttacatactaaaaaaaaataaagcaagctaattgacattttgacatcatgctgtaaccttccctctaaaagtctgaaaagtctgctgtaacatcttaattttttaatgaataaatagcagtagtcttttatatgtgttatatataagaatacaaattttatctttcacctactatattttatactatagattctttccttctcatacagtttgcttaacagttttgcccagccctgttacaaatatttatttcaacagcatttgggccctactatgtggcaaatcaggaagaagataattaacgtaactacagtgttggctgccatgaaccccttacatgagaaggtgacataaaatatgcaaaatgggtattcaatgtagtatttcttcttaaggaatcgataattttgtgtaagttctaagaattgcctaaattctttcctcatccagtaaaatcaacaaaaagctgcctagccaaaccacaattacttgccccctgcagaggagctttcactaagactttggttagagaagagatttttttttaaatggccacagaaagaatgcttctacatttgtgttttaacttgtattaaaggcattgtttattacattgtttcatgtaccctttacaaagcataataccagggaaaaaaaaattatctcttggagtcttggtacaactactattgaaaagcaaaaattatatatttcattatgtaaatcacgagagctagctgtcatgattgttaggattgttagctcttgtgttttacatatatgcttcccctcttcatggtttgattttcggtttcttcttttatagccttatgtaatgatgccttttactctaaactggcatacatctcattttggaagaatatagaattgaacactaaaataaaaatgaaagaagagtttgagagtgtctgtaaaaatactcatttggctgtaatctggtgcctgcatttgtgattggctgtgcctttaagcacattctgtgaaaacacctccagggttttgaagtgtaatgctccattgttattctcgaatgcatataatagtgattttcccaccccctccaccataccccatgtatcattatggtagtgaaaacatttctgctactggttggctagaaggtcttcatgtgttattgcctaatatcatttgaagtgtttaaaagggtactgtctataatcataatatcaatttagtctgtctagcactgtttccccataattgctttaaggacttcacataaatctgttaacatgagcgttcattccttctgcagtggggagttgcaaagtagatcaagctacaaattgtcaagaaggaggtgtaccttttaaagtgtggggaggatttggtttgtcattgactgagattgaaaagtgaatgggaatccaaaagaaatgtagttttaaacctaggaaaggagctgggtatggtggctcacacctgtaatcccagcactttgggaggccaaggcgggcagatcacttgaggtcaggtgttagagaccagcctgggcaacatggtgaaacctcgtctctactaaaaatacaaaaattagccaggtgtggtagtgcacacctgtaatcccagctcttagggaagctgaggcaagagaattgcctgaatcccaggagcagaggttgcagtgagccaagattgcaccactgcactccagcctgggcaacagagcgagactccatctcaaaaaacaaacaaaaaacaaaaacaaaaaagaaaacccaggaaaggaaggtaaatttatttatattatattagcttttagatatacagttgtacctgtcagggtgggaaaagttaacacttcaaattaagttaacgtcaaacagccaaatttacattgttctgttgtgttttagtcctaactactaattattaaatactttctatatattgacatcatgagacttaagctattagttctgcctctttgtttttggcgtgctaatttgttttaactttgtgaacataattatagaaaaaattttagcgttttccattgatgataagtactgtgattaaatatgtggttttatacattaagagcatgccgcatagagagctgtctctttttaaatttttagtatattgaaatcgttatattttccaagatttattgcctggaactcaccagatcaagttttactaactagtggtaatttaaaataatctataagtacattagtatcagaggcatgcaattatttttgctaaactaccatggctaaacatatcaaactagatgatttccagacttaaaagtatgtttagcctcttaccaatagaggcgtttcagctatttatttctggaagattatttgtataaatctgcctgattgacttgtgaagtaaatctttgcaagtttctagaccctacaaatttgggaagccaacatctcccaggctaaaagagaaagtttccagctttacagagacctgaatgccatttggtcattcacttattcatgcacttcttaaatatgtattaaacactcaccatgcattgctgtagctacaggggctataaaggtagataggaaatgggtcctgcccttaaggagcatatgtccttgcaggggaaattgagatacagtttgtaagtgctgtaaagaggcagacgcacagtacagtgttgacacaaaggtggactaatccacaagccatgtttcttggtccagtgtctcctctctggcttctgtgatcatcttgtttatcctccctcttggttgtatgagttgggcaaggagaggtgttaggagaaaaaaaatcagctttaatggacctagagaattaggaccaaggtaggctcagggcaaatgttccctttgagcctgttcaccatccctataaagtgctgggcacattctagaatcttggcaactgagttgaagccaaggttctccgagctctgacttaatgtgggaagagagtcacttcttcccttgaaatctaccttagcagtgatgtttcttctcgttgatacattcactcctgccttttaagtaaatttataagctcagagacttttttaatatttaactaaggacttcaagaatcagttttgtgttgggcatggggcacttaacacaatatgaatttatagataacttagctataaagttttttgaattaagtgccaactcttcagtactgtgagagtgtggtggtagagtaggtggaatgaagaagaaaaagactacaagggaaaaagtgctttttttcccctttttgctcacaaagagaaggaaaaggaaagaaagcaaatgattagtacgtggaaataggttgggaagtagctattgttaaacatccagggtaattcattaggtcgataaggggtatggatcaacaaatattaagattagggatgctctggtcagaggagtatctcggagtgccaagtggagactggcatcgacaggtgactttctacttggctaaatctacgcatatattaagttaaagatcttgatgatatatagaatcctttgtatatatatttaggctataaagatttagttaaattaagcttatctttcatatggttgactcctgattaattctctgtatttcatgataatgtccttagtctctaatttaaaaacttattgataggagtgagtttattgctaaatctatatagaaatagaagtcatcctgaaggtcaaaattacactaatatatttgtaaaattgtaagctagtgttgtactgtctgttactatccctaatcattcataggtgttaaaatgaaacgccaccattgtctgttgcaatagacgtgatgcagtatttgttcattaatgatcacccctggtctctgacttttttaactgattttttaaatgcacaggtttaaaaagtttagttttgttactcgcataagtatatgagctcattttactgatctttttataaactagatgctttctgatgcagcacctgggaaactgagaattgttcatggagatgtcttgacatttaaggtagaaaaggctttttcagaaagtcttaaaagaccctgggaagatggtgagtgcttttgggtagttataaaacatttcttttatgattatttatatcacaaatgttcattttatgatacatttattacaaatgtcttatatgtttatattttaaattatctgaacagaattaaataatgtgtattataattttctcttgctacttgcttccaaattataaaatctagttactttttttagttctaattcatttgtctcatttccaaatgttttgtattctgtgcaaataaactaaccattttttgtgataccatataaggatagggtaaactatcaattgttatttgttccaaatagtggaaaaaaagaagtgctttagtaaactaagccatgcccaagccattgttttaactttttctattattcttcacattcaatgaccaaccaaggcagtcttcattcacagacagtgtttattgggtacctgctgtgtgcagcccttcagaatgcatagataaatagggtatgtttcttcctataacagactctcagaacaaacggaggagggcttaggtgcctccacatctggctgcccccatgtctctggcctcccccatgaccagactccttcagttgggccgcacttgcagtctctgccagctgacaggccctcctgttcttagcatgcagtcttcaggtttctgccccagcccagccacactggaaccacaatgccttcctcattacctgtttcaaaccttatctgactgagttctcccaaattcatttaactgtaatccatagtcttccggaggatttctcttgctctttttctccctgataccagcccctcctgtttttccttttacatttgtgaactttttctaactattcttagctggtggttgtttttctacccactttgtacagattgttgtttctggggtttttctttttgggcaaatttgccagattactccattcctatggtttcacttaccacctacgtattgcagacattcacatctttatatgctgcctgtacccccttcctgggcatctgacctctgacagcttcatctaggtgttccataggcactttaacctcatcatgtccaaaatgaattctctttttcctcaagccaactctttttcctgtatttcctaggccagaaattcaaggacttttctctgagtaactgagcagtaattaagtataattttttcctcaataatccaaagcagattgtgagaaaacattgcttttgaataataagtgaaaaaaaaaatttagccatgtctatttatatatttttctttgatgctattaatatccagtctgattttactcgtcactgaaattgtattcagaatatattgatggaatcatttcaggttgttttttcctctgccaccagatcctccaaatgtacatattattggaaatctgccttttagtgtttcaactccactgattatcaagtggcttgaaaatatttcctgtagagatggaccttttgtttatggcagaactcagatgactttgacttttcaaaaggaagtggcagaggtaagttttaacattttgtgactattttatcacatgttcaaattccaaagcaaaataataatactgcatttttaccacagtctgtgttttctaagttaatatcttattacacacacaagaacccagcagcagctcagccaaaagttaaaactttgatgatgatgacagatgtaactgctgtgggcttctgggaaaacatgaatgatgtatgttagccaaggaggtagtgtggtaaacacagggatgcaacagccatcgatgccactggagaaagacaaaagtgatgccctgttggccatacccaggattggcacgtgataccttaaaattgatcctttaggcttaatggcatggcagttaaagaatatgataattggccgggcatggtgactcatgcctgtaattccagcactttgggaggccgaggcaggcggatcacgaggtcaggagtttgaaaccagcctggccaacatggtgaaaccccgtctctactaaaaatacaaaaaaaaaaaaaaaaaaaaaaaaattagctgggtgtggtggggggtgcctgtaatcccagctactcaggaggctgagccaggagaattgcttgaacctgggaggcggaggttgcagtgagcaaagatcgtgccactgcactccagcttgggtaacagagcaagactctgtctcggcggggcatgcgggaagaatgtgataatcaatttggagctgagaaagagaaggggattgagggtctcattattcagtatataaattgtacttcctccctcacctcagtgaagtctgctatgcctgcattcccatggcagaagtgttctgggttcactctagaaagtaaaccctccagggtaagcaggggtggtgcttgagctgcaaaggtataaggacggatgtgcagactcttaagtggttttttaaaaaaattttattatgacatataagtacaagagtatacagccatcccttggtatccataggggattgattccagaacccccacaaataccaaaatctacaagtgctcaagtccctgatgtcaaacagtgtagtatttgcatataacctgtgcatatcatcccatatactttaaatcatctctacattatttgtaatacctaagacagtataaatgttttataaatagttgttacactgtattatttgaggaataatgataagggaaaaatctgtacatgttcagtacagatgcaaccatccttttttattccctgaatatttttgatctgggattggttggatccatggatatggaacccacagatactgacggatgactgtataatgtacatggatgacttaataaagggcactcctgaatccccatgtacatggatgacttaataaagggaactcctgaatccccacccccaacatgggtaattaaatcactagtacctttgagaccccattgtattccttactctgattgcatctcctttccatcccatgctagtaaggtgatcactactgtgaattttggatttattcccttgcatagtcttatcacacagatttatattcctatgatgaatacactttagttttgtccttttttttttttggacagagtctcactctgtcacccaggctggagtgcagtggcacgatcttggctcactgcaagctccgtctcccgggttcacgccattctcctgcctcagcctcccgagtagctgggactacaggcgcccgccaccacgcccggctaattttttgtatttttagtagagacggggtttcaccatgttagccaggatggtctccatctcctgacctcgtgatccacccgcctcagcctcccaaagtgctgggattacaggcgtgagccactgcgcccagcccagttttgtccacttttgacaactgggtttatataatgtgtattcatatagtatgtattgtttttatcctgaacattctttgtaggattcactgacgttgcttatgactgtagtttatttaggtagctatatatactacccactatttgactgtgtaagatccttatctattcattctcatgttggtggaccatgaattagtttcatcgttctgtttttacaaacaaaactgttgtaaacatcccatactgtgtcagttggggcacatgggcaacatttctctagggtatttacctgggagtggaactgcaaatcttcaccactgcatagataatgctaagttgatctctgaaatcatcacgcctgtttatattcccaccagcagtgtgtatgagttcattttgctccatattcttgccagtactcactattgccagacttgtacatttttattaatctcagggtaatggaatgtcattgtgttttcttttgtccttgctggtttgtagcaaaatggggcactattgtgtgtttactggcctttttgagttccttgtttttagtgcatgctttttgctcacctttcttttgggttgcttatctttttcctactgatctggaggagttctcacatactctttaatactcttcatactagtccttagttaaatgtgttgagcatttcttctactctattgcatgttgttattttctttttatggtgtcttttgaagagcaagcattcttaattttaaatttatgtctagtgctttttgtgttttgttgaggaaacacttttatcttgagttcatgaagatattcttctgttatcttctagaagctttatgtttacctttcacatttatatctatagtccactcgggtttgatctctgtgtatagtgaagtagaagcaattttactatttttaacatatgggtcccaactaacctagctccatttactcacaagtcagccctcgttgatccctgtcagcacctctgtcagcattggtctggttagatacatcatataagcattggtctgattagaaacatcaagaaaaaaatgacatgaaatccaggaagcagagggctccctacaggacagagagaaaggagtcctcaggaagaacaaccagtccagattggagccaattaaaaggggaatttgataaaactactgtcaagtttgcatagagtcaaaaaaaagttgcaaaaactcaggagagtttaagattgaattcatgataaataaatagaaaactaaatataacagggagtgaatcaagggaaatataccattattggaatgagaagtacaaaaatattatttggagataaataattattttgaaaacctaagaaaaaatgagagacatatataaaaataactacaaaacctaactgagaatctcaaggtcactgagataaatccagaaaaatatcatagccccagaaggaaaaatgattattttaaagaagctgatttttccaagaattctgtatatctaattataatcctcaaagaacttatcttgaaatacgcagttctaaggatcatctggaggaatagacctgcaacaatacataagaaatgttgaaaagggagagtgatgagaaaagacttccttgtcatatgctaaaatgtatggtgaagctttaataattaaagcagtatgagaagcagcacgtgacagagcaattactagactagaaagcccgatgcagacaccttagcagtatctgataatggtcagatcaaaaatcagcagtgaaggaaagaattaagtaaatgcatggatatttggttaactattatgaaaaaaaattatctctaaattccatttgggtctttggatcttctctttctgtcctcattacattcatgccttccttggcatttttctatgtatgtatgtatgtatgatatttaaagtagatgttttggccaggcgtgctggctcacacctgtaatctcaacactttgggaggctaaggtgggaggattgcttgagcccagagttcgagaccagcctgggtaacatagctccctatgttaccttgtctctacaaaaaataaataaaaaattagccaggtccggtgctgcatgcctgtggtctcgactactcaggaggctgaggtgggaggatcacctgagcccaggagatcaaattacagtgagccgtgatcatgtcactgcactccagcctgggcggcagagcaagaccctgtctcaaaaaattgaacaaataagtagctgttttaagatccttgcctgctaatttcattacctctatcatttctgtactcttttagtgattgatttccccttcttgctataggttgcatttttctgtttctttgaaagcctgataatttctgacaaaacatcaggtattgtgagagttttattttttttaatgctgatgagggctggattttgtggtattgggttgagtgttgggtttgttgtgacacatagataagattgcttgaggcttttattgttctggtggatccagggtagcttttaatttggggctcgttgagccccagtactacatcatgccctttctgaggaaggcacccaacgccctgcatgttacaaggcctcttgagccatgtgagccccagttgctcctgccttcccctggttctagttcaggctcccaagcctcaggcacctgcagatcagtgctcagcaggggacttgggggacccttgggacccttttgctacctcaggagctctgcctcacattctctctccctctcctgttcctgtctcccccacccgctgctcctgcacacgtgtgagcaccgcgtgtgtgcgttttccatgtctctggtagtctgccccacaaattctgcctgccgaggcctcccagatctccaggtctggctccctgagcccaggagacctctaggctcagtttgagctgccccctgcctctgctgcagcctgagaagggcctccagtcctcttcaggccgggcatctaaggctcatctcctttccatttcagtaatgacagtcctgctccacctgttgtcctgtttatgcaaactcttgtttcctatgacttattcagctttatacttgtttcagaacaaaactttttaatgccagaatttgtttgaaatcaatagactctactactacataagcttaattctttaaatgccttcctctcagataatttgagtgtatcataagaatttcatttcttagatctatccctctctttttacccttgtttctgtttaggggaatcatttccaacaagggcacttttgccttatctgctcctcaggggcatttggcaatgtctgacatgtttttggttgtcacaccagggagggggctctggtctctagtggatagaaggttagggatgctgggaagcattcttcagtgcacagcagagcctcccacagcgaagaaccacccaacattaatcagcccaagatgtcagtcatgccaaggttggaaaactttcctttagatgatttggccataaaatctttctctcaggagtcttggaacttcccatcataaaaacgtaggaccgttgcatgtttgttaggaaccctgagatgatatcaccacttttcttaaggtctttgtcatttcctcttcatgaacctgctaattctcttgggttggtttgaattgggcccatgctgagttttctttgttgtttttctcaacctttggatatgttggttctgacagaaaccattcttgtttcctctgcacttatacaacttctgacaccagatgtgtgggttttttccacaccaagcaatctccaattctccgaacaccagctgggtatcctgcagtttcattcaattctgacactgtccacatgtttttagtgttagatcccacaagttaagggccaagtcccacaagactgcgcctcacttcagatgacagtcacaaatctgggcctctaggagttctgagcgaccagctataaaataaatcagagggttccatgtccccctcctcagattgaatcatttttcagaatggctcaaaaactcagggaaacaccttacctacacttgagtaatgggtaatcaattggtctcagtgaccagccccatcttgagctacctagaggcctcatcctaagttatctcattactgtaaactctgggggacttgtgaatttaaagcaagacatgccgattactcaggaaatttcaagggctttaggagccagcgacaaagtccaaatatatttcttattaaaccacatctgtggatttatttttctcagccgacatgattattttggtatttctgctcttgaataacacaatagagatacaaaatactatgtactctatttgtgtggggggaaacacaaagaaacagaggcttaagaagaggtggagtaatattttcggtgactcagcatgtcagttgtggttattaataatagtgttgcttcgacttcaccatatgcaattctttttctttaacaaaaaaagttgattttagttcaattttagcatgaatattgagaagagtttatatagagtctataatttatggaatgccttagaagtctaggtaacactggtcctctgattttcacattttgcaagtgaaagtttcagtgggagaatatatatatactatattagtccattcttttcttttttttttttttttttttttgaggccgagtctcgccgctctgtcacccaggctggagtgcagtggtgccatctcggctcgctgcaagccccgcctcccgggttcatgccattcaactgcctcagcctcccaagtagctgggactacaggcgcccaccaccacgcctggctaattttttgcatttttagtagagacggggtttcaccatgttagccaggatggtctcgatctcctgacctcgtgatccacacgcctcagcctcctaaagtgctgggattacaggcgtgagccaccacgcccagcccctatgttagtccattctatgcactgctataaagagatacctgagactgggtaatttattttaaaaaaaaggtttaattggctcacatttctgcaactctacaggaagcatggctggggaagcctcaggaaacttataatcatggcagaaggcaaaggggaagcaggcatggtttatgtggctggagcagtaggaagagagtggggaggtgctacacactttacaacaagcagttctcatgagaactcactcactgtcgtgcaagagggaaatctgcccccttgatccaatcacctttcaccaggcccctcctccaacattggggattacaatttggcgagatttgggcagggacagtaattcgcaccatttcatatagcagcattttcttatatgccatttactcttgacatggctgtatatgtaattttgtattttagccacaggaagctctttttaacatttactttgattggctttgttaattacaaaacagaaataaatgagcaccgtcgtcttattcctgtctctagcactacaggatctaagtgtaagaattcagctcatatgcattaagggacatatagacaatatgaagttacagttcataaaatataatcagactgttaagcagtaagtgagaactaatcccatctaacctcattttattaatataaatgatgaactgaggctcaaaaggtttaatgccttccagaaggtcatggagtagttacagggaaggctgaacttgagtacaggtagtgtgttttctgctaaagtcatgatgtgcaagttctcgatgctgctggccctgtgttcttttctttctgggtccagcatcagcctctttttctcccaccatctccagaggaccctggctgttgatgagcacatcccaagcagggagggagtcaccctctccattaattaccttacatagttctcattgtccctgatatatggctgtgtagcttctcaagtgtaagcctaatttttctccttgtacttaaaattattttagattaataagaaaaaaaaaaccactgtccttgtaaattctttgaccccttgtttttctcatactccatcaaaatgctttttaaaagctcaagggttagaggtttccttttaaagaaaaattaactagtttggtttcctgaccttttgttgctaaaatcatctatcttgtaatggatgttgaatttttatagctttcccaatagtacatctatcacagaaacagtaatgtatatttgaggttgatagaacatttcagttttatgctagctttgaatgaaatcttttgtagagctttctggtctgtgatttgaatttttccttaatgagttagggacagctatgtgtgctgcttttttctaaattgaaatatatgattcgcatgttttcatctctacagcctggggatatatgctacaaagattgaattgaatgggtcaggttaatggattgggacacatattcccctgacgtttctggatgtgttctaagtgaaatatacttaaatacttaaataagatcttttttgaattgtgccagttggatattaaaatttgcaatgcattttgaatttttgaattttctgccagtagtaagattaagctccttttttactttatgaagaactagaaatatttttgaccacttgatccataagcttattctttaacttaaatctctacttctgtcattttttgtagctgtatgagagtatatgtgtcttggttttacattttagtaagaaagattatattttgtcttacatgctatagtaactcatcacttatcttgagtacggcatcccaataatttcaactctccaaacagacaagagccagacagtttaaaataaaaaggtcatggggaagaggtatgagatgaaaggttggctttgagtacaatctataactttgcccataggaagtttcttccatatctcacacagaacctattttttaatcttccttaaggcaaagctctaataaggtaaattatatggttttcatccacggcaggctacaagcagcaaaggaaaagaagtgattagactatgtgtgtgcattgcagtgaagcgggaaagagcaaacccagcagctgcaaaccagctcagaaagcactgtgtcttttactgttgagcagtggggccccctgcctgcctacctagccccaggattattccagtaatcattggtgtttgtaatgttgcccctgaatcattcagaagagggttagaatgtcctttgagctcttaagaacacagagaggcaagatacattttagaaagataagcatccctaaatttttttacccaccactcagctctgttcaattttaatatattgccatatttttatatcttttttaaagaaataaaatattgttgatatgtttggagccctcttctatcccctttctttcccttctatgagttgtactatcttaaactttcgtcatcattatttccatacatattttatccttacattgcagataaatacaccacacacacatacacacacacacacacacacacactcagagtaaatgataggagtagtcttttcaagattttatacaaatagcattatactgtacaaattttctgtgacttgattattttttattccattttgggattcaatctcgtattccattatcagaattatcacagtttattttttcgttcacatgttgatttttattatttttttcatttcttgacattacacataataccataatgaacatttttatacctatcgcccgtgtaagtatgtatgtacgctgtgctctaggatatgttcttagagacctagagggtcatgaggttttacacagcttcagctctactgtatattgccaaattatgctacaaatgcttgtacagatttcctctctcactagcagtatctgaaagttcctatagctgcagatatcctccaatatcaggttctgttaggttttttttttaattgttcatttcatgtgtatgaaattatatgtaatgttctaatttgcatattcctactttgtactgtggtggagcatagtttatattatggtttatttggatttctcttatgtgagttgccttatatattctattagctatttatcttatgattattgatgtacaggaatttcatctgtattctgaacactataaatttcaaatactttctcttagtctgtgacttacaaacatttataatgttttattatacagaaattaaaaattttaataaagtacagtagtttttgttgttattgttgttgaggagggcgtcttgctctgttgcccaggctgatcttgaactcctggcctctggcagtccacctgttttggcttcccaaagcactggaattacaggcatgagccactgttcccagccaagatcaaaaaaatatatatatatgtatatatacatatatatatacacacacacacatatatgcacacatatatacacatatatatacacacatatatacacacatatacatatacacatgtatatatatacatatatatacacacatatatacacatgtatatatatacatatatatacacacatatatatacacacatatatatacacacacatatatatatattttgtccccaaagcaaagctatataagaaaagacatacatagatacatatattttagaaagatgtatatacatacatatatacatatatgtgtgtgtgtctgtctgtctgtcttttcttatatagctctgcttttacatctttaggaaattcttccctaccatggaagtcatagatatttgcttataaaaattttaaaattttgcttttcacttattgttaatttgcttagagtttttttggttatggcatgagataaggacctactgttttctcctatggatatctaattacaccggtgtcacttaccgaatgatccttccttttctgttagcagttgctacatcgcatctatcgtgtgttaaatatctaatgtgcttgggtctgtttctgaggcatttgttttattgatctgtctgggcctgcatcaatttgatgtctggtagggtgagctcccctatcattgttggtattcttcaggagcgtcctggccattcttggccttatataaattttacatggaatttaaatatatatataatacatatggaaattaatttttaaaatcttgttggacttttaattgaaattgcattgcatttatgaattaattgaaatatacctaattaattgcaaaacaaaaatgtttgagtgtttaaaagaataaattactaggttttacaaaaattatttgtcaagaacagccaatttcccaagggttctgaatactcaaggttttactatattaagtgaatttgaaaagcacaccatttaaaatgttcattcatatattggggtgattcagaaaattaagtgtttaagcatctttcatttttcattatgcttgctaatttcttcatcaagtatttattgattgcttgttttatgtaggaccttctgctatagaatataacagtggttcaaaaatcccaacagccattggtagagcaaatgttcttatttttgtagtgcattatatatgacataattcacatttcttaggtgtacctcagttgatgttggaggaaaatattccccatgtttgctgtgtgtcatgtgtcagatagcccattcttttcaaatttgcctcaaaaagtccacctagtgttcagaaataatggaatgttgactctttttcatctaatcaggctggactaattatttgctaaaattcatttttgtctctctctagagacttgcagccaatacaggaagcaaacagcgtagtcgcctctctgttatggctcagtacctctgcaatgttcgacacatctttacgattccaggacaagcttttgtccccaaaccagaggtaagtttctgcttatttgttgtagtatatcggaattaggacgtttgttcccctgaggatgtgtcataggaaataacctctaggatctaacctttgtttatgtgcaaactgacactgtactttacttctgaataagaaccacaaaaatcgtaatatgaatagctagttcttactataattgttctccttaggtagggtgactaaatgtttaggttcatgcatgttatcctggtggcagtatcattcatcatcttcatcttcatgatgttactcttaaagtatccctgtatggaagataagttacacggtcacccaatatttgagaaaagaaataaaatacttttgtgttttctgttagagacctctaactaaagctacatcaaacattatttacttaacacttttttgggagaccttattatggtagtgttatttgtggtaaatcatctgtggaagaaacagttggatattaaactaggctttgatattatatgctagttatgtgagtaagtgctagttacagaaacagagtttctctgccaaaaattaaaattaaaaaaaccgttgtctgttttagcaaaaccactgcttggtgagttattacaagatgtgtactattaaaaactcatctttttcttcagtgaatgtatattgagcatttactgtttgaaaatgcgttgggtagcaaggggagtctacagggatatgagcctaatccgatacagagtctgccttcagggagttcacagcctcatgaggaatagaaatttctcactggtccctaaaactctcaaatataaggtcttgcagagtgtcccttgcatcatgtatccttcataaataacaagagatagcatggaaaaaaatgcattatgtgactatagatttagatatagattctagatttagaatggagaccctaaccaatagtgttagatctacttgtctgtcttgaagacgcctaagtgatctccatgctctttgctgccaccttcatacttctttgccatttggccagttagctgagcgttcaggtgactaggaagtcaggccatcttccccttacgtaacagacataattgtcagctttttctaaatcgagctcagggagcttgctatcggtgccacctcccttcagcatctcagacttcagagacattgcgaatgacttctcctagaataattagatccaagacagaatttgatgactggaggtatcttataggttatcttcaaatttaaaacatttgtgctttcagggactttctctcctagtacaggtggccattataatgaaaaaaataaaaataaaaaaccagtgaccatgtagcttgatttcttcttgtcatgcacatgtgtgtgcatataacattttaaatagtgtaagactcattatatcaaaaaccaagatccttactcataggcctctatagttatggttatgaccattatccagaatctccaggctatttaagttttactaacgggttcttaggatagatattcgaatatttttagtggaagctttctaactctgttttagttacctagttgagattatttgatggagtttcgaagttattatccactttatctttgatttagtggtaaggtacatatgtagtttatcaattaaaatttaccttctctgggattaaggccacaagaaaatatttattatttggaaaaaagctagctatgtctttgattcctttttttattgagggatgtttacgttttggcaaattaaacattttcatagcaatttacttcactttttttattatattgtaactattacatacaggggatttatttgtaatccagaaaagcacttatcaaggacttgtaggtgtgcaccaccacaccggctattttttgtagtttttcatagagacaggattttgccatattggccaggctggtcttgaactcatggcctccagtgacctacccgctttggcctcccaaagtgccgggattacaggctaaattttagttctaaaagaattctctgctgctttgaagtagttttaccatattagggcaaagcagaaatgttctgaagaaagccagaaaatattttgctgacagttacattgagcaaatgttttaaaaattcattttcttgggccgggcacagtgactcatgcctgtaatcccagcactttgggaggccgaggtgggcggatcacgaggtcaggagatcgagaccatcctggctaacatggtgaaaccccgtctctactaaaaatacaaaaaattagccgggcatggtggtgggcgcctcaagtcccagctactcaggaggctgaggcaggagaatggcatgaacccgggaggcggagcttgcagcgaggcgagatggcaccactgcactccagcctgggtgacagagcgagactccatctcaaaaaaaaaaaaaattcattttctcaaataagaaagaggaagagtttttacagagatgataaactaattcaaggctagtactctaactaaaccttctgcatacaagaagagaaagtcctagacgcacataattgcaacacaaggtaagataagctaagcgctaaaaatagaggttgggcagattcctgggtggttgagagagggagattaatgctcagaagaaatttactaacattcattacttattctcaatcaaaactctaagaatcagatatagagaatttcttttgtgatacaatgaggggcttacttacaaccactttcgggattttttcctgtgagagtctgctgtcccttctgtttctcaatcttttaactaactcaatcaagctttaatggcagaactttcactaccattgaactattacaatcctgttctgactagttgaactgaattactgctgaactttactcttattaagctctctagtgtagttcccaaaatttgaacccaaaatactttgtgtctgcaaaacagacaacctctgaggttcttaaaattagactaattaattggtctactttagtgtctcttaaactattagagtctgtagtatgtagcttttaagttagaatttttttaattttgtgttttcatttcactgttaatgaaattatttacatttacaagacaatgtcttttgcaatgcaaattcagaactaaaattgttttcatgacagaatacaacctgtttcttaagtttctcaagctagcttttctctattagcctctgtagatccctgagaatccacatatttctggggttccacgcttaatcttttttttcagctactctgcacatttctcaagtttgggaaatactgagctattagctagatcctcaaaattctgtctttttttttatgaattatggtgataggcttcataatctaacatagttcgtaaagagtggaaaggctttttagttctcaacactatttttttttttttttttttttttttgagacagagtctcactctgccgcccaggctggagtgcagtggcacaatctcggctcactgcaacctccaccttctgggttcaaatgattctcctgcctcagccttccgagtagctgggattacaggcgcccgccatcatgccccgctaagttttgtatttttagtagagacgaggtttcaccatgttggccaagctggtctcgaactcctggcctcaggtgatccatccgcctcggcctcccaaagtgctgggattacaggcatgagccaccacgcccagccagttctcaacactattctctactctgacttagtagaaaaatcatttagttatattatgagagttgtaacgggttctttttaattgacactggtagaggcagtagacttccaagtaagctagacctgctggaattccagtactgctagttttgagagcttggtcgggttaataggctgagtttactacatccagatttgaccaataataccacccttgaaggacatttgtgaggaatagaaataatcaatgcagagtgcctaatatgagtatctggcagtgaatgctgccagtcaaagtagttgttattgttatgatataaacaaatatttatggactaagttgtagtattctgatataaaaataaggattataatttttaagctatatatagaatttatatttaatttttcctatttggaagtgtggtatatagaacaagttaccttcaaacatggtacacatttaaagcataaatagtgtccattaaattgtagatgaattaatgatatatccatgacatataaagaaaagattggaacttgagacatccactcttgacttttgaagagcgttttagaggcttccaaccctgcttgttcacagctattgaggccttgacctctgtgggagatagtcttgagtttggtgggtggatgggtccacagaagagacaactgtttttcatgcttttgtgttttttgaaatctgacattgaggatgttatttctgctgtatatttaccttgtattcaagaatcattttggtatgaggtcagaacactagtgttttcctacttaactaagactcttctgtctttggtttgtattctcctcctagaatcagattgagatgggattttcataaaggtgatgtattgacaagggccctcaggagaaggggcatgagggtagcaggaaagggcaggggaagagctaagtaaacatattgttcctcctggaggagcttcagcctagaaccacggcgggaggagaagctgtgtagcacaaattgccccacgcgtctgtgttcccttgaggcaagggaccagcttattggaacctgtgccagccagtctttgcagggagcagtggggcagtcacttcccagtagaggcagctccatctctgggagccattagcacccatcagtgccagcagctgggggtggctgccctggcccagtggaaggagcttggccaagacacagcatcctgtctagcttcctaccagtagacaaagctgtcagattacttacatggccacctctctgccgcagttgcttggaagttctaaactaagtttcatgtttaattgctttagcatgcttcaaccaggaacatttaatagcattttttctctcttctttttgtttgtaactttagtctttcatctttatcagttgtttttatacttattatacctgcaattttataagttgcctcaaattcttttttaaagcccttgagtccaaaataaaaataaatataaaccaaaagccatttttataattaaagtagtaccagagtcatcctccttaaaaatcaggtaaaatacgtgttgaatagagataagagtatttgctattacaattttaattcagtactaggcatgcttccataaactgctcaagaataaatggtaagtattctaaatccaaggagggaaaaaacaaaattgcatttttgcagacagtacttttatgtatgtataaaatgcaatgaaattaatacaaaagtaactggagataatgataataatgtgatagtgttctgcagaattataggctaggctaaaaatctcaaaagtcaagtaagttagtatttgctaaagtcatgtagctgacaatatagtgatgaaagacatatgagaaaacattgtccacatccaaaactgaacttctgtctaactaccctagtgggcctgccctccctgcacctcttattcactatgctgactaatggcatcatccacccaggtcatccaagcctaaaccttggaggtcatcttaagcaccacctccccagacctttacaactgctgaccctcagaactagtcagtcgttaaccagcttctgacattacctaaatttctcccaaacccatcccaattttgtacccaattcttctgacttaatttaagtctatcatttttgtcagaattactagatgaattcttcagtcatatgtatagatatacacgtgctccacaggttaaaaaaaaaaaaagtatgatatttttggtcttttgggttttgttttggtaactttttatcaaagaagaatgaataagtatattcgataaattagactatgatttctcaaactcagaactgttgacatttggggccagataattctttgttgccagagtctgtcctgtgcattgtaagatacataaaggcatccctggcctcttcctactagattccagtagcactacctcagttaagataaccaaaaaagtgtcccagcattgccgaatgtcccctgcaggctaaactcaccccagggagagccactggattagactaagaaccattgagtaacactagtcatatgctttctgtgcaccaactgctttctgtgtatcatctcatttaatccccacgagaactctgagggtagatgccattcttaagcaaaccaagaccttagttaagtaatgcatgctgtgtaaccatgcacccacaccagggcttgcacccgggtagtttgactccagaacctggttccctcaggttggaaccatctccccacttactagctgtgtgaacttgggcaagttagggaacttatgtcacctctgtcgccctcagtgtcctgtaagatcctgagaatagtgcctacctggtagagttgttaggtttaagccaggactggcatgtgttaggttttagaccaggactggcatgtgttaggaagcacttgccatgacatgtcactgagaatgcagagctaaaaatgacaccacacctcccagtctagttggagatgcaatcatgtaaactcataatttcatgacttcttaaatagagcgtttttacacagtacacattacttaagtcttggtgtgctcatgtgagctattgtgaggattaaatgagagcatttattaaattcatagtttgttaaatagagcattttctgcgagtgcagatgcgggcttgaacttctaggctgtcaggattgagtttacaggagaggtccgtgtgaatcctgaagggtgagcaggagctttggtagtgagggagtgaggctgggaggagtgcaggtggaggaatgaacacagcgggataggaattcctgtaggaatagagagactccacatcatttattgcaggattgccacttccaaacaatacactgggccattatttcatataaaatggctggttttctgagagtttgaaacattcgtgtttctacttaggaagaaaatactccagagctaaataaaaattatttttgaagtatatatagaatgatatagcagatataaagataacttttactgtaggactaaaggctacatagactatgtaaacccagccacattcagcaaagtgagagaagaactattaatgggatcaaagcagttctagcacattaatttgcatgaaatcattctttgcatcagaattctttttagtatgacacttgtgtataaaataacattttgaccactcaaaaggaatacatactttaaacaatcatttaaccttctacaaaatgatccccttcctaattcccgtttgtgataataccttttcgttttagctattccagtaatagctaatgacattgttgcagaagagaatgtctacccagtaaaataggtataggatatgttagtctatttctgtatgcacaaatgaaagttatttacttacgtaaaatatattcttcccacttcctgagttattaatgtacaaagaaataatcttttttcccctttaccattgaatcattgacaatgactaagcttcaattaacaaataaattgttagaaacaatagtgggcagtgtttcctagatttttatttacttgctaaaatatttgaatcacatatcataatttatattttaaaagcattctttaaaatatattttgacattcattaattgaaacagcttatttgtaagaatgtttttgttaacatgaatgaaatttgagagaaaaagtgacaaaggtaacttttatcatccaaatatgaataaatgagagaggaagtgggatggtagtaaatccagaatgtgataggataaatgaacttaatctgtggagaatcctcttgctagaagcagaagaagggagttcttaaacattttaaaacaaacttttgttcttatcacttagcttgtacttaatgctttaagagtcctagagattttagtttggtttggctttctttactgtggtagcatttaccaatttcttcagttctgcctaatcttagtttgcatataatattgtcagctcttacaaatatatgtagatagttttctaaaatgaaaaagaaatgggctggtcacaggaggtggggacttgggatggatggttttagcagcatctgaatggagtaggcagctcttgtattcctaatgtactttcacacactgtagctttaaaacagaagcaagttgctgtgttgttgccaaccagatagcaaagtggataatattcttggttaacaccagggcaaggtactttttatacttggcagtttagttcttttataaaatccagtttgaaaggtgtatcagcaaattatcttgaaaaagctatcaaataattgccttatgaatgtaatcagaacctctttcaattataaatctttaagtaaaacatggaaacaataatggaaaaaataaagaactcttcagacagatgtaattgtatatgatagttttattggcattttaaactactttgtagttgttaaagtattttacattctactttctttgtagggaaagttaagcataattctgatttttttttaatctaaaagtcccatttggcacccaaaagttccatttcatatgcattactcagttatttacacataatccttcagattgtgtgtggaattgttctcgagctgtgtgttagagataggctgctgtgtgggtgggtcgagtctagcttctggattcctttttatacaggaggtgcagaaaatcatgccagagataaacaacagcattgcagaaatgaatccgatatagatagctcctccaggttcatgtttgttgctttctggaactgtcagatccagaaagtttgctatgatctcctttgtgtaccacactgtcgagattaaactagagattcctgcagacatgaaacagactcctccagcaaaggaagcatggctcttggtttctctgtcccctcctaagcgagtacatttcattcctactgtggaagtgcagatccccaaagcagacagaacacacgccaggaccatggtggctctcgcagcctgcacgtggatggggagggacagaatggagtgtttcagggcacagctgaacatcccagtgctgtaccacgtacagtccatccagagcccgtgcagctgtacaatggctgttatgatgttggagtccacatccacattcaccttccagttgggcagcagagtggctgtgagcactccagagaccccagataaggccaggatgaaagcaaggagctggagtcctgctgaggccatgatgttactgttaagtctgtcctcttagaaaatcctgatgtttaacaatgatggctgtcagaattctatctatttctgtgcagtagagaaccaaataacaaagcctaaggaaaaaaggcaaaaccaggattgagcgaaagaaagtaagtaaacaaaaggcttccctttagagtaggagccaagaacacatctgagtatcccccttctccagcccccaagcagatgaggatgctgtaggctggaggagaaaagctcccaccaggccttgaagactggtctgagtgatatgcatgggtggtgttgatacagggcataaagaaagcagttgcccacttaattctttttaaaactcaacatatgctgaaactgtagcgtggacatgtacgttgttaggagatttagacatttgaaattccagctatagtatctgataaagaattttaatagcattataggtttttcaaatgattttattttttatttttattttttttgagatggagtctcactctgtcacccaggctggagtgcagtggagcgatcttggctcactgcaagctccacctcctgggttcacaccattctcctgcctcagcctcccgagtagctgggactacaggcgcccgccaccatgcccggctaattttttttttttttgtatttttagtagagatggggtttcaccctgttagccaggatggtctcgatctcctgacctcgtgatccgcccacctcggcctcccgaagtgctgggattacaggcgtgagccaccacgcctcgcccaaatgattttatttttaatgaaaatactcaatacataataaggaagaaaataaattaaggccaccttttaaagatggtttataaatacattttagaaaagtatttaggaagtggctttcataaacagatctttatgacacacccacagtgccaggcacatagcccaagtgaaccatttgaggaggaaggacagcagtggaaagaagtctgagtcactggcatggttatccctaagttctagttaatacctgtttgcaaaatcctgactgaggttagtacttgttttacttcaggtgcctggtactcaaaacaattaagccactgttttttgtatataagaacatgaggtcctttctaattgggaccagaatcatttcctggcccaaatgaagccggctattctgaacaattcagaagtagtgatggcagatctcaaaaatacataccagaaataaccacatcattagttgtatgtgaaaggataccagaaataaattaaccctttattttctttgtttatttttaagaggaaggaaaagaccacctactttgtggcttggctgtgttttaagaaacaaaaaggctttcgattccatctttctattcctgttcccctatctagcccatctggcactgcttactgccttatttgagaaaaatgtaatggtttctgaaatactgcagtactgactttctttgtcattctgagttaattttgaatggtatgctaaagtggctctgtcgtgattcatatgtattttacaaaaggtgatacaggctcttgagtcaaagacacttgggccagttcttagctttatacctctctgtgcctcagtatcctcttctggaaaatggggaggattgaaatacttcgttcatagggttaaataagttaatacattttaagggcttagaccaatatttaagccacagaaagtcctcagtaatttaaaattgacatcattattagtatttttatttcttatgtattgtgacaattgatgtttaaaattatttggatcttttccctttttctcttccttccttgggctgatttattttcatagaatcttggagctgaaagaaacctcagacagacaatctcaagcatccttgttttttcagatcagaatgttcagataggatatcaccccatgtcatacagtcttcagcagccaacctgcagcgtccagatctctctccacccctcctacctcacagggtcatcccgcatcctttccccttttaccacaacacttcctgctgaaattctttctccccctgtgtgtttcccttgggaaccagggaaaacactgtatctggaggcaaaaagcaccattaactgtctacttcacccactcccctccccaccaaggaaaaaaaggactgtagaggatgttaataggccacatggctcagcttcagatgactcggcaaggagattgatgcctggctttggttaaatatttgaaatagtactaatccattgcctatatttaaagtataaactttgcatagctacaaacattgattctctaagacattagatcctagactatctggattgtgctgttctgtttttgttcataatctgaaaatgtaaatcttaccattttagaaaaggatttccctaggattttaagttcttaagagtcagacttatctgtagacatcagtgtgcctaggattcacctgctatcatacagtttcttttctgttttccaaacttagaccaaaatagaacaaaagttaaagtttctagaaaaaaaatcaagcacatgtttacagttttgtaatagctgctttcaagtttaggttttagcatttcggactccagccagcttgctaaattactgcctctggaccattttcagcttagggattcttcaagtgtggggttgctggaacattttctaacagcatctgcttgctcacttttctctctccctctctctttctttctactttgactgaataacctttgttgtcaatctatgttcagcttaccaattataatccttttcttcccattaactgatatattttataactttcagtatatttcagacatgaagacagtttgttcatcatgattaacaagtactggcagtgatcaattacagacagccaaaatcagtgtaaacaatatgacgtgtcatttaattagcatagtgcttgcttactgttgaatattggattcaaatgcttttttttctgcatagagaacttatgtagaaagaatttgttctccaaatgaaggtcactttctgctcatacaaatatactggcattttagctgcattgcgctttaccctccagccacgagtataataccgtttgtggcctgttctctcaaaatttctatctcgtagagaataaaggcacactttgttccagcagctgtggtggtggtggtagagaaatactgtgaaggcaagcagaagcagaggggaggggtcgcatgtaaacacttacatggtctacagtgaaaactctctcatggtcccaaaacacagtgcacacagaacagaacccaggcaccttcagtttatgaactactcgccaacagaaagtctgttgtagatttcactaaaatgtaaagtcagctttccagacaaggtttatttatatcaaaaataatatttaaaagcagatttactgcttataattcgaactaaataataccgaaagacctattcttagatctctaagcattaagacaggttttatttaccataccttttgtcagtagccttcactgtcttaactccttcggtcagttgtcttcaaattaacctcagttagttatggtgaagaaaaaccatatacgtgaggcttatttcagaaattctggatatgtttataaagctccaataagttaacttgaaaaaagcaaataaaggacaacgtagaaatctgagaggtaaaaactgctgatggtgttagaagataaataccaggttctccatctcattttttgagatgtgggagaattaagaaaggagaggcggggaagggagggaattgttgttacaacaggatttgttgaaacctgaaagctaaaaatgcttttgtgtcactgtgtacagaggaggaattatttgggtgctcacaaaaaggccttcttttcttttaatataatgttttagtcacatagttataacttatttttgaaattttctctatgttgaaagatataatgtattattttatgtcctcagttcaagaatgtggtctgaaatatttttaacaatgtcgtgccttgcaaatgagagttgagactcccttttttccctggtattcttgacttgtctggaacctgaattcataaaattgttaattttcaaaataatcattcagaagaaagttttttaacatatgtatttttttcaataaaagaaaaaagaaaacccagcaacaacttttgactagaatctgatcactaaacctacaggtatttttgtgtgtgtggtgccctgagttttcttgttattgcttccacttagatttgtggagtataactatagagattcaggaaatgttatgaataaattacccaaaatgatgtgatgagacacatcagataagactgtgatcagatactgaggttgtagcccatgaataatggtacagatggatttcactgccatccttttgggttctcatttttttcttcctcagtaagttttattctacaagctataaattcatagccattatacagaaagaagataattttattattggatttttaaatttaacaactgttaataaccatgttagactttaatcatttctttaaaagtagtaaataaacaaacacatgtttcggttatctggattttttgttttggtttgttttaatcctaagttttgcattgagcaagatactctttttcctcttttctaagtctaacatctgtgggtttgcttttcagccatagtattgattacatgttaagtcttagctctctaagtcgttgtaagctttatgtgtactggctttgttctttgattttatttcatgggaaatacaaacaattcagtgcataaataaatactggaagaagttgagttgaattgcagacactaatagtcgcagcagtgtcattagtgctgcatccgaagacacctcaccagggccctccagcgtcctggcttgtttcgctggtcgccatggttgttagtgcagacataagctttgtgaggctgactgatggcagatggagggacccggctgctccccactctaacctctagcataaggaagctggctggaggataaatgggttaagcatgctttaatgtacatttaatgtacatttctattctcaaaacatgttgattatttttttgccttgatgaaaacaataatcctataaaatattaattgcctgctttagaaggaaaacttctgaactggaagcaactttcgttagctatagacctttaatgaaggcagaatttcttatataaaaaaggagctaggaaagtagaagtgtaaatagaaatatagtttatcaacattactatccacttctgatgtggacattaaagggatattaatcttttaagtccagagactctcctaggtaagtcttatgacccctcagcttaaatctcttgcccagccctctcccctgaactcccaagttgtgtttctgtctgctgacttggcgtcactgatggatagctcagacctgtcatggcacaaaactgaattcctgaccattcccaaactgttctccccacggtcttcccaggttcattagtggcaaatccttccttccatttggccgcctgagatcttaaaagtaatccctgattccatacccaacatcccttgagtcaacaagttgttttgtttctgacttcagactagaacaagaaccttccacctctgagctcctcttctgcttccactgtagcgcaagacctctgaggtagaagttcagccccacagggcaagcacttctctctgtttcgttcatcactgattctcctgtgccaggatcagtgcctggcacatagtagggatacaataaatatttgcccaatgaatgaattcagaaactgactttaagtatataatgttaaactataaattgcacttgaatgattaaaaatacaattttatttctaagcaggactagaattttaagtaattttggaactctagtttgtcatcttgctaataacattatctaccatttataacctgctttccatatgccaggtactgtttaaggtgctataatacttaattctcaagacaaacctagcagataagaagaattttatagacaagaaaactggccgggcgtggtggctcacacctgtaatcccaacactttgggaggctgaggcaggcggatcgcctgaggtcaggaattcaagagcagcctggccaacatggtgaaaccttgcctctactaaaaatacaaaaattagccaggcgtagtggcacatgccattagccccagcttctcgggaggctgaggcaagagaatcgcttgaacccagcagacggaagttgcattgagccaagatcgtgtcatagcactccagcctgggtgacagagcgagactccatctcaaaaaaaaaaaaaaagaaaagaaaagaaaagaaaactaagctacagagaagtaacttttgactaaggccataaaatgagtaaattgcaggaatggggttgagtcccaaaacaatgatttttgaaaccctgacatactacatagcattgccccacctctaattagaaaagagcatatttgtaagtcctacctctcttggtagtttataagctatggaaacaaattaacccagaaatctctgtagctttacatatcagcatttacttctcagtcctgcaaagtccactgtgggttgagtgattgcagtccatctttcttctttagaatgttttcatttatcttttttttttttttaattttttaattttttttcttttttcttttttttttttttaattgatcattcttgggtgtttctcgcagagggggatttggcagggtcataggacaatagtggagggaaggtcagcagataaacaagtgaacaaaggtctctggttttcctaggcagaggaccctgcggccttccgcagtgtttgtgtccctgggtacttgagattagggagtggtgatgactcttagcaagcatgctgccttcaagcatctgtttaacaaagcacatcttgcaccgcccttaatccacttaaccctgagtggacacagcacatgtttcagagagcaccgggttgggggtaaggtcacagatcatgttttcatttatctttaagcagaaattactttagcttcccttagtgtgtggtgttgcttagtgatgttaatctggatgttcaggtaggcttttattgtctttctgaaagaatcagtaatttaactgagtattttggaaataacaataccacaccttttcatagagcttaacagtttataaagcattgcactccatcttctcatcactggatcacagtaacaggcttatgagagagacctctaccctaatcaaagaagcctggggatcagggttaaggggaaacactttggtggctgacattttcttcaagaaggagtttgaaggccaccactagaggcagtgtgaaccatcagagtgtttttttgtggtggaatttgtggtttaagagcacttggctatggtgtggaggatttaaagagatcagaattggagacagacagactctgggaggctgtggtaatgggagcgattaaatggaaataactagatgagtagagatattgcataggaaatggattcaagataaagggtgttcataaattctggaaatataattaaatatatataatgtagtcaagggcatcttcggtctgtaaaaagaacccaaaatttcctgtctacattttgaaaacaaatttgtagaaggggctttgggcttgtattggtttcagatgtttcagtggacaaattacagaaaaatctaacagtagactaaactataaggactcattgtttgaaagtcagtactgttcaaggttagttctgcaatttaaaactcttcttaagtattccagctcattctgtttttctgttccttcaaactgaacttttcttggctgtgtgaaggttgattatacaaattaggtcattcttgtcttacccaactaaatcagagtcaaggggccaggaggaaaaagcactcagggcacatagcactgtcgcacctgctccaaaatttacactttctataagcctagctgctgaaatggcctgctgtaacaccaagaccagttttagctagtagctgctgggaccacctactgtgactctaagactggttttacctgctgtcgtcactcaccaatcagagcttgtccacacccaaaagcttctctagtgccaatgagctttctttcaaaacaacacataacatttctctaataaaactcccaaccttccttttgttctttggacatactgaagaccacctggtctgtgtgtaggccctaatttacaattcttgcttcccaaataaaacattgaatttggagatttgtctctatattttaggtttacttcaacagctatgagatggctgcctcagctgaccctttcatcaagaagcaccatattctacggccaggtgtggtggctcatgcccataatcccaacactttgggaggccaaggcaggtggattgcttgcggccagaagtttgagaccagcctggccaacatggtgaaacccagtctctattaaaaatacaaaaattggccgggtgtggtgccacccacctgtatttccagctactcaggaggctgagacacgagaattgcttgaacccaggaggtggaggttgcagtgagccgagatcatgccactgcactgcactccagcctgggcgatagagtgagactctgtctcaaaaaaaaaaaaaaaaaggcagcaaagtattctagagttctcttcccctctcccaccaccaccccagactatgctttaatgtctcactttccagaactggctcatttggtcattcttttttttttttttttttttttttttgagacggagtctcgctctgtcgcccaccctggagtgcagtggcacgatctcagctcactgcaagctccgcctcccaggctcacgccattctcctgcctcagcctcccaagtagcggggactacaggcggccgccaccacgcctggctaattttttgtattttttagtagagacggggtttcaccgtgttagccaggatggtctcgatctcctgacctcatgattcgcccgctttggccttccaaagtgctgggattacaggtgtgagccacagcgcccagcctcatttggtcattcttaactgtgagcgagactggggaagtttgtatctggcttttcatcccccctggtgagctgtatccagcagggactcaggctggctttgtgggtgtcacagggctctagctgcacttctagtgaatttaatctccaggatttgagttgactgtgtgatactttcccaagcaactaggattgttccccaaacctgtgattctcatttctgcccacacgagggctttggaaaagccccaagaggctcaggcccaacccagtggcttttatttaattttctgggatggagccccatccttgtatttttcaaatgctgtccatttaattctaatgaaaagttggggttctgaattttaaaaaaaatgttgtgatggttaacactgagtgtcaacttgattggattgaaggatacaaagtattgatcctgggtgtatctgtgagggtgttgtcaaaggagattaacatttgagtcagtgaggtggggaaggtagacccgccctcaatctgggtgggcaccatctaatcagctgccggctcagctagaatataagtgggcagaaaaatgtgaaaagagagactggcttagcctcccagcccacatcttttctcacgtgctggatgcttcctatcctcaaacattggactcccaagttcttcagttttggaacttggactggctctccttgcttctcagcctgcagatggcctattgtgggaccttgtgatcatgtgagttaatacttaataaactcttctttatatatatatttaatatttacatattatatattaaatatatattatatattatatataatatatatttatattatatataaatatatttaatatttatatttaataaactcatatatatatattccattagttctgtccctctagagaaccctaatacaaatgttttttcttctttgctttccattcaatcttgaaaataatgacagttcagagtaagataaaatagttacctgttccagccctacaaatttaaagtgatttgacctaatcctaaaataatgttcttcttctgtcccagccttaggaaattaacagtatcagctatgaatatacgaatgtactgaccaagcatcttcagtgtgatgtctagtccgtttgataattatggtttattatgaattactatatttgtatgcatgttctatttctcagtcttttaataatattactagcagcatttatcaagtgccttctgagtttgtttagattgagagcctctctgaggtcctgtcttctctctgagggacgggagttgctcaggacctgcagcgctggggtccagaccctggcagttgccaatgtgctgccacacccatggcccggctgggcagcctcgaagctgcctcaggcagctcctgccacatccacaaacccaagcgggagcacagcccgggacaggaaacacagggcacgtccagatgctgctgcttcacagacaccaagggcgtggtttgtggaaaaggcctagttttaggaaggtcttttccctctgatcatccaggaactccagattaaatgtaacagaaaacctttatacaacaattgtcagttcttgttccatttgtgctttcttgaggattacacgtgcatctccctgaaattgtttaatctcttgggaccaagagacactgactcatcttgttgttgttattactaataggtgtaatttacatacatacatatgtacatttacataatttacacagtaaaaaaactcttcatccccctcaccacatttcttagtcttatttctcttgtgatctgagtttgctgtcattctcttggcctcagttcttcctaccacatctgctctgagaggaaacactatgtgactgtttaaaatctgttctttttttatgatcccaagaagaaagagaaaaaaacaaagatctgtaggaagaaaaaagggtgaggacagaacttctgcagaaataaatattgttacaataacacaaattgtaaactttaggataggtactgaccgtgtagttgatctttattgaaccagttggtttgaaatacttagaatgctgtcagctttaaggttttacagtggaaattctttccttaaattggcttttggacatggatcacaggtagagtgaaccaattccagaaaatgtgatctacattcacatttgtcagtattttctttttctatgacatgcataattatcatatcacaggcatcagtgacttgctgcctctacctgggattctccttacctgggaaagttgtaacctcgaggcccgtgatgtcctaaagtggactgtcattagcttggtggaggtacttgaagagcaagcagacactggagggtggggaaaccaagcatccggaggcactcatcttgctccgttgttttacccgacagtgaagtggctctcccaagcccctgtcctcctgcgttccattttgtggtgcctatagcctgcaagatgccatatgcttcctgttcccaaccacccaggtctgcccgtgatcatcccacttcgaactttgaatccttcttatatgttgttctttaaagtcttactgattattccctgtggtcttttttttttttttcactagcccttctgttgtcttaagttatggctgtgtcttggctatttacatagtaacttcctcatcattttttcatctccactatcttgtcctctaatggtcttgaacaccgtgagagtgttgaatgaagacccttttgtagacagtggccagcattgtttctgtgtctgtgcatgtggtcgtgacttagcttttgggcatatgataatcatcaggaactgagttgtacgtctcttcagtgtcctctgtatatcatgttgattacagttctcagttgtaatatctaatatctaagatttaagatttaatatctccttagcccgggtcccttgtgagttccaagtgctgctctgagctgataaccagtcacgtcctagacaccctggcctggaaactaggacatctgcctcgggcctgttatggccaaggctgctaacactgagaaacagtcttagcttgttacagcgttgacgtatagggttagaaaggcaaatatttaaattcattttaaatcctttcatttgaaattttagtaggtcattttggtatactgatggactgagtttggaaaaggctggcggcattaaactagaatattttaagtacttctgatgcctttgtactgatttcttttttgtaatcaaacccattaatagacttaaaactcaaggaagaaaaaataatacttgtaattttaaataagcattcaattataagtaaaaaacatttttgtattcgttaccatagttaccaagcagctttcctatagttctagaaaaaaatgggctccatcattcagagtaattctgaaaggtgcctttgggggaaagggagaggaaggggtggtacaggagaggtcctggccgtcccagaagcaggagacataactggaagagctttgttgacgctgagttttacagaatctcccactaaatagtaactgcatttgtgaggggaattctcttttagccgtgacataatataagccaacttaacagagtattggaattgtattcaaactttagaagtcgacgctatagtttacatggggtactactatatttgttcagggttttaaaactttatttaaatcaagcaaaagttagacacttcctgtatttgcaaataccaactatatctcaaaggaatgaaatcaggcaaataaagatgaggccaaaatttaaaatctaaggaagctgaaagtggcagtttctgtactggaagagagtgcatctatctctgtatttgtgcttttggtcttaatagtttgtaagccttatgtagagttttgataatatttcatggttttaggcctaggcagggattagattttatctcagattttgctaagagtatttcttctggagactagcaggctgctagtaagaattgatagaattggctctttgtcactgggagaactggagttgaagggttacaggagatgagtcctggagaacgggaggcagggacaagggtgccaggaagctcaggggatgaaagggaaatggagagtccagtgagagaaggctggcgaggtgtagagagtggccagacacatgcctgacagttgggaccacttctctatacaaatcaggaggaggcgaggtaggcaggatagttcagagtttgtgggaaggaacctgacatctgaagtcagtggagtgtgtcttgggctgctgcctgcactctgccattcatagatcaggtcttctttttccttccccagaactgccctgagctgaaaccacctttcttctctccctatagcagtacatctaccccacctacaccctgcatccactccacagccccttgtcttcttcagtccctctttccctgatgaccacagacctctccaagctgggcactgttctatggtgcgttttgttaaagtctaagggaagtcctgtaggaagaggtagttgttactaaacttgaggaaacatgaaacaacatatagcacacaattcaaaaaacttactaaaatttattaagagcatttgacatcttagttaagtcactgttcataactactgttccaccatagaatcttcacaagaacagcctgctggacttcacaagaaggctgatggatgttgggggtgggcatttggggtgtggaaaggccgcttggcacattctcagcatgcgccagcccacaccgccccttaccaccaaagccttctatttcccattccatccagtaggagcagctgtagctgacctgaaaccttcggggacaggctcattgattgtttaaatagggaggtgcaagctctcaggggtccggggccttgatgacacagctcaggcaccacaggcacctcccacaagcgcgtcaggctgtgtgaggctgagcacagcttattttcactttcttgtccataaagtctcacatcatattcagttgttttccttctaccctaaaagaaacacaaccagaaaagccagtctcccattttcatctgtttaaggaattatgtagccacaaggatctttagaagcaagtcctcttaggagaaaatgacaacctctatgggatttcaacaatggagttccttttgaaaagcagtggtgcagcccacacctcctaaattgccgtactttcttcgccttttgttgagtctgtatgagatcctcattaacaagtttaacaattcctggagactgaggcttttgtcaattatgacgagacttcccatttcctagaccatggtctccgttagcatttttgtgtgtgtagttactgttttgaatccatttccctctgtctttaaatgtttttcctttggtatttgaatttgtccttgtgaatcaccatgagtccatttttggaacaaatcagggtataaatctcttataagatatgcctgaaaagttttatcttctgacaattaaagaatctccacagctggcagtagcttaaacactatcaaacagtgacattttttgatggtttccattttcaatttcagtcctgcctatgcctttcggggcatttaaaattgctactagaaagttctgtggcttttcagactacactcatgaattcagtccagctgattaatcagtgtctaccgaaaataagtggtgtctctatctgggaagtttagcactgagtggtccctgggggcctgtctgccatctctctgtgtcttgaagctgctgctgcggcttatttttttcctcattcaaaaactaaaatattctaatgccatctattatctgctgactgactttaatgatttggattgatttttaagccattgtgaaactgtgttttaaaattaagtgaccatcaagcacaggtctggtggatgtcattagagaacaggtgcagccggctgatttctccatgtcatttgcgaatccagaatgtaccatcttccatgcctagagatgaaaccgaagtacgtggaaaggtctgtttatgaaaacaggctgttgacagcccatcctcctgttttacaaggatgagttgattgatcacactatgccacatatcatgccacagaatgataatatgtttgcttacaacgaaggtggacgtgggcgtggtgcacttcactcccttgatacagcccaagatagagcagccattcaagctggtggaaaaagtggttcagaatgtatttcagttccgaaggaaatactgccatcgagggctcaggtaagaatgccttttcttctcttcagttgcagtctttataaaatcctcaggcactttttaagagtgagaaccttgtttgctctattcttaaagctctgagtattacacttagttcaggcctgtgacggacaagacttcactgccaatgaggagagagcaaagacttgctagacctcaggtggcctctctcagggtggcttaaacataagcgcagcctggagttggtgactgcacagctcacagaggctctgtaccagggagctcgtggttccccagtgaggactcaagacagataataatgggttttttaaatgcttgctttctaccgagttgccctatctcttctttaaggacacacttgagaactaggaagcaaatatgacttctgagcagccaaaatcatatcacgaagtcctcacgtaagcacgtttccatctcacagaaagctgctgctgccaagaggctctcaggaatcactgggaaaacctgacagggcctggtggtctagaggtcgcccacctcgatgggctctgaaggaccacagccttgttgcagatccagaaagagccaagaagctgtttagttaagcccagtgatagtctgcttaagaaggcaggaaagtgtatttgtaaaagatttccatctacgataatctatccatagtccgctgtttaaagaggctcggcgtgagaggcacatatttctcattttctaaaacctcctcacatggcttcattgtaattctctctttcacaaggtccgaagtgtccctttagcatatgaaatgacagcagattattttaggggccagctgggcatcagctcctaagagtgctgcagtccacaaagcccattgctgaggatgccagatggcagaagctggagcctcagcctgccacttgttgcctctaattaagccagaattcccaccttaccagatagttcctgcttctctagcagagacttaaggtgcagagctggtgacagagatgccactggccagccattttggctgcagcccccagctactgtgcactgctggtgagtgaaacagaagctggattttggctcacacttacccctcacgcagagcaggacccacacagctgtacctgatagccctgattcatgggggaggagggagcacaaaactatgtccttttatgtgcttttggaaatcctggaattggtctgagcctagagctggcactagcgtttccaaggcaaccccccagctaagtgaagggccctattcatttcagatacaccatcctcaggacagacatggaccagatactgtgccacccagggtaacaggtcaaaggactttgacttattggtgttcttcagatattagaaactgccatcatcaggccctctttgccatgaaactgaactcaaagatctgtcacctcaccctgaaagtgtgggggacatgcaattccttgttgaaaggaccatcagcctataagcaacatgctatctatctcccctggccatgacaccttccaagccccttgggatgagctctgtaagagccctgagacttgaagaaaaatgcaatccaggcctaactccgcagcatttcaagcagttctgctattcattttaaaacaatggttcaatttggatagatgaaatttaaaatatatcctctacttcaaatcagttttaaagatgcttgaaaaataacaagaggaataattatattttcctatcagctattttcaaacttttagcaaaaaaaagtaactcttttagcgtgaagagttctaaaggctgatacattcaaattctagagaatcaaaactgatgatttgtcacacaagaaataatacaactttcacattgaaacatgaggcacatcaagcttatgtttctacaagaatgcagctgagcagatgttactttaaacttacttacttacctttaaaaagtacatgtactgatttagctttggagaatgctttcccattgtgtgcttgcctcgcgcctcaggttagagctgcctcagtggcgggccgtgcctcttatctggtgctatataatccaagaggctcctgccactctctccagctgtcagtagccagcaactgtgttgtgttgttttcaaatgagggttaaaaagtgtcatgatttgcagaatttaagtaaaattcttatttttctgtctgtctgtcttcccctcagaatgttattccctgaagcgcagcgcttggaaagcacgggcaggctgttagagttggcagacatagaccctactcttcggccccgccagctctccatctcacactttaagagcctctgtgatgtatacagaaaaatgtgtgatgaagacccacaactctttgcatataatttcagagaagaactcaagcgaagaaaaagcaaaaatgaagaaaaagaagaggatgacgcagagaattacagactctagctgctgcctgggggcgagcagcctaccagatgtcgatttgcactacgtggagcttcttatataggtactcttttgtctttacagaatgacgatacaaatgccaatgaccagatgtgacttattttccttttactatacagcttggcagagaaaataaatatca

SEQ ID NO: 15854 - DNA, 38720 bp, Homo sapiens
gtttcttctcgttgatacattcactcctgccttttaagtaaatttataagctcagagacttttttaatatttaactaaggacttcaagaatcagttttgtgttgggcatggggcacttaacacaatatgaatttatagataacttagctataaagttttttgaattaagtgccaactcttcagtactgtgagagtgtggtggtagagtaggtggaatgaagaagaaaaagactacaagggaaaaagtgctttttttcccctttttgctcacaaagagaaggaaaaggaaagaaagcaaatgattagtacgtggaaataggttgggaagtagctattgttaaacatccagggtaattcattaggtcgataaggggtatggatcaacaaatattaagattagggatgctctggtcagaggagtatctcggagtgccaagtggagactggcatcgacaggtgactttctacttggctaaatctacgcatatattaagttaaagatcttgatgatatatagaatcctttgtatatatatttaggctataaagatttagttaaattaagcttatctttcatatggttgactcctgattaattctctgtatttcatgataatgtccttagtctctaatttaaaaacttattgataggagtgagtttattgctaaatctatatagaaatagaagtcatcctgaaggtcaaaattacactaatatatttgtaaaattgtaagctagtgttgtactgtctgttactatccctaatcattcataggtgttaaaatgaaacgccaccattgtctgttgcaatagacgtgatgcagtatttgttcattaatgatcacccctggtctctgacttttttaactgattttttaaatgcacaggtttaaaaagtttagttttgttactcgcataagtatatgagctcattttactgatctttttataaactagatgctttctgatgcagcacctgggaaactgagaattgttcatggagatgtcttgacatttaaggtagaaaaggctttttcagaaagtcttaaaagaccctgggaagatggtgagtgcttttgggtagttataaaacatttcttttatgattatttatatcacaaatgttcattttatgatacatttattacaaatgtcttatatgtttatattttaaattatctgaacagaattaaataatgtgtattataattttctcttgctacttgcttccaaattataaaatctagttactttttttagttctaattcatttgtctcatttccaaatgttttgtattctgtgcaaataaactaaccattttttgtgataccatataaggatagggtaaactatcaattgttatttgttccaaatagtggaaaaaaagaagtgctttagtaaactaagccatgcccaagccattgttttaactttttctattattcttcacattcaatgaccaaccaaggcagtcttcattcacagacagtgtttattgggtacctgctgtgtgcagcccttcagaatgcatagataaatagggtatgtttcttcctataacagactctcagaacaaacggaggagggcttaggtgcctccacatctggctgcccccatgtctctggcctcccccatgaccagactccttcagttgggccgcacttgcagtctctgccagctgacaggccctcctgttcttagcatgcagtcttcaggtttctgccccagcccagccacactggaaccacaatgccttcctcattacctgtttcaaaccttatctgactgagttctcccaaattcatttaactgtaatccatagtcttccggaggatttctcttgctctttttctccctgataccagcccctcctgtttttccttttacatttgtgaactttttctaactattcttagctggtggttgtttttctacccactttgtacagattgttgtttctggggtttttctttttgggcaaatttgccagattactccattcctatggtttcacttaccacctacgtattgcagacattcacatctttatatgctgcctgtacccccttcctgggcatctgacctctgacagcttcatctaggtgttccataggcactttaacctcatcatgtccaaaatgaattctctttttcctcaagccaactctttttcctgtatttcctaggccagaaattcaaggacttttctctgagtaactgagcagtaattaagtataattttttcctcaataatccaaagcagattgtgagaaaacattgcttttgaataataagtgaaaaaaaaaatttagccatgtctatttatatatttttctttgatgctattaatatccagtctgattttactcgtcactgaaattgtattcagaatatattgatggaatcatttcaggttgttttttcctctgccaccagatcctccaaatgtacatattattggaaatctgccttttagtgtttcaactccactgattatcaagtggcttgaaaatatttcctgtagagatggaccttttgtttatggcagaactcagatgactttgacttttcaaaaggaagtggcagaggtaagttttaacattttgtgactattttatcacatgttcaaattccaaagcaaaataataatactgcatttttaccacagtctgtgttttctaagttaatatcttattacacacacaagaacccagcagcagctcagccaaaagttaaaactttgatgatgatgacagatgtaactgctgtgggcttctgggaaaacatgaatgatgtatgttagccaaggaggtagtgtggtaaacacagggatgcaacagccatcgatgccactggagaaagacaaaagtgatgccctgttggccatacccaggattggcacgtgataccttaaaattgatcctttaggcttaatggcatggcagttaaagaatatgataattggccgggcatggtgactcatgcctgtaattccagcactttgggaggccgaggcaggcggatcacgaggtcaggagtttgaaaccagcctggccaacatggtgaaaccccgtctctactaaaaatacaaaaaaaaaaaaaaaaaaaaaaaaattagctgggtgtggtggggggtgcctgtaatcccagctactcaggaggctgagccaggagaattgcttgaacctgggaggcggaggttgcagtgagcaaagatcgtgccactgcactccagcttgggtaacagagcaagactctgtctcggcggggcatgcgggaagaatgtgataatcaatttggagctgagaaagagaaggggattgagggtctcattattcagtatataaattgtacttcctccctcacctcagtgaagtctgctatgcctgcattcccatggcagaagtgttctgggttcactctagaaagtaaaccctccagggtaagcaggggtggtgcttgagctgcaaaggtataaggacggatgtgcagactcttaagtggttttttaaaaaaattttattatgacatataagtacaagagtatacagccatcccttggtatccataggggattgattccagaacccccacaaataccaaaatctacaagtgctcaagtccctgatgtcaaacagtgtagtatttgcatataacctgtgcatatcatcccatatactttaaatcatctctacattatttgtaatacctaagacagtataaatgttttataaatagttgttacactgtattatttgaggaataatgataagggaaaaatctgtacatgttcagtacagatgcaaccatccttttttattccctgaatatttttgatctgggattggttggatccatggatatggaacccacagatactgacggatgactgtataatgtacatggatgacttaataaagggcactcctgaatccccatgtacatggatgacttaataaagggaactcctgaatccccacccccaacatgggtaattaaatcactagtacctttgagaccccattgtattccttactctgattgcatctcctttccatcccatgctagtaaggtgatcactactgtgaattttggatttattcccttgcatagtcttatcacacagatttatattcctatgatgaatacactttagttttgtccttttttttttttggacagagtctcactctgtcacccaggctggagtgcagtggcacgatcttggctcactgcaagctccgtctcccgggttcacgccattctcctgcctcagcctcccgagtagctgggactacaggcgcccgccaccacgcccggctaattttttgtatttttagtagagacggggtttcaccatgttagccaggatggtctccatctcctgacctcgtgatccacccgcctcagcctcccaaagtgctgggattacaggcgtgagccactgcgcccagcccagttttgtccacttttgacaactgggtttatataatgtgtattcatatagtatgtattgtttttatcctgaacattctttgtaggattcactgacgttgcttatgactgtagtttatttaggtagctatatatactacccactatttgactgtgtaagatccttatctattcattctcatgttggtggaccatgaattagtttcatcgttctgtttttacaaacaaaactgttgtaaacatcccatactgtgtcagttggggcacatgggcaacatttctctagggtatttacctgggagtggaactgcaaatcttcaccactgcatagataatgctaagttgatctctgaaatcatcacgcctgtttatattcccaccagcagtgtgtatgagttcattttgctccatattcttgccagtactcactattgccagacttgtacatttttattaatctcagggtaatggaatgtcattgtgttttcttttgtccttgctggtttgtagcaaaatggggcactattgtgtgtttactggcctttttgagttccttgtttttagtgcatgctttttgctcacctttcttttgggttgcttatctttttcctactgatctggaggagttctcacatactctttaatactcttcatactagtccttagttaaatgtgttgagcatttcttctactctattgcatgttgttattttctttttatggtgtcttttgaagagcaagcattcttaattttaaatttatgtctagtgctttttgtgttttgttgaggaaacacttttatcttgagttcatgaagatattcttctgttatcttctagaagctttatgtttacctttcacatttatatctatagtccactcgggtttgatctctgtgtatagtgaagtagaagcaattttactatttttaacatatgggtcccaactaacctagctccatttactcacaagtcagccctcgttgatccctgtcagcacctctgtcagcattggtctggttagatacatcatataagcattggtctgattagaaacatcaagaaaaaaatgacatgaaatccaggaagcagagggctccctacaggacagagagaaaggagtcctcaggaagaacaaccagtccagattggagccaattaaaaggggaatttgataaaactactgtcaagtttgcatagagtcaaaaaaaagttgcaaaaactcaggagagtttaagattgaattcatgataaataaatagaaaactaaatataacagggagtgaatcaagggaaatataccattattggaatgagaagtacaaaaatattatttggagataaataattattttgaaaacctaagaaaaaatgagagacatatataaaaataactacaaaacctaactgagaatctcaaggtcactgagataaatccagaaaaatatcatagccccagaaggaaaaatgattattttaaagaagctgatttttccaagaattctgtatatctaattataatcctcaaagaacttatcttgaaatacgcagttctaaggatcatctggaggaatagacctgcaacaatacataagaaatgttgaaaagggagagtgatgagaaaagacttccttgtcatatgctaaaatgtatggtgaagctttaataattaaagcagtatgagaagcagcacgtgacagagcaattactagactagaaagcccgatgcagacaccttagcagtatctgataatggtcagatcaaaaatcagcagtgaaggaaagaattaagtaaatgcatggatatttggttaactattatgaaaaaaaattatctctaaattccatttgggtctttggatcttctctttctgtcctcattacattcatgccttccttggcatttttctatgtatgtatgtatgtatgatatttaaagtagatgttttggccaggcgtgctggctcacacctgtaatctcaacactttgggaggctaaggtgggaggattgcttgagcccagagttcgagaccagcctgggtaacatagctccctatgttaccttgtctctacaaaaaataaataaaaaattagccaggtccggtgctgcatgcctgtggtctcgactactcaggaggctgaggtgggaggatcacctgagcccaggagatcaaattacagtgagccgtgatcatgtcactgcactccagcctgggcggcagagcaagaccctgtctcaaaaaattgaacaaataagtagctgttttaagatccttgcctgctaatttcattacctctatcatttctgtactcttttagtgattgatttccccttcttgctataggttgcatttttctgtttctttgaaagcctgataatttctgacaaaacatcaggtattgtgagagttttattttttttaatgctgatgagggctggattttgtggtattgggttgagtgttgggtttgttgtgacacatagataagattgcttgaggcttttattgttctggtggatccagggtagcttttaatttggggctcgttgagccccagtactacatcatgccctttctgaggaaggcacccaacgccctgcatgttacaaggcctcttgagccatgtgagccccagttgctcctgccttcccctggttctagttcaggctcccaagcctcaggcacctgcagatcagtgctcagcaggggacttgggggacccttgggacccttttgctacctcaggagctctgcctcacattctctctccctctcctgttcctgtctcccccacccgctgctcctgcacacgtgtgagcaccgcgtgtgtgcgttttccatgtctctggtagtctgccccacaaattctgcctgccgaggcctcccagatctccaggtctggctccctgagcccaggagacctctaggctcagtttgagctgccccctgcctctgctgcagcctgagaagggcctccagtcctcttcaggccgggcatctaaggctcatctcctttccatttcagtaatgacagtcctgctccacctgttgtcctgtttatgcaaactcttgtttcctatgacttattcagctttatacttgtttcagaacaaaactttttaatgccagaatttgtttgaaatcaatagactctactactacataagcttaattctttaaatgccttcctctcagataatttgagtgtatcataagaatttcatttcttagatctatccctctctttttacccttgtttctgtttaggggaatcatttccaacaagggcacttttgccttatctgctcctcaggggcatttggcaatgtctgacatgtttttggttgtcacaccagggagggggctctggtctctagtggatagaaggttagggatgctgggaagcattcttcagtgcacagcagagcctcccacagcgaagaaccacccaacattaatcagcccaagatgtcagtcatgccaaggttggaaaactttcctttagatgatttggccataaaatctttctctcaggagtcttggaacttcccatcataaaaacgtaggaccgttgcatgtttgttaggaaccctgagatgatatcaccacttttcttaaggtctttgtcatttcctcttcatgaacctgctaattctcttgggttggtttgaattgggcccatgctgagttttctttgttgtttttctcaacctttggatatgttggttctgacagaaaccattcttgtttcctctgcacttatacaacttctgacaccagatgtgtgggttttttccacaccaagcaatctccaattctccgaacaccagctgggtatcctgcagtttcattcaattctgacactgtccacatgtttttagtgttagatcccacaagttaagggccaagtcccacaagactgcgcctcacttcagatgacagtcacaaatctgggcctctaggagttctgagcgaccagctataaaataaatcagagggttccatgtccccctcctcagattgaatcatttttcagaatggctcaaaaactcagggaaacaccttacctacacttgagtaatgggtaatcaattggtctcagtgaccagccccatcttgagctacctagaggcctcatcctaagttatctcattactgtaaactctgggggacttgtgaatttaaagcaagacatgccgattactcaggaaatttcaagggctttaggagccagcgacaaagtccaaatatatttcttattaaaccacatctgtggatttatttttctcagccgacatgattattttggtatttctgctcttgaataacacaatagagatacaaaatactatgtactctatttgtgtggggggaaacacaaagaaacagaggcttaagaagaggtggagtaatattttcggtgactcagcatgtcagttgtggttattaataatagtgttgcttcgacttcaccatatgcaattctttttctttaacaaaaaaagttgattttagttcaattttagcatgaatattgagaagagtttatatagagtctataatttatggaatgccttagaagtctaggtaacactggtcctctgattttcacattttgcaagtgaaagtttcagtgggagaatatatatatactatattagtccattcttttcttttttttttttttttttttttgaggccgagtctcgccgctctgtcacccaggctggagtgcagtggtgccatctcggctcgctgcaagccccgcctcccgggttcatgccattcaactgcctcagcctcccaagtagctgggactacaggcgcccaccaccacgcctggctaattttttgcatttttagtagagacggggtttcaccatgttagccaggatggtctcgatctcctgacctcgtgatccacacgcctcagcctcctaaagtgctgggattacaggcgtgagccaccacgcccagcccctatgttagtccattctatgcactgctataaagagatacctgagactgggtaatttattttaaaaaaaaggtttaattggctcacatttctgcaactctacaggaagcatggctggggaagcctcaggaaacttataatcatggcagaaggcaaaggggaagcaggcatggtttatgtggctggagcagtaggaagagagtggggaggtgctacacactttacaacaagcagttctcatgagaactcactcactgtcgtgcaagagggaaatctgcccccttgatccaatcacctttcaccaggcccctcctccaacattggggattacaatttggcgagatttgggcagggacagtaattcgcaccatttcatatagcagcattttcttatatgccatttactcttgacatggctgtatatgtaattttgtattttagccacaggaagctctttttaacatttactttgattggctttgttaattacaaaacagaaataaatgagcaccgtcgtcttattcctgtctctagcactacaggatctaagtgtaagaattcagctcatatgcattaagggacatatagacaatatgaagttacagttcataaaatataatcagactgttaagcagtaagtgagaactaatcccatctaacctcattttattaatataaatgatgaactgaggctcaaaaggtttaatgccttccagaaggtcatggagtagttacagggaaggctgaacttgagtacaggtagtgtgttttctgctaaagtcatgatgtgcaagttctcgatgctgctggccctgtgttcttttctttctgggtccagcatcagcctctttttctcccaccatctccagaggaccctggctgttgatgagcacatcccaagcagggagggagtcaccctctccattaattaccttacatagttctcattgtccctgatatatggctgtgtagcttctcaagtgtaagcctaatttttctccttgtacttaaaattattttagattaataagaaaaaaaaaaccactgtccttgtaaattctttgaccccttgtttttctcatactccatcaaaatgctttttaaaagctcaagggttagaggtttccttttaaagaaaaattaactagtttggtttcctgaccttttgttgctaaaatcatctatcttgtaatggatgttgaatttttatagctttcccaatagtacatctatcacagaaacagtaatgtatatttgaggttgatagaacatttcagttttatgctagctttgaatgaaatcttttgtagagctttctggtctgtgatttgaatttttccttaatgagttagggacagctatgtgtgctgcttttttctaaattgaaatatatgattcgcatgttttcatctctacagcctggggatatatgctacaaagattgaattgaatgggtcaggttaatggattgggacacatattcccctgacgtttctggatgtgttctaagtgaaatatacttaaatacttaaataagatcttttttgaattgtgccagttggatattaaaatttgcaatgcattttgaatttttgaattttctgccagtagtaagattaagctccttttttactttatgaagaactagaaatatttttgaccacttgatccataagcttattctttaacttaaatctctacttctgtcattttttgtagctgtatgagagtatatgtgtcttggttttacattttagtaagaaagattatattttgtcttacatgctatagtaactcatcacttatcttgagtacggcatcccaataatttcaactctccaaacagacaagagccagacagtttaaaataaaaaggtcatggggaagaggtatgagatgaaaggttggctttgagtacaatctataactttgcccataggaagtttcttccatatctcacacagaacctattttttaatcttccttaaggcaaagctctaataaggtaaattatatggttttcatccacggcaggctacaagcagcaaaggaaaagaagtgattagactatgtgtgtgcattgcagtgaagcgggaaagagcaaacccagcagctgcaaaccagctcagaaagcactgtgtcttttactgttgagcagtggggccccctgcctgcctacctagccccaggattattccagtaatcattggtgtttgtaatgttgcccctgaatcattcagaagagggttagaatgtcctttgagctcttaagaacacagagaggcaagatacattttagaaagataagcatccctaaatttttttacccaccactcagctctgttcaattttaatatattgccatatttttatatcttttttaaagaaataaaatattgttgatatgtttggagccctcttctatcccctttctttcccttctatgagttgtactatcttaaactttcgtcatcattatttccatacatattttatccttacattgcagataaatacaccacacacacatacacacacacacacacacacacactcagagtaaatgataggagtagtcttttcaagattttatacaaatagcattatactgtacaaattttctgtgacttgattattttttattccattttgggattcaatctcgtattccattatcagaattatcacagtttattttttcgttcacatgttgatttttattatttttttcatttcttgacattacacataataccataatgaacatttttatacctatcgcccgtgtaagtatgtatgtacgctgtgctctaggatatgttcttagagacctagagggtcatgaggttttacacagcttcagctctactgtatattgccaaattatgctacaaatgcttgtacagatttcctctctcactagcagtatctgaaagttcctatagctgcagatatcctccaatatcaggttctgttaggttttttttttaattgttcatttcatgtgtatgaaattatatgtaatgttctaatttgcatattcctactttgtactgtggtggagcatagtttatattatggtttatttggatttctcttatgtgagttgccttatatattctattagctatttatcttatgattattgatgtacaggaatttcatctgtattctgaacactataaatttcaaatactttctcttagtctgtgacttacaaacatttataatgttttattatacagaaattaaaaattttaataaagtacagtagtttttgttgttattgttgttgaggagggcgtcttgctctgttgcccaggctgatcttgaactcctggcctctggcagtccacctgttttggcttcccaaagcactggaattacaggcatgagccactgttcccagccaagatcaaaaaaatatatatatatgtatatatacatatatatatacacacacacacatatatgcacacatatatacacatatatatacacacatatatacacacatatacatatacacatgtatatatatacatatatatacacacatatatacacatgtatatatatacatatatatacacacatatatatacacacatatatatacacacacatatatatatattttgtccccaaagcaaagctatataagaaaagacatacatagatacatatattttagaaagatgtatatacatacatatatacatatatgtgtgtgtgtctgtctgtctgtcttttcttatatagctctgcttttacatctttaggaaattcttccctaccatggaagtcatagatatttgcttataaaaattttaaaattttgcttttcacttattgttaatttgcttagagtttttttggttatggcatgagataaggacctactgttttctcctatggatatctaattacaccggtgtcacttaccgaatgatccttccttttctgttagcagttgctacatcgcatctatcgtgtgttaaatatctaatgtgcttgggtctgtttctgaggcatttgttttattgatctgtctgggcctgcatcaatttgatgtctggtagggtgagctcccctatcattgttggtattcttcaggagcgtcctggccattcttggccttatataaattttacatggaatttaaatatatatataatacatatggaaattaatttttaaaatcttgttggacttttaattgaaattgcattgcatttatgaattaattgaaatatacctaattaattgcaaaacaaaaatgtttgagtgtttaaaagaataaattactaggttttacaaaaattatttgtcaagaacagccaatttcccaagggttctgaatactcaaggttttactatattaagtgaatttgaaaagcacaccatttaaaatgttcattcatatattggggtgattcagaaaattaagtgtttaagcatctttcatttttcattatgcttgctaatttcttcatcaagtatttattgattgcttgttttatgtaggaccttctgctatagaatataacagtggttcaaaaatcccaacagccattggtagagcaaatgttcttatttttgtagtgcattatatatgacataattcacatttcttaggtgtacctcagttgatgttggaggaaaatattccccatgtttgctgtgtgtcatgtgtcagatagcccattcttttcaaatttgcctcaaaaagtccacctagtgttcagaaataatggaatgttgactctttttcatctaatcaggctggactaattatttgctaaaattcatttttgtctctctctagagacttgcagccaatacaggaagcaaacagcgtagtcgcctctctgttatggctcagtacctctgcaatgttcgacacatctttacgattccaggacaagcttttgtccccaaaccagaggtaagtttctgcttatttgttgtagtatatcggaattaggacgtttgttcccctgaggatgtgtcataggaaataacctctaggatctaacctttgtttatgtgcaaactgacactgtactttacttctgaataagaaccacaaaaatcgtaatatgaatagctagttcttactataattgttctccttaggtagggtgactaaatgtttaggttcatgcatgttatcctggtggcagtatcattcatcatcttcatcttcatgatgttactcttaaagtatccctgtatggaagataagttacacggtcacccaatatttgagaaaagaaataaaatacttttgtgttttctgttagagacctctaactaaagctacatcaaacattatttacttaacacttttttgggagaccttattatggtagtgttatttgtggtaaatcatctgtggaagaaacagttggatattaaactaggctttgatattatatgctagttatgtgagtaagtgctagttacagaaacagagtttctctgccaaaaattaaaattaaaaaaaccgttgtctgttttagcaaaaccactgcttggtgagttattacaagatgtgtactattaaaaactcatctttttcttcagtgaatgtatattgagcatttactgtttgaaaatgcgttgggtagcaaggggagtctacagggatatgagcctaatccgatacagagtctgccttcagggagttcacagcctcatgaggaatagaaatttctcactggtccctaaaactctcaaatataaggtcttgcagagtgtcccttgcatcatgtatccttcataaataacaagagatagcatggaaaaaaatgcattatgtgactatagatttagatatagattctagatttagaatggagaccctaaccaatagtgttagatctacttgtctgtcttgaagacgcctaagtgatctccatgctctttgctgccaccttcatacttctttgccatttggccagttagctgagcgttcaggtgactaggaagtcaggccatcttccccttacgtaacagacataattgtcagctttttctaaatcgagctcagggagcttgctatcggtgccacctcccttcagcatctcagacttcagagacattgcgaatgacttctcctagaataattagatccaagacagaatttgatgactggaggtatcttataggttatcttcaaatttaaaacatttgtgctttcagggactttctctcctagtacaggtggccattataatgaaaaaaataaaaataaaaaaccagtgaccatgtagcttgatttcttcttgtcatgcacatgtgtgtgcatataacattttaaatagtgtaagactcattatatcaaaaaccaagatccttactcataggcctctatagttatggttatgaccattatccagaatctccaggctatttaagttttactaacgggttcttaggatagatattcgaatatttttagtggaagctttctaactctgttttagttacctagttgagattatttgatggagtttcgaagttattatccactttatctttgatttagtggtaaggtacatatgtagtttatcaattaaaatttaccttctctgggattaaggccacaagaaaatatttattatttggaaaaaagctagctatgtctttgattcctttttttattgagggatgtttacgttttggcaaattaaacattttcatagcaatttacttcactttttttattatattgtaactattacatacaggggatttatttgtaatccagaaaagcacttatcaaggacttgtaggtgtgcaccaccacaccggctattttttgtagtttttcatagagacaggattttgccatattggccaggctggtcttgaactcatggcctccagtgacctacccgctttggcctcccaaagtgccgggattacaggctaaattttagttctaaaagaattctctgctgctttgaagtagttttaccatattagggcaaagcagaaatgttctgaagaaagccagaaaatattttgctgacagttacattgagcaaatgttttaaaaattcattttcttgggccgggcacagtgactcatgcctgtaatcccagcactttgggaggccgaggtgggcggatcacgaggtcaggagatcgagaccatcctggctaacatggtgaaaccccgtctctactaaaaatacaaaaaattagccgggcatggtggtgggcgcctcaagtcccagctactcaggaggctgaggcaggagaatggcatgaacccgggaggcggagcttgcagcgaggcgagatggcaccactgcactccagcctgggtgacagagcgagactccatctcaaaaaaaaaaaaaattcattttctcaaataagaaagaggaagagtttttacagagatgataaactaattcaaggctagtactctaactaaaccttctgcatacaagaagagaaagtcctagacgcacataattgcaacacaaggtaagataagctaagcgctaaaaatagaggttgggcagattcctgggtggttgagagagggagattaatgctcagaagaaatttactaacattcattacttattctcaatcaaaactctaagaatcagatatagagaatttcttttgtgatacaatgaggggcttacttacaaccactttcgggattttttcctgtgagagtctgctgtcccttctgtttctcaatcttttaactaactcaatcaagctttaatggcagaactttcactaccattgaactattacaatcctgttctgactagttgaactgaattactgctgaactttactcttattaagctctctagtgtagttcccaaaatttgaacccaaaatactttgtgtctgcaaaacagacaacctctgaggttcttaaaattagactaattaattggtctactttagtgtctcttaaactattagagtctgtagtatgtagcttttaagttagaatttttttaattttgtgttttcatttcactgttaatgaaattatttacatttacaagacaatgtcttttgcaatgcaaattcagaactaaaattgttttcatgacagaatacaacctgtttcttaagtttctcaagctagcttttctctattagcctctgtagatccctgagaatccacatatttctggggttccacgcttaatcttttttttcagctactctgcacatttctcaagtttgggaaatactgagctattagctagatcctcaaaattctgtctttttttttatgaattatggtgataggcttcataatctaacatagttcgtaaagagtggaaaggctttttagttctcaacactatttttttttttttttttttttttttgagacagagtctcactctgccgcccaggctggagtgcagtggcacaatctcggctcactgcaacctccaccttctgggttcaaatgattctcctgcctcagccttccgagtagctgggattacaggcgcccgccatcatgccccgctaagttttgtatttttagtagagacgaggtttcaccatgttggccaagctggtctcgaactcctggcctcaggtgatccatccgcctcggcctcccaaagtgctgggattacaggcatgagccaccacgcccagccagttctcaacactattctctactctgacttagtagaaaaatcatttagttatattatgagagttgtaacgggttctttttaattgacactggtagaggcagtagacttccaagtaagctagacctgctggaattccagtactgctagttttgagagcttggtcgggttaataggctgagtttactacatccagatttgaccaataataccacccttgaaggacatttgtgaggaatagaaataatcaatgcagagtgcctaatatgagtatctggcagtgaatgctgccagtcaaagtagttgttattgttatgatataaacaaatatttatggactaagttgtagtattctgatataaaaataaggattataatttttaagctatatatagaatttatatttaatttttcctatttggaagtgtggtatatagaacaagttaccttcaaacatggtacacatttaaagcataaatagtgtccattaaattgtagatgaattaatgatatatccatgacatataaagaaaagattggaacttgagacatccactcttgacttttgaagagcgttttagaggcttccaaccctgcttgttcacagctattgaggccttgacctctgtgggagatagtcttgagtttggtgggtggatgggtccacagaagagacaactgtttttcatgcttttgtgttttttgaaatctgacattgaggatgttatttctgctgtatatttaccttgtattcaagaatcattttggtatgaggtcagaacactagtgttttcctacttaactaagactcttctgtctttggtttgtattctcctcctagaatcagattgagatgggattttcataaaggtgatgtattgacaagggccctcaggagaaggggcatgagggtagcaggaaagggcaggggaagagctaagtaaacatattgttcctcctggaggagcttcagcctagaaccacggcgggaggagaagctgtgtagcacaaattgccccacgcgtctgtgttcccttgaggcaagggaccagcttattggaacctgtgccagccagtctttgcagggagcagtggggcagtcacttcccagtagaggcagctccatctctgggagccattagcacccatcagtgccagcagctgggggtggctgccctggcccagtggaaggagcttggccaagacacagcatcctgtctagcttcctaccagtagacaaagctgtcagattacttacatggccacctctctgccgcagttgcttggaagttctaaactaagtttcatgtttaattgctttagcatgcttcaaccaggaacatttaatagcattttttctctcttctttttgtttgtaactttagtctttcatctttatcagttgtttttatacttattatacctgcaattttataagttgcctcaaattcttttttaaagcccttgagtccaaaataaaaataaatataaaccaaaagccatttttataattaaagtagtaccagagtcatcctccttaaaaatcaggtaaaatacgtgttgaatagagataagagtatttgctattacaattttaattcagtactaggcatgcttccataaactgctcaagaataaatggtaagtattctaaatccaaggagggaaaaaacaaaattgcatttttgcagacagtacttttatgtatgtataaaatgcaatgaaattaatacaaaagtaactggagataatgataataatgtgatagtgttctgcagaattataggctaggctaaaaatctcaaaagtcaagtaagttagtatttgctaaagtcatgtagctgacaatatagtgatgaaagacatatgagaaaacattgtccacatccaaaactgaacttctgtctaactaccctagtgggcctgccctccctgcacctcttattcactatgctgactaatggcatcatccacccaggtcatccaagcctaaaccttggaggtcatcttaagcaccacctccccagacctttacaactgctgaccctcagaactagtcagtcgttaaccagcttctgacattacctaaatttctcccaaacccatcccaattttgtacccaattcttctgacttaatttaagtctatcatttttgtcagaattactagatgaattcttcagtcatatgtatagatatacacgtgctccacaggttaaaaaaaaaaaaagtatgatatttttggtcttttgggttttgttttggtaactttttatcaaagaagaatgaataagtatattcgataaattagactatgatttctcaaactcagaactgttgacatttggggccagataattctttgttgccagagtctgtcctgtgcattgtaagatacataaaggcatccctggcctcttcctactagattccagtagcactacctcagttaagataaccaaaaaagtgtcccagcattgccgaatgtcccctgcaggctaaactcaccccagggagagccactggattagactaagaaccattgagtaacactagtcatatgctttctgtgcaccaactgctttctgtgtatcatctcatttaatccccacgagaactctgagggtagatgccattcttaagcaaaccaagaccttagttaagtaatgcatgctgtgtaaccatgcacccacaccagggcttgcacccgggtagtttgactccagaacctggttccctcaggttggaaccatctccccacttactagctgtgtgaacttgggcaagttagggaacttatgtcacctctgtcgccctcagtgtcctgtaagatcctgagaatagtgcctacctggtagagttgttaggtttaagccaggactggcatgtgttaggttttagaccaggactggcatgtgttaggaagcacttgccatgacatgtcactgagaatgcagagctaaaaatgacaccacacctcccagtctagttggagatgcaatcatgtaaactcataatttcatgacttcttaaatagagcgtttttacacagtacacattacttaagtcttggtgtgctcatgtgagctattgtgaggattaaatgagagcatttattaaattcatagtttgttaaatagagcattttctgcgagtgcagatgcgggcttgaacttctaggctgtcaggattgagtttacaggagaggtccgtgtgaatcctgaagggtgagcaggagctttggtagtgagggagtgaggctgggaggagtgcaggtggaggaatgaacacagcgggataggaattcctgtaggaatagagagactccacatcatttattgcaggattgccacttccaaacaatacactgggccattatttcatataaaatggctggttttctgagagtttgaaacattcgtgtttctacttaggaagaaaatactccagagctaaataaaaattatttttgaagtatatatagaatgatatagcagatataaagataacttttactgtaggactaaaggctacatagactatgtaaacccagccacattcagcaaagtgagagaagaactattaatgggatcaaagcagttctagcacattaatttgcatgaaatcattctttgcatcagaattctttttagtatgacacttgtgtataaaataacattttgaccactcaaaaggaatacatactttaaacaatcatttaaccttctacaaaatgatccccttcctaattcccgtttgtgataataccttttcgttttagctattccagtaatagctaatgacattgttgcagaagagaatgtctacccagtaaaataggtataggatatgttagtctatttctgtatgcacaaatgaaagttatttacttacgtaaaatatattcttcccacttcctgagttattaatgtacaaagaaataatcttttttcccctttaccattgaatcattgacaatgactaagcttcaattaacaaataaattgttagaaacaatagtgggcagtgtttcctagatttttatttacttgctaaaatatttgaatcacatatcataatttatattttaaaagcattctttaaaatatattttgacattcattaattgaaacagcttatttgtaagaatgtttttgttaacatgaatgaaatttgagagaaaaagtgacaaaggtaacttttatcatccaaatatgaataaatgagagaggaagtgggatggtagtaaatccagaatgtgataggataaatgaacttaatctgtggagaatcctcttgctagaagcagaagaagggagttcttaaacattttaaaacaaacttttgttcttatcacttagcttgtacttaatgctttaagagtcctagagattttagtttggtttggctttctttactgtggtagcatttaccaatttcttcagttctgcctaatcttagtttgcatataatattgtcagctcttacaaatatatgtagatagttttctaaaatgaaaaagaaatgggctggtcacaggaggtggggacttgggatggatggttttagcagcatctgaatggagtaggcagctcttgtattcctaatgtactttcacacactgtagctttaaaacagaagcaagttgctgtgttgttgccaaccagatagcaaagtggataatattcttggttaacaccagggcaaggtactttttatacttggcagtttagttcttttataaaatccagtttgaaaggtgtatcagcaaattatcttgaaaaagctatcaaataattgccttatgaatgtaatcagaacctctttcaattataaatctttaagtaaaacatggaaacaataatggaaaaaataaagaactcttcagacagatgtaattgtatatgatagttttattggcattttaaactactttgtagttgttaaagtattttacattctactttctttgtagggaaagttaagcataattctgatttttttttaatctaaaagtcccatttggcacccaaaagttccatttcatatgcattactcagttatttacacataatccttcagattgtgtgtggaattgttctcgagctgtgtgttagagataggctgctgtgtgggtgggtcgagtctagcttctggattcctttttatacaggaggtgcagaaaatcatgccagagataaacaacagcattgcagaaatgaatccgatatagatagctcctccaggttcatgtttgttgctttctggaactgtcagatccagaaagtttgctatgatctcctttgtgtaccacactgtcgagattaaactagagattcctgcagacatgaaacagactcctccagcaaaggaagcatggctcttggtttctctgtcccctcctaagcgagtacatttcattcctactgtggaagtgcagatccccaaagcagacagaacacacgccaggaccatggtggctctcgcagcctgcacgtggatggggagggacagaatggagtgtttcagggcacagctgaacatcccagtgctgtaccacgtacagtccatccagagcccgtgcagctgtacaatggctgttatgatgttggagtccacatccacattcaccttccagttgggcagcagagtggctgtgagcactccagagaccccagataaggccaggatgaaagcaaggagctggagtcctgctgaggccatgatgttactgttaagtctgtcctcttagaaaatcctgatgtttaacaatgatggctgtcagaattctatctatttctgtgcagtagagaaccaaataacaaagcctaaggaaaaaaggcaaaaccaggattgagcgaaagaaagtaagtaaacaaaaggcttccctttagagtaggagccaagaacacatctgagtatcccccttctccagcccccaagcagatgaggatgctgtaggctggaggagaaaagctcccaccaggccttgaagactggtctgagtgatatgcatgggtggtgttgatacagggcataaagaaagcagttgcccacttaattctttttaaaactcaacatatgctgaaactgtagcgtggacatgtacgttgttaggagatttagacatttgaaattccagctatagtatctgataaagaattttaatagcattataggtttttcaaatgattttattttttatttttattttttttgagatggagtctcactctgtcacccaggctggagtgcagtggagcgatcttggctcactgcaagctccacctcctgggttcacaccattctcctgcctcagcctcccgagtagctgggactacaggcgcccgccaccatgcccggctaattttttttttttttgtatttttagtagagatggggtttcaccctgttagccaggatggtctcgatctcctgacctcgtgatccgcccacctcggcctcccgaagtgctgggattacaggcgtgagccaccacgcctcgcccaaatgattttatttttaatgaaaatactcaatacataataaggaagaaaataaattaaggccaccttttaaagatggtttataaatacattttagaaaagtatttaggaagtggctttcataaacagatctttatgacacacccacagtgccaggcacatagcccaagtgaaccatttgaggaggaaggacagcagtggaaagaagtctgagtcactggcatggttatccctaagttctagttaatacctgtttgcaaaatcctgactgaggttagtacttgttttacttcaggtgcctggtactcaaaacaattaagccactgttttttgtatataagaacatgaggtcctttctaattgggaccagaatcatttcctggcccaaatgaagccggctattctgaacaattcagaagtagtgatggcagatctcaaaaatacataccagaaataaccacatcattagttgtatgtgaaaggataccagaaataaattaaccctttattttctttgtttatttttaagaggaaggaaaagaccacctactttgtggcttggctgtgttttaagaaacaaaaaggctttcgattccatctttctattcctgttcccctatctagcccatctggcactgcttactgccttatttgagaaaaatgtaatggtttctgaaatactgcagtactgactttctttgtcattctgagttaattttgaatggtatgctaaagtggctctgtcgtgattcatatgtattttacaaaaggtgatacaggctcttgagtcaaagacacttgggccagttcttagctttatacctctctgtgcctcagtatcctcttctggaaaatggggaggattgaaatacttcgttcatagggttaaataagttaatacattttaagggcttagaccaatatttaagccacagaaagtcctcagtaatttaaaattgacatcattattagtatttttatttcttatgtattgtgacaattgatgtttaaaattatttggatcttttccctttttctcttccttccttgggctgatttattttcatagaatcttggagctgaaagaaacctcagacagacaatctcaagcatccttgttttttcagatcagaatgttcagataggatatcaccccatgtcatacagtcttcagcagccaacctgcagcgtccagatctctctccacccctcctacctcacagggtcatcccgcatcctttccccttttaccacaacacttcctgctgaaattctttctccccctgtgtgtttcccttgggaaccagggaaaacactgtatctggaggcaaaaagcaccattaactgtctacttcacccactcccctccccaccaaggaaaaaaaggactgtagaggatgttaataggccacatggctcagcttcagatgactcggcaaggagattgatgcctggctttggttaaatatttgaaatagtactaatccattgcctatatttaaagtataaactttgcatagctacaaacattgattctctaagacattagatcctagactatctggattgtgctgttctgtttttgttcataatctgaaaatgtaaatcttaccattttagaaaaggatttccctaggattttaagttcttaagagtcagacttatctgtagacatcagtgtgcctaggattcacctgctatcatacagtttcttttctgttttccaaacttagaccaaaatagaacaaaagttaaagtttctagaaaaaaaatcaagcacatgtttacagttttgtaatagctgctttcaagtttaggttttagcatttcggactccagccagcttgctaaattactgcctctggaccattttcagcttagggattcttcaagtgtggggttgctggaacattttctaacagcatctgcttgctcacttttctctctccctctctctttctttctactttgactgaataacctttgttgtcaatctatgttcagcttaccaattataatccttttcttcccattaactgatatattttataactttcagtatatttcagacatgaagacagtttgttcatcatgattaacaagtactggcagtgatcaattacagacagccaaaatcagtgtaaacaatatgacgtgtcatttaattagcatagtgcttgcttactgttgaatattggattcaaatgcttttttttctgcatagagaacttatgtagaaagaatttgttctccaaatgaaggtcactttctgctcatacaaatatactggcattttagctgcattgcgctttaccctccagccacgagtataataccgtttgtggcctgttctctcaaaatttctatctcgtagagaataaaggcacactttgttccagcagctgtggtggtggtggtagagaaatactgtgaaggcaagcagaagcagaggggaggggtcgcatgtaaacacttacatggtctacagtgaaaactctctcatggtcccaaaacacagtgcacacagaacagaacccaggcaccttcagtttatgaactactcgccaacagaaagtctgttgtagatttcactaaaatgtaaagtcagctttccagacaaggtttatttatatcaaaaataatatttaaaagcagatttactgcttataattcgaactaaataataccgaaagacctattcttagatctctaagcattaagacaggttttatttaccataccttttgtcagtagccttcactgtcttaactccttcggtcagttgtcttcaaattaacctcagttagttatggtgaagaaaaaccatatacgtgaggcttatttcagaaattctggatatgtttataaagctccaataagttaacttgaaaaaagcaaataaaggacaacgtagaaatctgagaggtaaaaactgctgatggtgttagaagataaataccaggttctccatctcattttttgagatgtgggagaattaagaaaggagaggcggggaagggagggaattgttgttacaacaggatttgttgaaacctgaaagctaaaaatgcttttgtgtcactgtgtacagaggaggaattatttgggtgctcacaaaaaggccttcttttcttttaatataatgttttagtcacatagttataacttatttttgaaattttctctatgttgaaagatataatgtattattttatgtcctcagttcaagaatgtggtctgaaatatttttaacaatgtcgtgccttgcaaatgagagttgagactcccttttttccctggtattcttgacttgtctggaacctgaattcataaaattgttaattttcaaaataatcattcagaagaaagttttttaacatatgtatttttttcaataaaagaaaaaagaaaacccagcaacaacttttgactagaatctgatcactaaacctacaggtatttttgtgtgtgtggtgccctgagttttcttgttattgcttccacttagatttgtggagtataactatagagattcaggaaatgttatgaataaattacccaaaatgatgtgatgagacacatcagataagactgtgatcagatactgaggttgtagcccatgaataatggtacagatggatttcactgccatccttttgggttctcatttttttcttcctcagtaagttttattctacaagctataaattcatagccattatacagaaagaagataattttattattggatttttaaatttaacaactgttaataaccatgttagactttaatcatttctttaaaagtagtaaataaacaaacacatgtttcggttatctggattttttgttttggtttgttttaatcctaagttttgcattgagcaagatactctttttcctcttttctaagtctaacatctgtgggtttgcttttcagccatagtattgattacatgttaagtcttagctctctaagtcgttgtaagctttatgtgtactggctttgttctttgattttatttcatgggaaatacaaacaattcagtgcataaataaatactggaagaagttgagttgaattgcagacactaatagtcgcagcagtgtcattagtgctgcatccgaagacacctcaccagggccctccagcgtcctggcttgtttcgctggtcgccatggttgttagtgcagacataagctttgtgaggctgactgatggcagatggagggacccggctgctccccactctaacctctagcataaggaagctggctggaggataaatgggttaagcatgctttaatgtacatttaatgtacatttctattctcaaaacatgttgattatttttttgccttgatgaaaacaataatcctataaaatattaattgcctgctttagaaggaaaacttctgaactggaagcaactttcgttagctatagacctttaatgaaggcagaatttcttatataaaaaaggagctaggaaagtagaagtgtaaatagaaatatagtttatcaacattactatccacttctgatgtggacattaaagggatattaatcttttaagtccagagactctcctaggtaagtcttatgacccctcagcttaaatctcttgcccagccctctcccctgaactcccaagttgtgtttctgtctgctgacttggcgtcactgatggatagctcagacctgtcatggcacaaaactgaattcctgaccattcccaaactgttctccccacggtcttcccaggttcattagtggcaaatccttccttccatttggccgcctgagatcttaaaagtaatccctgattccatacccaacatcccttgagtcaacaagttgttttgtttctgacttcagactagaacaagaaccttccacctctgagctcctcttctgcttccactgtagcgcaagacctctgaggtagaagttcagccccacagggcaagcacttctctctgtttcgttcatcactgattctcctgtgccaggatcagtgcctggcacatagtagggatacaataaatatttgcccaatgaatgaattcagaaactgactttaagtatataatgttaaactataaattgcacttgaatgattaaaaatacaattttatttctaagcaggactagaattttaagtaattttggaactctagtttgtcatcttgctaataacattatctaccatttataacctgctttccatatgccaggtactgtttaaggtgctataatacttaattctcaagacaaacctagcagataagaagaattttatagacaagaaaactggccgggcgtggtggctcacacctgtaatcccaacactttgggaggctgaggcaggcggatcgcctgaggtcaggaattcaagagcagcctggccaacatggtgaaaccttgcctctactaaaaatacaaaaattagccaggcgtagtggcacatgccattagccccagcttctcgggaggctgaggcaagagaatcgcttgaacccagcagacggaagttgcattgagccaagatcgtgtcatagcactccagcctgggtgacagagcgagactccatctcaaaaaaaaaaaaaaagaaaagaaaagaaaagaaaactaagctacagagaagtaacttttgactaaggccataaaatgagtaaattgcaggaatggggttgagtcccaaaacaatgatttttgaaaccctgacatactacatagcattgccccacctctaattagaaaagagcatatttgtaagtcctacctctcttggtagtttataagctatggaaacaaattaacccagaaatctctgtagctttacatatcagcatttacttctcagtcctgcaaagtccactgtgggttgagtgattgcagtccatctttcttctttagaatgttttcatttatcttttttttttttttaattttttaattttttttcttttttcttttttttttttttaattgatcattcttgggtgtttctcgcagagggggatttggcagggtcataggacaatagtggagggaaggtcagcagataaacaagtgaacaaaggtctctggttttcctaggcagaggaccctgcggccttccgcagtgtttgtgtccctgggtacttgagattagggagtggtgatgactcttagcaagcatgctgccttcaagcatctgtttaacaaagcacatcttgcaccgcccttaatccacttaaccctgagtggacacagcacatgtttcagagagcaccgggttgggggtaaggtcacagatcatgttttcatttatctttaagcagaaattactttagcttcccttagtgtgtggtgttgcttagtgatgttaatctggatgttcaggtaggcttttattgtctttctgaaagaatcagtaatttaactgagtattttggaaataacaataccacaccttttcatagagcttaacagtttataaagcattgcactccatcttctcatcactggatcacagtaacaggcttatgagagagacctctaccctaatcaaagaagcctggggatcagggttaaggggaaacactttggtggctgacattttcttcaagaaggagtttgaaggccaccactagaggcagtgtgaaccatcagagtgtttttttgtggtggaatttgtggtttaagagcacttggctatggtgtggaggatttaaagagatcagaattggagacagacagactctgggaggctgtggtaatgggagcgattaaatggaaataactagatgagtagagatattgcataggaaatggattcaagataaagggtgttcataaattctggaaatataattaaatatatataatgtagtcaagggcatcttcggtctgtaaaaagaacccaaaatttcctgtctacattttgaaaacaaatttgtagaaggggctttgggcttgtattggtttcagatgtttcagtggacaaattacagaaaaatctaacagtagactaaactataaggactcattgtttgaaagtcagtactgttcaaggttagttctgcaatttaaaactcttcttaagtattccagctcattctgtttttctgttccttcaaactgaacttttcttggctgtgtgaaggttgattatacaaattaggtcattcttgtcttacccaactaaatcagagtcaaggggccaggaggaaaaagcactcagggcacatagcactgtcgcacctgctccaaaatttacactttctataagcctagctgctgaaatggcctgctgtaacaccaagaccagttttagctagtagctgctgggaccacctactgtgactctaagactggttttacctgctgtcgtcactcaccaatcagagcttgtccacacccaaaagcttctctagtgccaatgagctttctttcaaaacaacacataacatttctctaataaaactcccaaccttccttttgttctttggacatactgaagaccacctggtctgtgtgtaggccctaatttacaattcttgcttcccaaataaaacattgaatttggagatttgtctctatattttaggtttacttcaacagctatgagatggctgcctcagctgaccctttcatcaagaagcaccatattctacggccaggtgtggtggctcatgcccataatcccaacactttgggaggccaaggcaggtggattgcttgcggccagaagtttgagaccagcctggccaacatggtgaaacccagtctctattaaaaatacaaaaattggccgggtgtggtgccacccacctgtatttccagctactcaggaggctgagacacgagaattgcttgaacccaggaggtggaggttgcagtgagccgagatcatgccactgcactgcactccagcctgggcgatagagtgagactctgtctcaaaaaaaaaaaaaaaaaggcagcaaagtattctagagttctcttcccctctcccaccaccaccccagactatgctttaatgtctcactttccagaactggctcatttggtcattcttttttttttttttttttttttttttgagacggagtctcgctctgtcgcccaccctggagtgcagtggcacgatctcagctcactgcaagctccgcctcccaggctcacgccattctcctgcctcagcctcccaagtagcggggactacaggcggccgccaccacgcctggctaattttttgtattttttagtagagacggggtttcaccgtgttagccaggatggtctcgatctcctgacctcatgattcgcccgctttggccttccaaagtgctgggattacaggtgtgagccacagcgcccagcctcatttggtcattcttaactgtgagcgagactggggaagtttgtatctggcttttcatcccccctggtgagctgtatccagcagggactcaggctggctttgtgggtgtcacagggctctagctgcacttctagtgaatttaatctccaggatttgagttgactgtgtgatactttcccaagcaactaggattgttccccaaacctgtgattctcatttctgcccacacgagggctttggaaaagccccaagaggctcaggcccaacccagtggcttttatttaattttctgggatggagccccatccttgtatttttcaaatgctgtccatttaattctaatgaaaagttggggttctgaattttaaaaaaaatgttgtgatggttaacactgagtgtcaacttgattggattgaaggatacaaagtattgatcctgggtgtatctgtgagggtgttgtcaaaggagattaacatttgagtcagtgaggtggggaaggtagacccgccctcaatctgggtgggcaccatctaatcagctgccggctcagctagaatataagtgggcagaaaaatgtgaaaagagagactggcttagcctcccagcccacatcttttctcacgtgctggatgcttcctatcctcaaacattggactcccaagttcttcagttttggaacttggactggctctccttgcttctcagcctgcagatggcctattgtgggaccttgtgatcatgtgagttaatacttaataaactcttctttatatatatatttaatatttacatattatatattaaatatatattatatattatatataatatatatttatattatatataaatatatttaatatttatatttaataaactcatatatatatattccattagttctgtccctctagagaaccctaatacaaatgttttttcttctttgctttccattcaatcttgaaaataatgacagttcagagtaagataaaatagttacctgttccagccctacaaatttaaagtgatttgacctaatcctaaaataatgttcttcttctgtcccagccttaggaaattaacagtatcagctatgaatatacgaatgtactgaccaagcatcttcagtgtgatgtctagtccgtttgataattatggtttattatgaattactatatttgtatgcatgttctatttctcagtcttttaataatattactagcagcatttatcaagtgccttctgagtttgtttagattgagagcctctctgaggtcctgtcttctctctgagggacgggagttgctcaggacctgcagcgctggggtccagaccctggcagttgccaatgtgctgccacacccatggcccggctgggcagcctcgaagctgcctcaggcagctcctgccacatccacaaacccaagcgggagcacagcccgggacaggaaacacagggcacgtccagatgctgctgcttcacagacaccaagggcgtggtttgtggaaaaggcctagttttaggaaggtcttttccctctgatcatccaggaactccagattaaatgtaacagaaaacctttatacaacaattgtcagttcttgttccatttgtgctttcttgaggattacacgtgcatctccctgaaattgtttaatctcttgggaccaagagacactgactcatcttgttgttgttattactaataggtgtaatttacatacatacatatgtacatttacataatttacacagtaaaaaaactcttcatccccctcaccacatttcttagtcttatttctcttgtgatctgagtttgctgtcattctcttggcctcagttcttcctaccacatctgctctgagaggaaacactatgtgactgtttaaaatctgttctttttttatgatcccaagaagaaagagaaaaaaacaaagatctgtaggaagaaaaaagggtgaggacagaacttctgcagaaataaatattgttacaataacacaaattgtaaactttaggataggtactgaccgtgtagttgatctttattgaaccagttggtttgaaatacttagaatgctgtcagctttaaggttttacagtggaaattctttccttaaattggcttttggacatggatcacaggtagagtgaaccaattccagaaaatgtgatctacattcacatttgtcagtattttctttttctatgacatgcataattatcatatcacaggcatcagtgacttgctgcctctacctgggattctccttacctgggaaagttgtaacctcgaggcccgtgatgtcctaaagtggactgtcattagcttggtggaggtacttgaagagcaagcagacactggagggtggggaaaccaagcatccggaggcactcatcttgctccgttgttttacccgacagtgaagtggctctcccaagcccctgtcctcctgcgttccattttgtggtgcctatagcctgcaagatgccatatgcttcctgttcccaaccacccaggtctgcccgtgatcatcccacttcgaactttgaatccttcttatatgttgttctttaaagtcttactgattattccctgtggtcttttttttttttttcactagcccttctgttgtcttaagttatggctgtgtcttggctatttacatagtaacttcctcatcattttttcatctccactatcttgtcctctaatggtcttgaacaccgtgagagtgttgaatgaagacccttttgtagacagtggccagcattgtttctgtgtctgtgcatgtggtcgtgacttagcttttgggcatatgataatcatcaggaactgagttgtacgtctcttcagtgtcctctgtatatcatgttgattacagttctcagttgtaatatctaatatctaagatttaagatttaatatctccttagcccgggtcccttgtgagttccaagtgctgctctgagctgataaccagtcacgtcctagacaccctggcctggaaactaggacatctgcctcgggcctgttatggccaaggctgctaacactgagaaacagtcttagcttgttacagcgttgacgtatagggttagaaaggcaaatatttaaattcattttaaatcctttcatttgaaattttagtaggtcattttggtatactgatggactgagtttggaaaaggctggcggcattaaactagaatattttaagtacttctgatgcctttgtactgatttcttttttgtaatcaaacccattaatagacttaaaactcaaggaagaaaaaataatacttgtaattttaaataagcattcaattataagtaaaaaacatttttgtattcgttaccatagttaccaagcagctttcctatagttctagaaaaaaatgggctccatcattcagagtaattctgaaaggtgcctttgggggaaagggagaggaaggggtggtacaggagaggtcctggccgtcccagaagcaggagacataactggaagagctttgttgacgctgagttttacagaatctcccactaaatagtaactgcatttgtgaggggaattctcttttagccgtgacataatataagccaacttaacagagtattggaattgtattcaaactttagaagtcgacgctatagtttacatggggtactactatatttgttcagggttttaaaactttatttaaatcaagcaaaagttagacacttcctgtatttgcaaataccaactatatctcaaaggaatgaaatcaggcaaataaagatgaggccaaaatttaaaatctaaggaagctgaaagtggcagtttctgtactggaagagagtgcatctatctctgtatttgtgcttttggtcttaatagtttgtaagccttatgtagagttttgataatatttcatggttttaggcctaggcagggattagattttatctcagattttgctaagagtatttcttctggagactagcaggctgctagtaagaattgatagaattggctctttgtcactgggagaactggagttgaagggttacaggagatgagtcctggagaacgggaggcagggacaagggtgccaggaagctcaggggatgaaagggaaatggagagtccagtgagagaaggctggcgaggtgtagagagtggccagacacatgcctgacagttgggaccacttctctatacaaatcaggaggaggcgaggtaggcaggatagttcagagtttgtgggaaggaacctgacatctgaagtcagtggagtgtgtcttgggctgctgcctgcactctgccattcatagatcaggtcttctttttccttccccagaactgccctgagctgaaaccacctttcttctctccctatagcagtacatctaccccacctacaccctgcatccactccacagccccttgtcttcttcagtccctctttccctgatgaccacagacctctccaagctgggcactgttctatggtgcgttttgttaaagtctaagggaagtcctgtaggaagaggtagttgttactaaacttgaggaaacatgaaacaacatatagcacacaattcaaaaaacttactaaaatttattaagagcatttgacatcttagttaagtcactgttcataactactgttccaccatagaatcttcacaagaacagcctgctggacttcacaagaaggctgatggatgttgggggtgggcatttggggtgtggaaaggccgcttggcacattctcagcatgcgccagcccacaccgccccttaccaccaaagccttctatttcccattccatccagtaggagcagctgtagctgacctgaaaccttcggggacaggctcattgattgtttaaatagggaggtgcaagctctcaggggtccggggccttgatgacacagctcaggcaccacaggcacctcccacaagcgcgtcaggctgtgtgaggctgagcacagcttattttcactttcttgtccataaagtctcacatcatattcagttgttttccttctaccctaaaagaaacacaaccagaaaagccagtctcccattttcatctgtttaaggaattatgtagccacaaggatctttagaagcaagtcctcttaggagaaaatgacaacctctatgggatttcaacaatggagttccttttgaaaagcagtggtgcagcccacacctcctaaattgccgtactttcttcgccttttgttgagtctgtatgagatcctcattaacaagtttaacaattcctggagactgaggcttttgtcaattatgacgagacttcccatttcctagaccatggtctccgttagcatttttgtgtgtgtagttactgttttgaatccatttccctctgtctttaaatgtttttcctttggtatttgaatttgtccttgtgaatcaccatgagtccatttttggaacaaatcagggtataaatctcttataagatatgcctgaaaagttttatcttctgacaattaaagaatctccacagctggcagtagcttaaacactatcaaacagtgacattttttgatggtttccattttcaatttcagtcctgcctatgcctttcggggcatttaaaattgctactagaaagttctgtggcttttcagactacactcatgaattcagtccagctgattaatcagtgtctaccgaaaataagtggtgtctctatctgggaagtttagcactgag

SEQ ID NO: 15855 - DNA, 45721 bp, Homo sapiens
gggagcccgcggaggctgctgcagcagcccgaaccggcgtccgagtccggggaaggcccccgcgagcgcagggaggggccggaaagttccggcgaactgggggagcggcagtgggagagcgtcgggcgggaggcggtggtcctgggagcggccccggcgccccgaagccgccccgagctggtggggagggcccggccggtggggccccgggggcctgcgggggaggggcgcctgggggtgcaagaggcgaattggctgcccggggtgcaggagggacaggtggtgcgggctgtccaggaaacctacctgaacgggaaggagccccaggagggagagggacccggcgaggggctcaggacccggaggcgccggcggaggaggaggtggtgactggcaggcccgggccccacggtacctccggggctgaaggggacgcaggatgtaggggcatggggagtcgggcgcagaagagtgcggggaaccgctgagctctgggagccactgcctgagggcaggccgcggccggcgggaacctcttctgccgtctcagcctgggcgtcgctgaagctgtgtctgcggggaggcagcggaaggcggcaggtaaggaagcccagtcctgttagctggagttggtgtgcttggaagtgagaggctgcaggtccctggcgagagcgtagactccacactgccctcgttcttttggcctttcatccctggagggaggaagcagtgcagttttcagcggcaaggcaggacctctcccccgccagtactgtgtatggtaattggagtgatagggcatcttcttagagtctaggcagcaggcgggacgtctgggtggctgccaggtctgtgcagagggaagagaggggtagccccagggaggagctgcaggacggtcccccctccacctgccccccgatggcagtaggggtgcctccatgctatatgctctgcatggtgcagtcaacacacaagtcctcaaaacacgtcccacagaagggaagagggcagcgtgggattaacagaaccttatcttgtaaccctgttggtcacgtgagctgagatgagtgtgacagctagtggcttgggtacggcacgagcctggcccgcttctgccacgccgtcctgtcacagctgatttaccctgagggcccagagccaaggatgattagtgggcggaaggagggagagcaactggtgagccctctcgtctctgggtgggacgacccagcgttagaggggcgggagaggagggtgcacttgcaccccagggctctgggctgcctctgtggccccaccctggggaggtttgcagatgggccgctgtggtatcatgggctctgcacctgtcaggacaggagctcccagcccagtctagaggtagggcttgtaggggccaagggtgggggctgtatttggcttgttgactccctcgtggcctgagtgccagacctactcattccgcctcgtgcccccagggggcttggcgggctgcttgtgggccttactctcctagagctgttcgcctcttacctggcactgtcaggtgcttgcttcccctgcccctgggtggggatgggtgcagggttgctgcttgcccagggccttagctagaggaccctcctctgccccagcccgaggtgtggctgtgagtcagatggacccagacccctgtcccgaaccagactgggtgctctcctctgggggcagagggagtggtgctggaggtagcagctgctggaggagccggttagcccgctcctcagacaaactcaaacccgcctgtcagcttcatcccatgcctgtcgcgctgccacccaaacactcatgcaccggaagttcagctgctgtgcccacggtgcctgacgcttctggaatggccagagtggctctcactgtctggcttcagtggagagaacggtctgttttaaacacatacacacaatcttcacctacttatttcaggtcggcgtttttgaacttgtggtagatgaatgggagaaaggccttggcatcacacagattgcttttgatctggttatatcgcttacaagctgtgtaacttccttgggcaacataatgtctttaggtttcagtttcttggtgtctgcggtgggccaggacttcccctgcagtgtcgtgagtaaagaaacctcaggccctttggagcctggtgcccacctccccggagccccggcagatgttagggaggaagggtcagactgttccctctggcccctgagcccgggattagcccccaccttgtgcttcgtctagaagatgcagtgtttctttttgtttgttttaaataacagttttattgagatataatgacatatggtaaactgagcatatttaaaacacacaatttaataagttgtggcctgtgtatatacccgtgaaaccacccccaccttcaagatagtgaacatcccccttattcccctgtccccagaagttttcttgtggaacccctccatcccccgctcctctgccatcccctaccccaggtaacaggctggtctactttctgtcactgtgtctgagtttgcagcatttactgtaaacggaatcgcgtctttcattcaacagaagtattttggagtttgtccaggtggttgcgcgtatcaacagtcattgtacacgtgtgccaaagtctgtttatccattgacctgttgatgggttttcagagaaagctgctgtgaacgtgtttgttagtctttgtgtggatgtacacttttatttatcttaggtaaatccctaggaccggaatggctgggtcatgtggtaggtacacatttaacctttaagaaactgccagactgttttccaaagtggttgtacattttatatactcatccactgtgtatgagagttctggtttgtccatgtctttgatatgtccacatctcgatgtggtcagtctctaattttagacactctcatgtctgtagtggtatctcattacaattttaatttgtatttccttaatgactcatgttgtcgggcatcttctcatgtgctcatttgccatacgtatgtctttggtgctgtgtctgttcagatcgtttgcccatttttaattgtgtagggtttttcgtgttgagttctgaagagttcttgatatattctggatataagccttttatcaggtatgtgatttacaaatcttttttccagcttgtggctttgtattttgatcctcttaacaatgtcttctaaaaaattctcatgatcagtagtgcaaaatgctgtgtttttgaagagaagttgtaaattttgattaatttactaatttgttactttgtggattgcatttttggtgtcatgtccaagaaatctttgcctgacccaaagtcccaacagttttcccctgtattttcttgtagacattttatagttttgggctttacattgagatctaggattcgtttggggttaatttttgttacgtggtgcaaggtatgaatcaatgtccagttttttgcatgtagagatctaattgatctagtagcaccatttattaaaaagatgtatctctccactgaattgcctttgaatctttgtcaaaaatcaattgctggctgggcacggtggctcactcctctaatcccagtgctttgggaggctgaggcgggcggatcatgaggtcaggagttcaaggccaagctggtgaacgtagtggaaccctgtctctactaaaaatacaaaaaattagccaggcgtggtggcgggcacctgtaatcccagctactcaggaggctgagtcaggagaatcgcatgaacccgggaggcggaggttgcagtgagccaagattgcgccactgcattccagcccgggcgacagtgtgagactccatctcaaaaagaaaaagaaaaaaatcaattgtttgtgtgtgtctaattctggattctgttttgttccattgatctatttgtctgtctttatcccagtatcacactatcttgattactgtgggtttataaactatagtaagtcttgaaatcagggtaagatctcaaacttggttttgtcttttcaaaattgctttagctattctgggttctttgcacttccatatacattttagaattagttagtcaatttctacaaaaaagcctgctgggattttgattgggattatgatcaatttggggagaattgatcggttagcagtattgagccttctgaccatgaacagtgtatatctctgtatttgtctaggttttgtttactatctctcagcagtgttttgtagtttttggtatatcagtcttttccatcttttattgaacatatccttaaatagtacctatttttatgctattgtaaatgatactggtttttcctggtagtattggttttttatttttaaaaacttttaattgtggtaaaatatacataatatactgccattgtaaccatctgcagtggtggtaaatacattcatactgttgcacagccgtcaccagcatccatctccaggacttttctcatcttgtgaaactgaaaccgcacctattaaacagtaacttcccattccctcctctctcagcccctgagaaccaccattttaccttctgactctatgaatttggctcctgtaggtgcctcatagaagtagaattttacagtgtttgtgcttttgtgcctggcttatttcacctcggcctagcgtattcaaggttcatttacattgcagcatatgtcagaattttcttctttttaaagggtaaataatattctattgtatgaatataccactttttgtttatccatttacttggattgctttcaccttttttttttttttttttaaagacaaggtctcactcactctgtctcccaggccggagagcagtggtgtgatcatggctcactgcaacctcgacttcctgggctcaggtgatcgtcccacctcagcctcctgggtagctgggactacaggtgtgtaccaccatgcctggctaatttttttttggaattttctgtagagacgggagtttggcatgttgcccaggctggtttccaactcctggcctcaagcggctttcaccttttggctgttgtcagtaatgctgttatgagatggtaccgttgtttaaactttactttccagttgtttgttgctagtatatgtaaataccattgattttgtattttgagcttgaatcctgcagtcttgctaaattgacttattctagcaagcttttttgtaacttcctttggattttctacatagggcgccgtgtcatctgctaataaagttttacttcctcctttctgatctttatgcctgttgcttctttttcttgcctgattgccctggctggatcctctggtataatgttattgtttttttgagatggagtttcatgcttgtcgcccaggctggagtgcagtggcacaatcttggcacactgcaacctctgcctcctgggttcaagcgattctcctgcctcagcctcctgagcagctgggattacaggcacccaccaccacacccggctaatttttgtatccttagtagagatggggtttcactatgttggccaggctggtctcaaactcctgacctcaggtgacctgcccgcctcggcctgccaaagtcctgggattatgggggtgggccaccaagcccagcctcatctaatataatgttgaatagaagggtagataccttgtttctgatcttccaggggatgcatttagtctctcaccattaagagtggtgttagctggccgggcgcggtggctcacgcctgtaatcccaatactttgggaggccgagatgtgcagatcacgaggtcaggagattgagaccatcctggctaacatggtgaaaccccgcctccactaaaaatacaaaaaattagctgggtgtggtggcacatgcctgtagtcccagctacttgggaggctgaggtgggagaattgcttgaacctgggaggtggaggttgcagtaagccgagatggcgccactgcattccgactctgtcacaaaagaaaaaaaaaaagtggtgttagctggccgggtgcggtggctcacgcctgtaatcccagtactttgggaggccgaggtgggtggatcacctgaggtcacgagttcaagaccagcctgggcaacatggtgaaaccttgtctctacccagaatacaaaaattagccgggtgtgatggtatgctcatgtaattccagctacttgggaggccgaggcacaagaatcgcttgaacccaggaggtggaggttgcagcgagccgagattgcgccactgcactccagtctgggtgacagagcaaaactgtctcacaagacaaaacaaaacaaaaaaaagtggtattagctataggtttttcatatctgacctttaccaggttgcaaaaagctctcttttattcctactttgctgagaggtgtttttttttttttttatgtttgtttttttttgttttttttttttgagacggagtcttgctctgttgcccaggctggagtgcagtggtgcaatctcggctcactgcaacttctgcctcctgggttcaagcaattgtcctgcctcagcctcctgagtagctggggttacaggcacatgccaccacgcctggctaacttttgtatttttagtagagatggggtttcaccatgttggccaggctggtcatgaactcctgacctcaagtgattcgcccacctcggcctcccacagtgctgggattacaggcgtgagcccccgcgcccggcccttactgtctcttaaataacttttcagtaatcccctgtattttagcattgcccttctgacactcacctcttcttccagaggtttccggggctgccagttcctgggcttttgaggattgcaggcggtcagtcaagtgtctctcacgctgggatttgtgattttcttgggtcagctctcaactgccaccagcccatctgctttccagcttccaaagttctgtggtggtttttcctctaccattctccccctccctaggggcctatggcattcagaacatccttttttaattgttgttctggtgaggtttcaggaaggagtgacactgtgtggaatctactgttttttcctggaacccctgtcccttcttcagacttcctcacagaatccatgcattcactcagcgtcagtgaatgacatggtatccactcagcgagtccaatgtgggtcataagacttccgcggggacctccatgggcccgcatccttgtgccaagcagtacagtcgtgaatgggctgaatgctggctttaccttttactctctgggtgctcttggccacctctccagagctggtttccatatttgtaaagtggggataatctggggtagtaaggcaggtttttggtcagccagtgaaggtacactctcagtgaagagctggcgcatagtgtcttcctgaggacccaggctatgacttctgccccttcatattctcccagaaaccagcatcgggtgggcatgtggggtgcatggtgggtgtctaaggaaggtgagaggggagggaggttttcctggtccctctcttcctcctcagcagctgtacctcctgggccccccagctggatgtaacaacattggactcttctgtttccctctgtcccctgtatactgtgtctgccaacattggactcctctgtttctctctgtcccctgtacactgtgtctgccaatgaagcagggcctcttctctggtaccctgaccttggcagggctctccccctaccctgtggccagaagagagtcacccttccgctaacatttgccctcccccagatcctgagcctccatgagcctccattcccgatgacagcttcctggtaccttggaccaggcacgccccttcccctttgagggtcccgggctcttcaaggtcagatggtgagcagggtccagtgggatttaaggtgtatgtcttgaagcaccggacatttctctggctcccaggctctcctgggccctgcggcctgctctaggtgacatgttcccagctcctgggtcttggtgtagacatggtcctgagggaatgagcagtgtatcttgtagactgaatgttcacttcccagctctggcatctcctctccactccttctttccacactccacctccagggccaacaataggccccttcagctctggactcttgcgtagggcttgggggtggggtatggcctgagctggcagcaggcaggatgacgagccgggcagcctctgcccagccctggaagagctctctctgggagtggctagctgctgggagctagaccacatccttccctctgggcccccgtgccgtgacagtgcatgggcaggacaggcaacgagaggcagctctctgcggcactcgtgtcctggcctcggcacctgggcatgtgtggcgtgcatgggagtgagacccagacagctgcagcaatgtgtcctctgccacccactgctgctggtgtctgtgttggggagcgatggtccaggagcacattagggccctcagtgtactgtctctttgtgtcggcgttgacactccggtcttcagctggcggagcatgaaacggtttcacagtactttcaagacttgatacagatggatgctcttgtctccacgtgtcagccccaccaagtccagtcagcctcaggttcagtgtggactgggtcacgctgtttagtcagatcctcacccctcctctctcaagtgacattcccttctccactggagttggaggggacgaggcatagcagggccctgcctggtgtgtctgcctctgcctctgtgctctgccctcccaccctggcacctgcctgttcccctcctctctctcggtgagctgggatcctgacagacccaggcccccttcccatcaccctgtgtggcagcccgcgccccagcaccccttcgcagtccgatgagaaggcaccttccttaagaccaatgtcaggctctccctctgcctgagggactggctgagttgttctggttctgagatggctttgggggactgagttgcttagtgggtctggggtcggagtggttgtgatgacatggacagcccctcttcccagaaaggtgctggcgtctctggattagaaatcatggggggaggcaaagccggggctgggagagggcaaccaggcttgttcctggcacccactgggaaagcaacctggcagcagctcacgggggaagaagcagccaccgttctccagtgttcctcacaaagactgagtccttctcagcagacacacccagggcccctgccaggttctcccttcagggcgacagatgtggacagatggttcccttacgatgtacagaccacagcagaggtatacagaccgctccttcagcacaattatgtgctgatacaaagagttacaggaatagtgaccctttaaggataggaacgtgatggataatttaaactttttaaaattcttggccgggcgcagtggctcacgcctataatctcagccctgtgggcggctgaggtgggcggatcatgaggtcaggagatcgagaccatcctggccaacagggtgaaaccccgtctcaactctactaaaaatataaaaattagctgggcgtggtggcgcacacttgtaatctcagctacttgggaggctgaggcaggagaatcgcttaaacccgggaggcagaggttgcagtcagccgagatcgcgccatggcactccagcctggcaacagagcaagactccatctcaaaaaaaaaaaattattttggctatttttcacatgtattattgtgtagttttactactcatgttttcaagcatccctccaacaaaacagcagagataaccatttgtggctaggaaatgggaatttacagaagagatggcatttgacttggatcttgaggagtgtgtgggagtttatcatgtagacacagtagaagtgtcacagacaaaaaatagctcagacattaaaattatttttttattatttatttattgagacggagtctctctgtcgcccaggctggagtgcagtggtacgatcttggctcactgcaacctccgcctcccgggttcacgccattctcctgcctcagcctcccgagtagctgggactgcaggtgcccgccaccacgcccggctaatttttatattttttagtagagatggggtttcaccatattggccaggctggtctcgaactcctgacctcaggtgatccgcctgccttggcctcccaaagtgctgggattacagacgtgagccaccgggcccagccgcagacattaaaattaaagggcatccggacatggtggctggtgcttgtcatcccagctactcaggaggctgaggtgggagggtcacttgagcccaggagttcaaaattaaaatgagccatggtcacaccactgcactccagcctgggcaacagagcaagacccagtctcttaaaaacaaaaaacaagaagaaccccagagtatgtctagggaagggcaaacacttggcttggctgggacatagagacatttgaagggaatgctaagagagagaggtggggaactaggtgaggagtgcagcccagagggcgtgcgtgccagccaggattgggccctcgaggactgagggaagggcccatagtaacagcaggcagccaggtgccgtggtggactcttcatgacagttttatgatggggattccatttttcccctctttacagatgaggaaattgaggcttagaggttgtttgctcaaaagttgcccagctggagcgtgatggagtcaggatttcagcccccatctgcctgactcctgatctcattgtcaccgttgggaggaagtctgaggcggttgaagcagcccgaccggtgtgtctggtggagaaggtggaggacggaggaggagtcttggttgggggtccgtggtggggtgtggtttctacctcgggtggctagtgttggcttgtgatgttttcagcgggatacaggagcgcagaagcagagtttaaggggtgatgctgagcccagtttggatatgcaatgtgtggtacctgtgcagcctcctggtggagctgccctgtaaatgtctggaaatgcgggtctggagccacaggaattcaggaatggagatagcacaaggtggtaataggagtccctggaggcataggtgaccccagggagcacagcatcagtggagaatagaaggaaacatgagttcaaaagtcttaggaaataccaacagttaagaagctgggggcggggggtggggggggggtgggggggtgagggggtgggcaggcgcagtggctcatgcctgtaatcccagcactttgagagagcaaggctggtagaatgcttgagcccaggagtttgagaccaacctgggcaacatgacgaaacctcatctctacaaaaaatacaaaaattagctgggtgtgatagtgcacgcctgtaatcccagctactcaggagatggaggcaggaggattgcttgagcctgcgaggcagaggttgcagtgagccaagatcgcaccactgcactccagtctagggcacagtgagatcctatctcaaacaaacaaacaaaaaacatgtggggtgaagaggcttcagggctggaccatgggcctagcactgccagcagacacagccttgcctgccctcaggacctcagctgccaggcccccctgggagggagtgggcccccgtgtcctggagatggagagactatggacagtcatggcgtgtgtctgaatcactcccttttctttcttgggccctggccagcctcctccccagaccagtgtgatgtcaggcccagccgacctgaaggtgcagggttgcctggtgcaggttcctctgggatgaggttctgagggcacccagcctggccttgctccagaagcctgggctctgcgcacagaggggtgagttaaggctgactaaacttggtggggctgacatgtggaagcaagataatcctctggctgggggaggagctgtaagcccccctctcctcatcagtatgttcttttttccttcagggcttggagaagaggtaggtggaggtgggagagggcgggctgggaggtagggttggcatatattcctgagaatacggtagattgttttggaaaaatcctcttggccggaaattgcctgtcatgtctgcgccttggtgtggatttgtcacttcgcatgcagttggagaggctggagaggggaatggacagcagagctgggctggtttccagcctcttgtttcctttagctctgcagagtggagatataaagagacaagtgaagagcagagggggtgtacacgtggggtggattctcgaactcctagaggtagtttagatcctgtggatgtcttacgataggatggtactaggacgccagagatttacagggggaggtgaggcagggagaaagcaggaaagggcactggtttggatcagatcctttatccagccagggcaagaagggaggggcctggtattttctgccttgccttctacagtctcccggctttgcagctactcccaagactagtatgtgcctttagctgcagtaagatgccgaggagcttctgtacagcatagaagcaggcgttcgggggcctcgccggcagtcatccacctaccctggtgtgcttggggtgtggaaggggctgtgtgaggagagtgggccgtagagggagcctcacctagtgaccttccagggtctggctcagccttgacgctgcgtggggaggagaggtcacagcatctgtctctcctctgccccaacccagggaaggtgccctgagctcagccctaaatacctggtactaaagagtcagtggctgcttcagatgccaccagaatgagaagcggtgccttggggccccgggggagaggaagagcctctgccctgggacttcctgtgccggcgatggcctcgcgccagtgctgggcgcggcacccccgcgtgggcctgtgttgggcggcttttgagcaggagtccgggccctcgtgtcaccgctctgaagtcaaggaggtcagtgcgtgcccagcgcacagcgcgtgcggcgttgcgggagtggcgcgcggggaaccggccgcgggggcctcggggcgggggcgtggcctgcgcgggaggcgggcgctgggaggcggcgcggagccggctgagcgcagggccgagctgcggggcaggtgggcgcccggcgttctgggagcagagtggccgccggggcaggctgggggcggggtgggctgcagccccgggatgcctcggaggagggggtctcagatggagtcggacggaggcccctctgctgtgggcttctcggatggccccttaccgtgaatacgggggactcgtgaatccccaaggccccagttggtggctctggggccctggaggcgggctgagggctgagtggagcccggttccgcggccggcgaaggcagagccccggctctcggtgggggtcagcccggggctggcacagctggctcactgggagagggtgggagccgcgccccggagaggaggaacggagctgggacgggctgcaggagggaatggccgcaggccggcaggaggaggggcgcgaccacccggccgccggccgatggcggatgaggctatgggggctgagacgcagtagcggccctgcacttctggaggatgctcgaggcccggccccccaggacgcagggcagtgacgctgccggtgccgctgcggggcgggggctgcgggcgctgcttctctccctgaccgcagccgctgggatttggggctccatgggggagagatctgcttaccagcgcctggctgggggcgaggagggaccgcaggtaatggggaaggctaggggatagccagatacctgggccccagaccccttcgtctgctgtgagccgggctcagccctgccccctgcggcggcctcaggagtgagagtgtctgctcctgggccaggggacagagagcggtgtgtttatgtgggtgtggcggtggtgacttagtgatgctggcatctgcctgtgtgtgcatggatcccctgggaccccaaaaagctgcccgttgggctttcttccatgccccaagggagtccaggaagtactgctaggattggggttcagtcttttaggagaactgagtctgtatgtcctgggcattcccgtttactaggcttctgaatatgaatatcaagccagatgtccttgtttgcttttgaaaatatggtcacggtgttgatggatggggtagcttcccttccccttggagagaacgcacttcctctcccgaccggcagagggcagtagctgacaggagaaagggggactcggtaggagcgttggggcttaaggtcgggctgttttcctgggcgaggagaaagggggccgggccgggccgggcgcggtggctcacgcctgtcatctcagcactttgggaggccgaggcgggcagatcacctgagacgaggacgctgaggtcaggaattcgggaccagcctggccaacatggcggaaaaaaaaaaaatagctgggcacggtggcgggggcctgtaatcccagctactcgggaggctgaggcaggagaatcacttgaacccgggatcgcgccactgcactcaagcctgggcgatagagcaagactctcaaaaaaaaaaagggggtgggggttccaggagccggcctggcgctgacccacacatactttgcttcttcccgcagctggattactgggccagttacaggtcttgttcttactggacatccaaggtcaggcatggggttctggtgactttgagacacatatttctggggacgctagagtttttaatctggccattctgatccagcagacccattttgaaatagagggaataaccctgcttaaattgttccccggcccccggtccctgggtctccttccaggtgtgcttggtgccagggtaaggctgtaggcttctctgatgcaagggcacagtcagccaaggtttggggaaaagtcagctccagtgtaacgcaggcctgatcttgtccacctgacctcagcccccactccatccacacctgccatctccacaagctttgtgggctggatggcagggggatgaggaagagggactgaagttgggggtgtccttctccccacctcctggagttagaccaggaaatggctgtcccttttggcatcatcagggaggtcaagtgctgggagaggccctgggaagggagcctgggatgctgagtccccaaagccctgctccccagctgcccacccctccagccagctgaggctccctgagctggtggccagctggacagggacaagagagcagtgtgcaagaaacaggggctccctaggcatggctcagcagggaggggggtgcctggggagctggagagggcttcctgcagctgtcaggtgtgtctgggggccgtagcgaggggggtgtaagagcagctggcaccctttgaggagggccagagagatcatttgtcagttctagaaacatgagggccccacgggggcttgatggagtgtctctaggccccttaatctgaggccgtggtctgtgtcaggggttatacaggagacatcctacagctttggggtgggggcgtcccagcaggagtctcagggcatatttgtttgttttgagcgggtttgggaacttggccacctggtctgagtaggaggcaccctgggtgtttgggcagcagacagggccaccccaggggagggggtgaggatcctcaccccaccctacccttgctcttggctggactgccccactctggcaggctgccggccgcctatttccgtcgggcaccagggtaacagggccacatcagggtctgagccaggagacacccagccaaggctgggactcgggggtgggggagggtctctgaggagtcatcgcagggcccagcggagcctctggggtccaagcctcccactcaggctgtgtgttagtccccacgtccccacacaggtccatgagggagtccacagccctgcttcatacgtgctgtttgagtcacatagccgccaccctaaagtcccaggagttgtctgcaactgtgagggctggggtagaagccagagacaggagctttgtgtatggggaggcaggggggccagcgcgggtggctgggaggaagagtcccccccattcctgccgccctcttggcagtgattcagaaaggtcctttttcagccagtgtcagagctgctcagctggggagggagggagagagggagagagagaggcaggcaagagggagggcggccgggcgggcagttgggtggggaagccggggagtagggctggactgtgaccactgccctggagagaagacagaaacaggacagaggatcccggctgcagccagcgtgaggaaagctctgctccctgccagaccggccagctgtggaaacccagcggggcttgcagcagagcggaggggcccaccccgttcttcctcatttcccacccctggtgtgggatttggggggctcctgggcagagtgcgaagctccggagccgaggccactggatccccagtgactgctcgggggggtcccgctgcgtggagatgccggcagcacgtcggttccctggcctggagctctccttccctctcctggccagactgcggcgacgcctgtacacagtgagtggggggcaggggctggactgctggggactggttgggctcctcagcaccagcacttgactgagaggcagaaagcaagactgggagcggctgagggaccccgccagtgagggcttgacggggagtccgggccaagtggcctctcctgcggctgctgcattccttcttcttggcctgtgtgtttgcacgccggccacagagtagtgacggacacaggtgtgcagactccatgaggtgcgggggccaggaccatgcagaattggagagtgtttgaactctggaggagctgcagccatgccctgtgctgcacaaagaaccttgggctggagggggacttagaggggaggcggacccctgcggagtcaccctggactgagaccctgaccgcttgcctcaccagcatcccggagttccttcccgtcctcccacatgcatcccctgtgcagagctgcgctgttgctgggtcagggagcatggagtgcacagctgaacagaggtgcattagctggtgtttcagggagagggaacaggccgggctgtgctttctgaagagcttcaggggaggggcctctgggtctcccccagccctgaccaccccgggcatggctttgagctgttttcaggagcctagaggagggggcctggatccttgggagttggtggtgggaaaaagaagaggagccctggagactgctctccctgcgggagactaggagcctccatcctgaggctgagccctggagggggggggtcactttgctccagggacagggcagcggtggccgtggccgggtggagaggagacgctgcctaggcccgtgactcctagtgtgcctctgggcttgcttccggaaagccacgacgcctggtcctcttaaaccccacgcctcttgttttgtaaacagatgattttgttgaggataaatgaatacagcttaatacttagaactgttcctcgcatatagtaagtgcagttgaagtgttagattttattttattttgagatggagttttgctcttgttgcccaggctggagtgcaatggcacgatcttggctcaccacagcctccgcctcccgggttcaagtgattctcctgcctcagcctcctgagtagctgagattacaggcatgtgccaccaggcccggctaattttctattttcagtagagatggggtttctccatgttggtcaggctggtctcgaactcaggtgatccgcccacctcagcctaagtgctgggattacagctgtgagccactgtgcttggcctagatgttatttttattgttacttgtcttaaataaagttaatagaaatatataacctgttatattaacatgttaacctgtgtacagtgaaacaagcaacacagtgggaactctaatataaagagacataagaggaaggtaataatattttatgtatcctaatacgttagtaacctagacaatgtagtgaggagtcagatcttgagacctcaggtggaaacaccgtgaaggcagcatctgcaagtgctgaccgagaggggagttttgaaataatgagagggggttgccttcactgacatttttgcaaatagtggacttctgctatgttctgaataaagcaaagtccattttcccttaagtttacacagtagtttcattccaggaaaatttattttatattaaaactgtaaggccaggagcagtggctccccagcactttgggaggccagggcaggtggatcacttgagctcaggagttcgagaccagcctggccaacatggaggaaccctgtctccactaaaaatacaaaaattagccgggcgcctgtgatcccagcttcttgggaggctgaggcgggagaattgcctgaacccgggaggctgagtttgcaatgagccaagatcataccattgtactccagcctgggagtctcactctgtctcaaaaaaaaaaaaaaaaaaaaccaaaaaactataaaagtactttcttatttatatataaagtgggatcatattctaggtttgcatgatcataaacaccttcatgaattgagttgtgtgggatttgggacagtgcgagaatgtcctacgcattgcaggctagctcacgctcttgtcccccaaccacccactgaatgtcactaaggcccccccaaatgttgtggcaaccagaactgtcccatagggggctgtgcagcctcatgagaaccattccagtaaagggttacagctttaagtttggaaaccacccggctggcccagctgcctggcccggtcgccgaggtggaagagccaggatttgaactgagagtttctcattcccctttgttactctttgtacttccctgagctgcctgaaaaagtcggaactggcactgtgttggcagggccactgggaactgtgggggcaggaggctcacgctgggcccaggctgtgtgtgcctgcttctcagtgctgctcactgtgatgggagctggggaggaggccaccgctgagtgggggagggggatggcttggtccccagccgggcagctggccttttttctctcgcctgttcctctttggggattgagcatgggtccggggctagcctggccacgccctcagctctgacacaccttacgcagacagggatgggtttgctgtgcggtgggtccgcttgcttagctttgaaggtgccaccagcttctttatctgggcccaggatagtgtaggtcagaggtcactctccggtaccactggctgattgcggcctgcagtgtgctttggccagcacgctgtgtgtgcgtgtgcatgcttttcagatctgaactattcagcattgttaaaaagtcaggagaaagacgaatattaagtgaaatcagggaacagaatggtatggttaatgcgtgaatattcgtgtagggacaacagagtctgaagcgtccgcagaagacatcactggcaactcctggggagccgggtggctgtgcagctggggagggaatgagattcgtggctcagtgtgccttctgaatattttaccacgtgcatatattaccttttccaaactttaatggtgagatttcacatgtaaattgggatttatttcttgaaaaaatggaaagctttgacaacactgggccacagtttcttctgacaaccattgatgggatctgagctccctgttgacaggggtgtctgcgagcccaccgcaggccccacccctccctcctgtcttccgcttgctgtggccctgtaggcacttgagtggtggcccgtggagtggtctttggattgttaggagaggctggggtggtcaggcgctgggaggaacttagcttagagctcatctgaccctgagagttttctccgtcacatctaaggagcccatagatgggtctcggggcacattgcaccctagagatttttatcaaatattaggagtaagaacacgtcggtgttcccggagagaccactgttagtttttaaaagattttcaaggactttcgacccctagaaacttagagcaggaatgtgagcacaggttgatcttgggtcactcagtcacagatcacatttcgggagcaagaccctgactcctgactccagggccagggctgtatctccgccgccctaattgtgccctgtggctggcaggaataggggacgtgggtccaggcggttctcggtagcttccctcgggagtcagaaggtggtgtgagcccttccgggtggccgtgtagtgggatgaaggtgagcccaggtcactcgggcaggcccctgttgtccccccacaacccttgtccctgagccactcctccccccacagaggctgggaggcggcagaatgcagccagaggagggcacaggctggctgctggagctgctgtccgaggtgcagctgcaacagtacttcctgcggctccgagatgacctcaacgtcacccgcctgtcccactttgagtacgtcaagaatgaggacctggagaagatcggcatgggtcggcctggtaggtgggatgttggcctggcttgtcttgcccctgaccctttccgtcctctgtcctcaggaccactcggtgcacgggtggcagctgagaactctgtcccagagccctgagggagcaggagggacatcagtaggtgctgatgtgtgatgagaacagttggcagttataaaggtgaattggagtttgaggagagtgaggccttccctaaagctggctacacaggagtcactccatgccccgttgtgattgttctcacgtagagtgtatgtcctccattgcccctccttcataagcatcgaattgagtctgttctcatcattctgactaccggggggtccatgtgcagagatctgtagggagaacgctaactctcagatggtttgctgattcgtgctcacgctctctttcttgctctctcacacgcacacacgcatgcacacgcacaggcatacacacacacacacacacacgcaggcacacacgcacatgcgcacacacgtgcacgcacgcatgcacgtgcacacacgcatgcacgtgcgtacgcacgcgctcacacgcctgcgcacacagacacgcacacacacacacacgtgtgtgcgcacacccgcatgcacacgcacggcatacacacatgtacacacacgcgcgcagacgcacacacgtgcgcacacgcgtgtgcacacacacgcacatacacacaggtttgctctgatttgagttcaacccttatcttcatatttttcctaaaagtgggggttgtagcatctaaaagtcatgatgttcttcatagaacattagaaacgtattagggctttcaagttaaaatagctaaataggtaataatgtgtcaagttagacactgacttagttaaaatagctaaataggtaataatgtgtcaagttagacactgacttagttaaaatagctaaataggtaataacgtgtcaagttagacactgacttagttaaaatagctaaataggtagtaatgtgctaagttagacattgatttatgctactttaggcctggatagttggtgtctgatgccagtagcataaaaaaattttacggagggaaaaaaacctcaacattgagaaaattctgttcattaccttgatttttcctgagaactgggagaagcccatcgcttcaagtttttggttaaacaccttcacccagtttgagagccagtgccaggaagtggagtgcagagaccgtcggtcagttgaggctccgggttagttggggttgatttcattgctatcatcgggtgggcggtgtctagtgacaggctcacccccaaggggaccacaggcagcagcctctctcgggctacggcggccttcacagcacgcggttccccgctctccctgcaggccagcggcggctgtgggaggctgtgaagaggaggaaggccttgtgcaaacgcaagtcgtggatgagtaaggtgggtgaggaggtgggtgaggaggtgggaggggggcagcctcgaacgcccccctccgcttctggtcctgggaaccttccccagctccccggcaggtcgaatctcgccgttctgccggcactttgtacaggaccccctcgtccagggtcttatcgggcagggcacttgtagagctgctgggctaagtgtctgtctccgccagatacggacacgtgagcagcctgtgtgcggtgaggccttcacagcccctctcggcacgcctggaacaggacctcattgacaagtgtgccttaacttagccctgctgtgtctgagcgttggggccagtgtccagcgtggggtggtggacctgtctggacccagaacgtctttgcttggcttccctcctccctgaccctctctaatctctgggtttctctggtcatctgtccctgctgacagcttccttccccacagcctgtccccacctctccccacaccttgtcctaatttgggtctgtggtgtagtgagtccctggtctgactcagtggaactttgcccattgtctggaagacaatgagagaggaagtgagccagccgtggtctttcctccccacttctggcttcagggctgggttggggggtgggcagggccgaacagctgcagtgggattgggcagcagagattttcctggctgcaatccggcaaaggggctgtctcttgggatcctttggcttttcctggaaacactgtcctggtcctttgcccgggttttagggaaggatgagtagtgtcgggatggtggaggcaggagaagagagcagcgtggtttgctgagatttaggggtcttggatctgccactggctcctgataggtccctgggcggtcagtggcctccagatttttgttgtgtcttcagtgaaatgataccggtccccactgcccagctcacctcccggggctgcaggaggcaccggagataatggctgtagagggtcttgtaacctgaacattgcttgcaaacataaggaattctagttactgggaggaagcacagggcagaggccagaagaggccctcagatttgaggcaccctagcccagacggataaggatccaccagctctgggggcgtgagacccaagctggcaagaatctgcaatctggagccaaggctgtgggtgcctcagtggaggccgagtcagaccgacgtggccagctttgaccctcatggcctcctttcttctgtcccttgaccttcggctcctccctgtccaccctggcctccgagtctcctccacttttccttccgtctcagccctcagctctaggcgcccctccagagacccagctgtcttcccaggccccttcccagcaaggactagcttcatctgaaccacacacacactcacggttcaacctcagactaaaattatcctctcccctgggcaggatgaagggcagccgactccctggtgagggtggagacagacagcaccaaatggtcaggccagagaaggggccagggctaaaaatggacaaggaggtgtctgtggagggcccctgcggctccatcgatgcgggttagggctggagtctgcggggtggcgggtgcaggaagggagggtggggcaggactgggaggagactccgaccttggctgggcggtgccctccctctccacacagctgggtgtggggccgctcagccacaggctgcatgcctgtcggtctctttctggcaccctccttgaggccagcatcaggctttgggttcatgtttgggggtgtgccctggacggagtgtgggcctccagccaggctgccccactgacagtttggcaaaaccaggacctatctggaagccgaagccggggatcaccaggtggacccagcggggtgggactgagtgactgaccctggggtgttggattccatctggcccccggctgccttcaaacaggtgttcagtggaaagcgactggaggctgagttcccacctcatcactctcagagcaccttccggaagacctcgcccgcccctgggggcccagcaggggaggggcccctgcagagcctcacctgcctcattggggagaaggacctgcgcctcctggagaagctgggtgatggttcctttggcgtggtgcgcaggggcgagtgggacgcgccctcagggaagacggtgagctctctgtgtcctgccagcgcagcagaggcatgggacccggggctggtagtggctcttctgcccccaaccagggtgtggatgggactggggatgcgtcacagtgtggctcatcccagagtccgtgctcaggatttttggggttttatttatttatttatttttgagatggagtctcgctctgtcgcccaggctggagtgcagtaggcacgatctcggcttcctgcaacctccactttccgggttcaagcaatcctcctgcctcagcctcctgagtagctgggattacaggcatgcaccaccacactcagttaatttttgtatttttagtagagacggggtttcaccatgttggccaggctggtctcgaactcctgacctcagatgatctgcccactttagcctcccaaagtgcttggattacaggtgtgagccaccacgtccagcccatgctcaggtttaactaagcacatttattatttcaactataaaaataatttattataaaagtttggaaagtatttgaaaaacaagaaaaaaaaaatcgcctgtaatcccaccactcagaggaagccgagcctcttcctcccactttaggtattttgttggatttagttaagatacaaattctggatacagcttttaaaatcttgttctttcttctcggcgttgcatttaacattttcccctcagggataacgtgtcaccacagcatacagttctggtgtgactgtttcctgtgcagcagccgtgtccttactgctcagatcacgtgcggtgcattcccagcacctcagagggctcctcattctccgtccactcagtgcgtccttctcccggggaagccgctgtcactcagtgcatccttctcccggggaagccgctgtgcagacttccagctccacagctttgtttttggcattacatttacagcattttccttctacagcaaaacaccttttaatattccattttatgaccagcctgagcaatatggagaaaccccatctctactaaaaatacaaaattagccaggcgtggtggcacctgcctgtaatcccagctactcaggaggctgaggcaggagaatcacttgaacccgggaggcagaggttgcagtgagctgagatcacgtcactgcattccagcctgggcgacaagagcgagactgtctcaaaaaaaaaaattccattttataacatttgaatattctctcatcatactggttatctcttactttttggttggtatttaagcccggcattcccccaggaaggggaggtgtggccgacgatggctcctgagggccagccgtctgcccttctccagccaggcctcacgcagagcacgtaagcccaggcactggtgacatgcttacccacccagatgaggagctcacaggcagggatcgttgagccgagttggagggtggagcaggttggctccgcgtgtctgggacctggcaagtcctgagtccttgcaaatcccgctctgggcaggtgagtgtggctgtgaagtgcctgaagcccgatgtcctgagccagccagaagccatggacgacttcatccgggaggtcaatgccatgcactcgctcgaccaccgaaacctcatccgcctctacggggtggtgctcacgccgcccatgaagatggtgagtactgcgggcgggagggggcgggcagggagagggctccggtcccatatgtgtggttcggttcctctctccatcctaaggtcagaggcgccctagatcctactttggtcccccaacctgatggagtaaaggggtccacaggggcccagcctggtacgggctgtgtctgctgcggtccagtccgggtctgtctctggattttgctggtgctcagtgtcaagagagttactcccatgggaggggctggccactgagtttaatttggggaatttatgttttatttatctatttattttgagatggagtctcactttgtcgcccaggctggagtgcaatggcatgatctaggctcactgcaacctcggcctcctgggttcacgcgatattcctgcctcaggcttccaagtagctgggattacagccgtgcgctaccatgcctggctaatttttgtatttttagtagagacggggtttcaccatgttggccaggctggtctcaaactcctgacctcaaatgatccacccacctcggcctcccaaagtgctgggattacaggcgtgagccaccacgtccagctgagttttggaatttctagccactgcctctttgggctccttctctctaggcatcagtttcccaaattgcctcgagggagaggcctgagaaactgcaggactcctagaggtccccagacagcaggccaggaaggtgcgtgcagcctggctctggaaagccttcaggaaggggactgggggcccagcgtgggctgctgagaaggggcagggtcctccagctcattcctcctgcctcctccgtggcctcaggtgacagagctggcacctctgggatcgttgttggaccggctacgtaagcaccagggccacttcctcctggggactctgagccgctacgctgtgcaggtggctgagggcatgggctacctggagtccaagcgctttattcaccgtgacctggctgcccgcaatctgctgttggctacccgcgacctggtcaagatcggggactttgggctgatgcgagcactacctcagaatgacgaccattacgtcatgcaggaacatcgcaaggtgcccttcgcctggtgaggggcaggtgctgccagctcacagagtccctgcagacccaggcctcaaagcttctggggctttctggacccaccacagcccctggttttgcttgggcctgcccttgtctgttctaagcctggggtgccctcctttgcacccattcgctcaccatccatctaggaattcttgagggcccacgtgccagggtctgggtgctggaaatcacagggatacatgctgtgggactctccaaggggctttgctgggtggggtgatacggggatagatgctgtgtcctctccaaggggcattgttgggggtcgtgtttcagggatagatcctgtgtcctctccaaggggcattgctggcgggggggtgttatagggataaatgctgtgtcctctccaaagggcgttgctggggggggggtgttacaaggatagatgctgtgtcctcttcaaggggcatcgctgggggggtgttacagggatagatgctgtgtcctcttcaaggggcattgctggggggggtgttacagggatagatgccgtgtcctctccaaggggcgttgctggggggggtgttagagggacagatcctgtgtcctctccaaggggcatcgctgggggcgggtgttacagggatagatgctgtgtcctctccaaggggcactgctgggggggtgttacagggatagatgctgtgtcctctccaaggggcactgctgggggggtgttagagggacagatcctgtgtcctcttcaaggggcattgctggcgggtggtgttagagggatagacactgtgtcctctccaaggggcatcgctgggggcgggtgttacagggatagacgctgtgtcctctccaaggggcattgctgggggggtgttacagggatagatgctgtgtcctctccaaggggcactgctgggggggtgttacagggatagatgctgtgtcctctccaaggggcactgctgggggggtgttagagggacagatcctgtgtcctcttcaaggggcattgctggcgggtggtgttagagggatagacactgtgtcctctccaaggggcatcgctgggggcgggtgttacagggatagacgctgtgtcctctccaaggggcattgctgggggggtgttacagggatagatgctgtgtcctctccaaggggcattgctggggggcgggtgttacagggttagatgctgtgtcctctccaaggggcattgctggggggggtgttacagggatagatgctgtgtcctctccaaggggcattgctggggggggtgttacagggatagatgctgtgtcctctccaaggggcattgctgggggggtgttacagggatagatgctgtgtcctctccgagggtcattgctgagttaggtgatacagggatatatgctgtgtcctcttcaaggggcattgctgggggggtgttacagggatagatgctgtgtcctctccgaggggcattgctggggggcgggtgttacagggttagatgctgtgtcctctccaaggggcattgctgggggggggggtgttacagggatagatgctgtgtcctctccgagggtcactgctgagttaggtgatacagggatatatgctgtgtcctcttcaaggggcattgctgggggggtgttacagggatagatgctgtgtcctctccaaggggcatttctgtggggaggtattcaaaggtttcctaaaacatcagggaagttcgccagggaaagactcgttggtaagcatgttctagggagagctagtggtagacaggcccaggccacagcaggccttgtagatgggccagggctgcttacctgtgcactaggggtggtacttggccctgccctggcccctgtgtgggcttatcctctgctgagaccattgtggttctctggtgccagaggcacccagaggtctgtgatctgcctgctttgaggcgggaagggttgttccagttctgctttcccaagcggtggctgtgggcaacccttatgatccaggacgcatggtcatcttaacgagcagctggctttacacccagggcgagcagaggtcttaaattatgcccgttgtcctggagtaatttagagcagcctcttttgtattcaggcatcctggtttgcatggtaaggtatgaatatagttgcctttaaacagcacgatgaagtgggcgggttattgttctcatttcaccaaggaggataatgaaccttagcgatctcgagtgactttcccggccccatcccctttgaggggcagggctcgctctgcttccctgtctgggcaccaccctcctctctgcacctcagtccacgccgggatgtcctttctgacctcactgcagtggcacttccccctcaaccgggggtgcccagaacgaatgggtgtatttgggtgaagccagtatgactgtttctacccattttggttcttccccaggccctacccgaatttcccacccactgcttcctgccaaaggacccaaatccgaggatcccgccccaaatctgggaattgtcattctcccaccacagtcagaaaacagcctgtgatcttctctccctgccccatcccagagcctctgacctccttcctttccatgcttctctggctgggaaacttcctttcctcttcccccaccaggctgcaagtgaataagaggcctgggcttagacgatttccccaagtccctgcatcgtgtcgtcaaggggtcctgcccgcttcacacggcgcccctgagacccactgttgaacctggcacagggggtcacaacaagtgtttgctgcatgagtgttttaagtccctggggcggacgcaggtagggtgtttgagagggcttctctttgacccctgcctctgccaggtgtgcccccgagagcctgaagacacgcaccttctcccatgccagcgacacctggatgttcggggtgacactgtgggaaatgttcacctacggccaggagccctggatcggcctcaacggcagtcaggtgagggctgggagacgggcccccatagggctggtggggtgaattccattccctgcttgcagcctggccctgctggaactgcctctcaccaatggactccctcctcccacgccccgtgcctccccccacttcccgtgcctcccaccacgccccgtgtctcctctcacgccccgtatctgtatggcctcagggagagcccagcaaagagacggggagggaaaagctggggcctgccctccttctctagcccttgccacatccacttgttccgaggctccagacctgggaagaagggactggggctctggagagggcccctcccaggcaggcagatcccttctttggaggccaggcatggcagcagccgctgcagctgtggatgggctggagggaaggcgggaagtgaagggctgggcgctctgtttgtcgtcaaactctgcacctcctcaccttcagatcctgcataagatcgacaaggagggggagcggctgccccggcccgaggactgtccccaggacatctacaacgtcatggtccagtgctgggctcacaagccagaggacagacccacgtttgtggccctgcgggacttcctgctggaggtgagggacaggtcagcccaggagagctggggtgttcaagctgaggggctacccaggcgtcagtcccagagttggccacgaccttcctcttcctccaggcccagcccacagacatgcgggcccttcaggactttgaggaaccggacaagctgcacatccagatgaatgatgtcatcaccgtcatcgagggaaggtagggagtgcagggctgggccccgccctgggatcgcttgaagggcacaggtcggagggacctgtggacagatctgtttggcctccaagattcccttggccacatacaggctggcggttgggcctgaaccctgcagtgtgaggggaggacaggcctgcctccgtcttcctagtgcctttccctgcccagcttccctccaccaccctttcccactgggctgcagccctggctgtgtggttgggccaggctgcctttatggaggggtagggagtggcctggcctcggtggcagcagagttctggactcccgtgcttcctcctctgctcctccccgcttctctccctgcttcttcctggcacagggactcagccatccacctgggtgcgtttcagtagctgaagcagcccagcctgccctcttgcagctttccatccttcctgctgagcccaccaccccctcccaggcctgcctccagcctctggtcctctcttcccatctccccttgggaggaccctctctatacctaaccctcctcccacagcctctcgggagtccctgtcttccacctgagcccccgcagttctagcgcctgccctgaggccccaccactgctggccctgccttgtgctggctgatccccagggtgtctgagcaactggctggggcagggcaggtttcaggtacctttgaggcaggggcagtattgaggaccaggaagaagagtgaagtggaggaaatcccctgtgctcgcagctcctgactcaggccaggcaaggatggggctagggctgcttcccagggagcctcttccacctgcactgcagcttttggagtctgcggccttcggtgcaatcctgtgcctcttgggggtgggtggaggagacctggggggctgtgtggagtgtgacctgcaccgctgtggccccgacaccccgagccttcccaggcccggctccctcacccttgggcccagggtctgggaataggaatgacatactgagactgcagggcctgtggttaggggtgttatgctggggaagaatgcagaaggttctagaaagagaggcctggggacaggaggcaaacagtctgcaggtttggagctgaggggccagggatgggattgcaagcgtggcgctccggggagcattctggaaataggaagattaagggtgggggggtcccctggaagtacctggcagggcctccagcccgaagtccagcctcatgaccgtgtccacctccacgagctggaaagccgtgggcctggcccctcttgtgctgctgccggagccccagatctttaccacctgcttcccttgctctcagcaggagcctgtgtgcctgccagtgtccccaggggtgactcagagtggcctgtgtttggggcgtgtgtctctggagctggtgttttaggtcaccgcccgggcaaggcgggcagtgggaggggccgggagcggctgctcctgggagggttgtgggtgtgccccgccccgcccttccgtcgaaggcccccgttggccccagccgctggttccctgtggctgctgctggtggggctctgggggctccttccccctgggccaccagccctggcttggaaccacagcacctgccctccgtgcctggagctgctcaggaggtgggaggtgaggggcaggaggccacaacagccggtgaggcttgggagcgggcctgggtgtcggtggtggcagagcttgactctgcccccttgtttcttcagtccctgaatatctccatgtttgtttggctgcctccgtctccatgtctccaggcggatggctctgtgtgagtctttgggcctgggtgtgcatctgtgggtctgtgtttggagttccctcctagcctggccttctcttcgccgtggcttcccacttgcgaagctgtgtccagtatttgtttcctggtgcggagtctgggaggccacctgccgcagctctgactgagtctaggctcagtccttctcagggtaccaggctgtgggcagaggggagacacctagatgtttcgtgctgtgtctagatttggagacacaaatgatgactggtctttcccaggggctcgtttggaggaaggggtggctggcagcacttttgttccgcatacagagcgggtgttggaatccattgcgggtccttggcctggtctggccctggagcctcggcttcctgtggtgggtgggagccaggcatccgggttatccctccaggcctgggcgcctgggacccctagggagaagagcgggcgggcgttttgaacagaatgtccggcattagttgagccatttctggactaccttcggcccggacgggaacgtggtgctgagatttccagagctggggcagccttaggcagttctcagcaccggcctctgttttccatcttgtctaccccagagatgttgaccagaggcccgggggcagcaggaggtagaaggttcatgcggaggtgttgggcccttttcctgctcccccaggaagtcctcatccgcccctgcttcagtcacggccgggtagcagccctggccctcccatggccacggggactccggcctgttcatggcgggagagagagggcgcggacagggcgggcctggaaggaagggctggcctcagtcccctctggactgctggtgcctcggccacactgagcctcacacgggtgcgtgtgggctgcgagaagtgacacggtcctcttggaagtcccactggagccttgggatgaagctgccttggagtgtgcgtgggcgccatcccgagggggagcttcctgtgcctccgagcgtgcgtgggcgccatcccgagggggagcttcttgtgcctcggagcgtgcgtgggcgccatcccgagggggagtttcttgtgcctcggagcgtgcgtgggcgccatcccgagggggagtttcttgtgcctcggagcgtgcgtgggcgccatcccgaggggagcttcgtgtgcctcggagcgtgcgtgggcgccatcccgaggggagcttcctgtgcctcggagcgtgcgtgggcgccatcccgagggggagtttcttgtgcctcggagcgtgcgtgggcgccatcccgaggggagcttcttgtgcctcggagtgtgcgtgggcgccatcccgaggggagcttcttgtgcctcggagtgtgcgtgggcgccatcccgagggggagcttcctgtgcctccgagcgtgcgtgggcgccatcccgagggggagtttcttgtgcctcggagcgtgcgtgggcgccatcccgaggggagcttcttgtgcctcggagtgtgcgtgggcgccatcccgaggggagcttcttgtgcctcggagcgtgcgtgggcgccatcccgagggggagtttcttgtgcctcggagcgtgcgtgggcgccatcccgaggggagcttcttgtgcctcggagtgtgcgtgggcgccatcccgaggggagcttcctgtgcctcggagcgtgcgtgggcgccatcccgaggggagcttcctgtgcctcggagcgtgcgtgggcgccatcccgagggagagtttcttgtgcctcggagcgtgcgtgggcgccatcccgaggggagcttcttgtgcctcggagtgtgcgtgggcgccatcccgaggggagcttcttgtgcctcggagtgtgcgtgggcgccatcccgagggggagcttcttgtgcctcggagcgtgcgtgggcgccatcccgagggggagtttcttgtgcctcggagtgtgcgtgggcgccatcccgaggggagcttcttgcacacgtcctccgcactcttactctccttcccccaggagcaagcatgttttctcgagtggtgtcaggactcccagcagccatgggggctcttgcctcggccatacctgcactaagggaggtgggcttgatgtctcctttccctctcagaagtgggtcccaaaggaggcttctgtgcctggagctgggcagtgttggcggaagggagaggccagacggagtgacctgccttgggcacgagtcacgctgctctgagcaaggtctcggcctcagcggcattctcacccagttactgagcgcctctgaagaggtgtggagagcagagtccggcgtctggcccgcggcagccaccggggagcccgtgggtgtagcgggagagccgcagcccagccggtgccggggttcctcctctacgggccgccgtgggaggctgtgtgcgtgctggggagccggggctctgctccttcgagtggccctgctatttttcagatgggactcgtctcgtctcggggtactgtcctctctccttccttccctccctgcaggcagggtgggaatcacagggtggctgtgtgtggtggggccaggccagtggccctgtgtatgaggaggctgggcagggggagcacagccccgtctccccgcgccccgcgccccccgcctccccgccgaccgtggtgctctcgggtttgactttggtctctgggatgggctgttccggagtcaccccgctccagccaggcctcgtcaccttacaaggctgtgggtctgggtgcccaggcgtcgccacctcctccgtcctctctccccggcctggctgggtttcagaggagcccttcttcacgctttggccctgggacaggagaagtgggggttggtggggagggcgtgcagtgtggtgccacacgtgtccaccctagcagctctgggctgtcaccgcccccgcgtgcccagactctgcccacggggctgtcaccgcccccgcctgcccagacactgcccacggggctctcaccgcccccgcctgcccagacactgcccacggggctctcaccgcccccgcctgcccagactctgctcacggcatcacgtatgacaagtccagcagcagacgcgggagcctcacaacctgtgagagccttcgggagtcaggagtgtcttgcgggagccctgtgcttcctggcctgcctgcccctgcccctgcccctgcccctgcccaggccccggcttaggccacatcagcagaggtttcgtgtctgaggtcagagggggactggcagccctactgtctggtcactgtgggagagctgagttcccttttggacacaggtagagcccctcctgaggagacggggaggctcccgcaggccttccgggaggtggtggaaagctccggaagcaggtgaagcggtggagggagggactgagttgcccgagtgctcctagactctcccgcgtctgcattcgggaggcaggttgtagctggaggcctggcccccagcctagtgcaaggccctaggtgtcccccggcacccccgcacctctcagaactcctggaacccagccgaggagtgaaatcaagtggccagaagaggactggggccccggccttgccagggaactgaggggtgaggaggaggtgtgggcggggcgctggccccacagacctgaaagctggcgttgggtcccaggtctgctgggatctttctggtaaccgtggacaggtcatgttgcctgctgcagcagcttccagcgtgcctccttatttgcaaaccatagggaaagctgcctgacccacctagagagttgtgggtaaggccgtgtgcaaacaggcctgtacggggcatggtgggtcacgggggctgttggggaggagggccggtggcacacagcctggtcctgaggcctgagctccatcccccttctgccacagtggccagggtgtgaggagggtcccagtgccggggctgccccgccacgcctggcgttcaccgtgccatctctgtcgcgcagggccgagaactactggtggcgtggccagaacacacggacgctgtgtgtggggcccttccctcgcaacgtggtgacctccgtggccggcctgtcggcccaggacatcagccagcccctgcagaacagcttcatccacacagggcatggcgacagtgacccccgccactgctggggcttcccggacaggattgacgagtgagtactgggcggggatggatgctgacctggccccgctcgggactccagggccctcagcacggcacgcgtgggcggaatctgctcttcaccctttcgcccgggcttcagcccccgacccgccactctcccctcctcaccctggccttactctcgggaagctgtggaaccctaggaagcccagcctggtgggggttctccaggggaatgttctccaggggagtgttctccaggggagggttctccaggggagggttctccaggggaatgttctccaggggagggttctccaggggagggttctccaggggagggttctccaggggaatgttctccaggggagggttctccaggggagggttctccggggagcgttctccaggggaatgctgtccctgccattttcaagctttggggggccgatctcctaactctgagacacttcatctgtgaaacaggttcacccccccaataaggggaaggctgtaaatgcactctgaattagcacttgctgctcagatgcaggggtcctgagagaagctttcccactcactgtagatgaaagtagggtcaggagcttctgaggatggactcctgtttggtggaaaggtccccggagccacagctgtaacccctcttggtactcgggccttaggaaaatgaacttgggaggaacccggtgggagctgctgaggaggagagcttctcccatgacccccctgtggccccctgtgaccctgtgaccctgtgacccctgcacacgagcagtggttttccttctcctgctggtggtgccagagtcctggagacgtgaacctgctggctcaggccctggggatgtatgcaggtccacatgggagtgagcctgctttccagaaccagagtgggactggggaccttggggactgcagagggaacgttaggtggcagctccgcctccccaccacacagtactctacggagctcactccatacctgggagaggccctgtctcctatgtaagaggataaggccaccgaggggcatctgggaaggacacgcagaatcagtcacttccgggatgccaccccccaccccccgaagcttcttgcgccaggcctccaagcctctctgctggccgcagggggattccaggcccctggcctctgcagcccttctcctgctgacttctgatactctggtctgccctgagaggcgtggaaagcaggggccttcacccaccgggccccacacaccagaaccccacacagcgggcccccacacaccagaacccacacagcgggcccccacacaccagaaccccacacagcgagtccccccacaccagaacccacacagcgggcccccacacaccagaacccacacagcgggcccacacacactggaaccccaagctcacagggctcagcccatgtgttttgcctaaaaagaacccagcaagggcctgagagttggggtgaaagactgcagacacctccaggagaggctggtgccctctgccccactcctggcatgctgtggccagcccagccccattcctccaggctttaatcagccccagtgactaagtctcagatactgacagttggtgcagggacggagggtggatccggagcaggacaggtggcccagcctctcccgcacctcctggccatgtggcagaagggtgcctcctgcccaccctggctgggcaccatagctgggatgccccgttcttaggccctccatcgtggcctgcgggacaggagtgtctgccctctggccgctgcctggtgtgggctgggggcctggggggttgtggaggaccacctctgcccttgtagggtgtagttggagtccctgaggtcctaggctttccatcctggggtcaggtgtcctttctctgccttctctccaggacaccccccagctgagacgtgcggtcaggttctgtggactgggaggcgggaggcctgtgcttcagacccaagactacacccggtttcctccaggacgaaggggctctgatgagattctgccacccctccacacgcttcccctgctctcttgacccagctctctcccccacagactgtatctgggaaaccccatggacccccccgacctcctgagcgtggaactgagcacctcccggcccccccagcatctaggaggggtgaaaagtaagagcccctctgctccctggtgtccctaactcatcggctactcaggaaggggcactgtcttcacaggccaccctaaggctgctgttctgtttttggggacagtggggtcagggcagcaggcgggacagctgtgtccctggctccggctgggcgtggggtggaagacaggcagctgtatccgccgaggtgggcctcctcgggctgggtctgcagcaggcccgtccgccccggcgtccctcctccctccttccacggccgagctcagatcctggctttcctcacttccccctaatcctgctctcctgtcccaagccaaaaccaccccacggctccggctctgcctggggcctcctccatctcccggtcctctgcctatcatactggaccgccgtgttcctcatcctgccgcctgcggcctcccgtttgctgggggcttgtacattcactcgcccccattcacttctctcccttcgtctctctacactctgccctctcgtccggccgtctccctcctttgtcctctgtcctgctccgtctctctccccctgtccgcatggcctttcttgcaggggagcctccacctcgcccacctcagcctgccttcttcactcagagtaagtggggctgcttccgatgccttggcccccgcccccgccccctctctctcactcctctcctggaaggtacagagcctgggcggctgggccggaggggaggtgggtgggtgtgtgctgtgagcttccgcggctgccctggcctagcatgcctgccccccctcgagcccgccccccggagcctgggcttctgctcacgagtgtggccctggcttccgcctcggcctcactccctcccagacctgtctgagcttctggagcacgagtgtggccctggcttctgccttggcctcgctgcctcccagacctgcaggcgctgtctgggctttgtggccgttggtcaggagtactgtcctctccaaggatagtccttatagcccctgatggcaggaggcggctccgtgcctgcactaatggtgtgccgtgacaggggcggggatgagggctcactaactcgccagggcgcaggagcagggccgccggggtcttgtgctggtggaggcagcgtcaggcaggagccagtgttgcttgctgcagcttagacggagcgaggcggggctcaccggcccacatggggctgccgggcagagcaggttccgccctcctgatggagtggtcggaggtgcgctgagaacctggccgccggtggctgacctcagacctcggggggagttgggagtggagggttgctgggggacacttggctttctctcccacgtgccacctcccctcgtgtcccagaccctgcctgactgccttcctgttgggctctccctttccatcacagaaccaacctatgaccctgtgagcgaggaccaagaccccttgtccagcgacttcaagaggctgggcctgcggaagccaggcctgccccgagggctgtggctggcgaagccctcggcgcgggtgccgggcaccaaggccagccgaggcagcggggctgaggtcacgctcatcgacttcggtgaggagcccgtggtcccggccctacggccctgcgcgccctccctggcgcagctggccatggacgcctgctccctgctggacgagaccccgcctcagagccccacgcgggcactgccccggcccctgcaccccacgcctgtggtggactgggacgcacgcccgctgccccccccgcccgcctatgacgacgtggcccaggatgaggatgactttgagatctgctccatcaacagcaccctcgtgggcgcgggggtccctgccgggcccagccagggccagaccaactacgcctttgtgcctgagcaggcgcggccgccccctcccctggaggacaacctgttcctcccgccccagggtgggggcaagccgcccagctccgcacagaccgcagagatcttccaggcgctacagcaggagtgcatgaggcaactgcaggctccggccggctccccggccccctctcccagcccggggggtgacgacaagccccaggtgcctcctcgggtacccatcccccctcggcccacgcgcccacacgtccagctgtctccagcccccccgggcgaggaggagaccagccagtggcctggacctgcttcccctccccgggtgcctccgcgggagcccctgtcccctcaaggctcgaggacacccagccccctggtaccacctggcagctccccgctgccaccccggctctcaagctcacctgggaagaccatgcccaccacccagagctttgcctcagaccccaagtacgccaccccccaggtgatccaggcccctggcccgcgggctggtccctgcatcctgcccatcgtccgggatggcaagaaggtcagcagcacccactattacttgctgcccgagcgaccatcctacctggagcgctaccagcgcttcctgcgtgaggcccagagccccgaggagcctacccccctgcctgtgcctctgctgctgcccccacccagcaccccagcccccgccgcccccacggccaccgtgcggccgatgccccaggctgccttggaccccaaggccaacttctccaccaacaacagcaacccaggggcccggccaccacccccgagggccactgctcggctgccacagaggggctgccctggcgatgggccagaggcgggccggccagcagacaagatccagatggtgagcacccagcctggctgtgggcgaagcggggcagggcccaaggggcctggagcagtgggccctagtggtgctgacaggggtgggtgtgcccagctgcaggccatggtgcatggggtgaccacagaggagtgccaggcggccctgcagtgccacggctggagcgtgcagagggctgcccagtatctgaaggtaccgccacctcctgctcactctggctctcagggaccctgaagcctggttctgctgcccccagccccacgccccctggctccgactcccctcttccccaccctagtcggtgccctgggcccgcgtgtccatggcgccacccttacccccaggtggagcagctcttcgggctgggtctgcggcccagaggggagtgccacaaagtgctggagatgttcgactggaacctggagcaggccggctgccaccttctgggctcctggggccctgcccaccacaagtgagtgagccccacagtctgccccgctccgtgccccaggagggctgtcccagagcctgccacactgggaggaagcccaacacctcgcaggccgctcccggccagggagacacagctctccagctgcgggagggaggcgctcacagggcccagcaaatcgtttttcctaaatgtgtttatttggacattttagccacttggttttcaaatgagtacaagagggaattggagcctctctggttgaaggaggcttgcttccctagcacctgcagtgaccctgagcggctccaggaatggcactttttaggaccccatgatttgcacacctctttctcacctctgtgtttccatatttctgtttaaagtaacatttaaaatttcagtgttggctgggcaccgtggctcatggctgtaatccccagcactgtgggaggccaaggagggaggatcacctgaggtcaggagttcgagaccagcctggccaacatggcgagaccaggtctctactaaaaatacaaaaattaaccgggtatggtggtgggcacctgtaatcccacctgctggggaggctgaggcaggagaatcgcttcaacctgggaggcggaggttgctgtgagctgagattgcaccactgcactccatcctgggcgacagagggagactgtctccaaaaaaaaaaattttctctaaaaagaaaatatattgtctttcctgtaaaaggtttatattatagtttaacaaaatatatagacatttaaaatatatacatatataaacacactttatatattatgtaaatatatatatgagagcgctgtcaagtcaaaaagaagtgaactgaggtcacatggctggagccagcaccatggcaggaggcactggcgggaggaggggctgacacgggccaggccctggagatacctgctgcccttgtcccagcagcgtggccctgtgcacggtgcggagtttctccacatataaagcgtgtagataatagtgctcaccccgtggaagggactggcgcgatggatgggggacatgtctgtcttattgcgcccagcacgcctggcgccaggatgcaggcactccgtgtcacctgtctgtcccatactgtctcgggtggttcttactgatttgcagctgggatgcaggcactccctgtcacctgtctgtcccatactgtctcgggtcgttcttaactgatttgcacctgggacgcaggcactctgtgtcacctgtctgtcattgtctcgggtggttcttactgatttgcacctgggacgcaggcattcgctgtcacctgtctgtcactgtctcgggtggttcttactgatttgcacctgggatgcaggcactccgtgtcacttgtctgtcccagtctcgggtggttcttactgatttgcacctgggatgcaggcactcggtgtcacctgtctgtcccatcctgtctcgggtcattcttaactgatttgcacccgggacgcaggcactctgtgtcacctgtctgtcactgtctcgggtggttcttactgatttgcacccgggacgcaggcactcgctgtcacctgtctgtcactgtctcgggtggttcttactgatttgcacctgggacgcaggcactcgctgtcacctgtctgtcactgtctcgggtggttcttactgatttgcatctgggacgcaggcactcgctgtcacctgtctgtcactgtctcgggtggttcttactgatttgcatctgggacgcaggcactcgctgtcacctgtctgtcactgtctcgggtggttcttactgatttgcacctgggacgcaggcactccgtgtcacctgtctgtcactgtctcgggtggttcttactgatttgcacccgggacgcaggcactcgctgtcacctgtctgtcgctgtctcgggtggttcttactgatttgcatctgggatgcaggcactccgtgtcacctgtctgtcgctgtctcgggtggttcttactgatttgcacccgggacgcaggcacttgctgtcacctgtctgtcactgtctcgggtgtttcttactgatttgcacctgggacgcaggcactccgtgtcacctgtctgtcactgtctcgggtggttcttactgatttgcacctgggacgcaggcactcgctgtcacctgtctgtcactgtctcgggtggttcttactgatttgcatctgggacgcaggcactcgctgtcacctgtctgtcactgtctcaggtggttcttactgatttgcatctgggatgcaggcactccgtgtcacctgtctgtcactgtctcgggtggttcttactgatttgcatctaggatgcaggcactccgtgtcacctgtctgtcgctgtctggggtggttcttactgatttgcagctgggatgcaggcactccgtgtcacctgtctgtcgctgtctcgggtggttcttactgatttgcatccacataggctttgggctctatcccacctgtcgtcttcggattctctaatacgcaggagtgctcttctgttagtttactcatagtttattaaagtacagagaaaagacatccaggatgataaattttacagtccttgccggggactgccagcttccagtggtgttgcctggcaccagtgtgacccccggtgcctgccccgctgaaccttctgtaaactgtttaactgtgctggtggtttcccattctctaggcgctgagatgcgtctggagagccagagggcctgcctgaaggaatcacctgagcctgtccgtccaccaggagtggggagatgcccccatccagtcctggaggacccgctgctcctgctgctcccggggatggagcaaggccaaggctgcgggaggctgggagccctgccctgcccatccctcctgcaccagcgctgtccctgcacactttggttcagtcccggtgcccctgccaagatgtggaaggggccgggtgaagacaggcttgagggctgccccagcaggctctgggtatgacctgcctctggccctggtcctgggcggggcctgtgggtggagtagtacccccaggccctgccctgggtgacagactgggaggaaaccaggctggacctgggcaggcgggatgtgttggccacagggagaggcggaccggcacccggtgggacctcctaggactgggccttcttccagggggcccctggcagcagctggggtgtcgggcagaatgtgacttgtggccttaccatggacttgaatgggacttggctggcctcaggatcttgtgcctggaaatagcctgaggtggctcaggaagcggagaaagggtgccagaccattctctggcggggaccagggcccaaggccccagggctggaaggagaccaaggggcagccgccctggagggacatcagtgcttcctcttccacccaattcccccacgcggttccatgttttcccaccagcctgttggcgaagttgctgctccggcattcagtacctgcttcttccagagaaataaagttagtttctattttatgtta

SEQ ID NO: 15856 - DNA, 32197 bp, Homo sapiens
ggagaggaggaacggagctgggacgggctgcaggagggaatggccgcaggccggcaggaggaggggcgcgaccacccggccgccggccgatggcggatgaggctatgggggctgagacgcagtagcggccctgcacttctggaggatgctcgaggcccggccccccaggacgcagggcagtgacgctgccggtgccgctgcggggcgggggctgcgggcgctgcttctctccctgaccgcagccgctgggatttggggctccatgggggagagatctgcttaccagcgcctggctgggggcgaggagggaccgcaggtaatggggaaggctaggggatagccagatacctgggccccagaccccttcgtctgctgtgagccgggctcagccctgccccctgcggcggcctcaggagtgagagtgtctgctcctgggccaggggacagagagcggtgtgtttatgtgggtgtggcggtggtgacttagtgatgctggcatctgcctgtgtgtgcatggatcccctgggaccccaaaaagctgcccgttgggctttcttccatgccccaagggagtccaggaagtactgctaggattggggttcagtcttttaggagaactgagtctgtatgtcctgggcattcccgtttactaggcttctgaatatgaatatcaagccagatgtccttgtttgcttttgaaaatatggtcacggtgttgatggatggggtagcttcccttccccttggagagaacgcacttcctctcccgaccggcagagggcagtagctgacaggagaaagggggactcggtaggagcgttggggcttaaggtcgggctgttttcctgggcgaggagaaagggggccgggccgggccgggcgcggtggctcacgcctgtcatctcagcactttgggaggccgaggcgggcagatcacctgagacgaggacgctgaggtcaggaattcgggaccagcctggccaacatggcggaaaaaaaaaaaatagctgggcacggtggcgggggcctgtaatcccagctactcgggaggctgaggcaggagaatcacttgaacccgggatcgcgccactgcactcaagcctgggcgatagagcaagactctcaaaaaaaaaaagggggtgggggttccaggagccggcctggcgctgacccacacatactttgcttcttcccgcagctggattactgggccagttacaggtcttgttcttactggacatccaaggtcaggcatggggttctggtgactttgagacacatatttctggggacgctagagtttttaatctggccattctgatccagcagacccattttgaaatagagggaataaccctgcttaaattgttccccggcccccggtccctgggtctccttccaggtgtgcttggtgccagggtaaggctgtaggcttctctgatgcaagggcacagtcagccaaggtttggggaaaagtcagctccagtgtaacgcaggcctgatcttgtccacctgacctcagcccccactccatccacacctgccatctccacaagctttgtgggctggatggcagggggatgaggaagagggactgaagttgggggtgtccttctccccacctcctggagttagaccaggaaatggctgtcccttttggcatcatcagggaggtcaagtgctgggagaggccctgggaagggagcctgggatgctgagtccccaaagccctgctccccagctgcccacccctccagccagctgaggctccctgagctggtggccagctggacagggacaagagagcagtgtgcaagaaacaggggctccctaggcatggctcagcagggaggggggtgcctggggagctggagagggcttcctgcagctgtcaggtgtgtctgggggccgtagcgaggggggtgtaagagcagctggcaccctttgaggagggccagagagatcatttgtcagttctagaaacatgagggccccacgggggcttgatggagtgtctctaggccccttaatctgaggccgtggtctgtgtcaggggttatacaggagacatcctacagctttggggtgggggcgtcccagcaggagtctcagggcatatttgtttgttttgagcgggtttgggaacttggccacctggtctgagtaggaggcaccctgggtgtttgggcagcagacagggccaccccaggggagggggtgaggatcctcaccccaccctacccttgctcttggctggactgccccactctggcaggctgccggccgcctatttccgtcgggcaccagggtaacagggccacatcagggtctgagccaggagacacccagccaaggctgggactcgggggtgggggagggtctctgaggagtcatcgcagggcccagcggagcctctggggtccaagcctcccactcaggctgtgtgttagtccccacgtccccacacaggtccatgagggagtccacagccctgcttcatacgtgctgtttgagtcacatagccgccaccctaaagtcccaggagttgtctgcaactgtgagggctggggtagaagccagagacaggagctttgtgtatggggaggcaggggggccagcgcgggtggctgggaggaagagtcccccccattcctgccgccctcttggcagtgattcagaaaggtcctttttcagccagtgtcagagctgctcagctggggagggagggagagagggagagagagaggcaggcaagagggagggcggccgggcgggcagttgggtggggaagccggggagtagggctggactgtgaccactgccctggagagaagacagaaacaggacagaggatcccggctgcagccagcgtgaggaaagctctgctccctgccagaccggccagctgtggaaacccagcggggcttgcagcagagcggaggggcccaccccgttcttcctcatttcccacccctggtgtgggatttggggggctcctgggcagagtgcgaagctccggagccgaggccactggatccccagtgactgctcgggggggtcccgctgcgtggagatgccggcagcacgtcggttccctggcctggagctctccttccctctcctggccagactgcggcgacgcctgtacacagtgagtggggggcaggggctggactgctggggactggttgggctcctcagcaccagcacttgactgagaggcagaaagcaagactgggagcggctgagggaccccgccagtgagggcttgacggggagtccgggccaagtggcctctcctgcggctgctgcattccttcttcttggcctgtgtgtttgcacgccggccacagagtagtgacggacacaggtgtgcagactccatgaggtgcgggggccaggaccatgcagaattggagagtgtttgaactctggaggagctgcagccatgccctgtgctgcacaaagaaccttgggctggagggggacttagaggggaggcggacccctgcggagtcaccctggactgagaccctgaccgcttgcctcaccagcatcccggagttccttcccgtcctcccacatgcatcccctgtgcagagctgcgctgttgctgggtcagggagcatggagtgcacagctgaacagaggtgcattagctggtgtttcagggagagggaacaggccgggctgtgctttctgaagagcttcaggggaggggcctctgggtctcccccagccctgaccaccccgggcatggctttgagctgttttcaggagcctagaggagggggcctggatccttgggagttggtggtgggaaaaagaagaggagccctggagactgctctccctgcgggagactaggagcctccatcctgaggctgagccctggagggggggggtcactttgctccagggacagggcagcggtggccgtggccgggtggagaggagacgctgcctaggcccgtgactcctagtgtgcctctgggcttgcttccggaaagccacgacgcctggtcctcttaaaccccacgcctcttgttttgtaaacagatgattttgttgaggataaatgaatacagcttaatacttagaactgttcctcgcatatagtaagtgcagttgaagtgttagattttattttattttgagatggagttttgctcttgttgcccaggctggagtgcaatggcacgatcttggctcaccacagcctccgcctcccgggttcaagtgattctcctgcctcagcctcctgagtagctgagattacaggcatgtgccaccaggcccggctaattttctattttcagtagagatggggtttctccatgttggtcaggctggtctcgaactcaggtgatccgcccacctcagcctaagtgctgggattacagctgtgagccactgtgcttggcctagatgttatttttattgttacttgtcttaaataaagttaatagaaatatataacctgttatattaacatgttaacctgtgtacagtgaaacaagcaacacagtgggaactctaatataaagagacataagaggaaggtaataatattttatgtatcctaatacgttagtaacctagacaatgtagtgaggagtcagatcttgagacctcaggtggaaacaccgtgaaggcagcatctgcaagtgctgaccgagaggggagttttgaaataatgagagggggttgccttcactgacatttttgcaaatagtggacttctgctatgttctgaataaagcaaagtccattttcccttaagtttacacagtagtttcattccaggaaaatttattttatattaaaactgtaaggccaggagcagtggctccccagcactttgggaggccagggcaggtggatcacttgagctcaggagttcgagaccagcctggccaacatggaggaaccctgtctccactaaaaatacaaaaattagccgggcgcctgtgatcccagcttcttgggaggctgaggcgggagaattgcctgaacccgggaggctgagtttgcaatgagccaagatcataccattgtactccagcctgggagtctcactctgtctcaaaaaaaaaaaaaaaaaaaaccaaaaaactataaaagtactttcttatttatatataaagtgggatcatattctaggtttgcatgatcataaacaccttcatgaattgagttgtgtgggatttgggacagtgcgagaatgtcctacgcattgcaggctagctcacgctcttgtcccccaaccacccactgaatgtcactaaggcccccccaaatgttgtggcaaccagaactgtcccatagggggctgtgcagcctcatgagaaccattccagtaaagggttacagctttaagtttggaaaccacccggctggcccagctgcctggcccggtcgccgaggtggaagagccaggatttgaactgagagtttctcattcccctttgttactctttgtacttccctgagctgcctgaaaaagtcggaactggcactgtgttggcagggccactgggaactgtgggggcaggaggctcacgctgggcccaggctgtgtgtgcctgcttctcagtgctgctcactgtgatgggagctggggaggaggccaccgctgagtgggggagggggatggcttggtccccagccgggcagctggccttttttctctcgcctgttcctctttggggattgagcatgggtccggggctagcctggccacgccctcagctctgacacaccttacgcagacagggatgggtttgctgtgcggtgggtccgcttgcttagctttgaaggtgccaccagcttctttatctgggcccaggatagtgtaggtcagaggtcactctccggtaccactggctgattgcggcctgcagtgtgctttggccagcacgctgtgtgtgcgtgtgcatgcttttcagatctgaactattcagcattgttaaaaagtcaggagaaagacgaatattaagtgaaatcagggaacagaatggtatggttaatgcgtgaatattcgtgtagggacaacagagtctgaagcgtccgcagaagacatcactggcaactcctggggagccgggtggctgtgcagctggggagggaatgagattcgtggctcagtgtgccttctgaatattttaccacgtgcatatattaccttttccaaactttaatggtgagatttcacatgtaaattgggatttatttcttgaaaaaatggaaagctttgacaacactgggccacagtttcttctgacaaccattgatgggatctgagctccctgttgacaggggtgtctgcgagcccaccgcaggccccacccctccctcctgtcttccgcttgctgtggccctgtaggcacttgagtggtggcccgtggagtggtctttggattgttaggagaggctggggtggtcaggcgctgggaggaacttagcttagagctcatctgaccctgagagttttctccgtcacatctaaggagcccatagatgggtctcggggcacattgcaccctagagatttttatcaaatattaggagtaagaacacgtcggtgttcccggagagaccactgttagtttttaaaagattttcaaggactttcgacccctagaaacttagagcaggaatgtgagcacaggttgatcttgggtcactcagtcacagatcacatttcgggagcaagaccctgactcctgactccagggccagggctgtatctccgccgccctaattgtgccctgtggctggcaggaataggggacgtgggtccaggcggttctcggtagcttccctcgggagtcagaaggtggtgtgagcccttccgggtggccgtgtagtgggatgaaggtgagcccaggtcactcgggcaggcccctgttgtccccccacaacccttgtccctgagccactcctccccccacagaggctgggaggcggcagaatgcagccagaggagggcacaggctggctgctggagctgctgtccgaggtgcagctgcaacagtacttcctgcggctccgagatgacctcaacgtcacccgcctgtcccactttgagtacgtcaagaatgaggacctggagaagatcggcatgggtcggcctggtaggtgggatgttggcctggcttgtcttgcccctgaccctttccgtcctctgtcctcaggaccactcggtgcacgggtggcagctgagaactctgtcccagagccctgagggagcaggagggacatcagtaggtgctgatgtgtgatgagaacagttggcagttataaaggtgaattggagtttgaggagagtgaggccttccctaaagctggctacacaggagtcactccatgccccgttgtgattgttctcacgtagagtgtatgtcctccattgcccctccttcataagcatcgaattgagtctgttctcatcattctgactaccggggggtccatgtgcagagatctgtagggagaacgctaactctcagatggtttgctgattcgtgctcacgctctctttcttgctctctcacacgcacacacgcatgcacacgcacaggcatacacacacacacacacacacgcaggcacacacgcacatgcgcacacacgtgcacgcacgcatgcacgtgcacacacgcatgcacgtgcgtacgcacgcgctcacacgcctgcgcacacagacacgcacacacacacacacgtgtgtgcgcacacccgcatgcacacgcacggcatacacacatgtacacacacgcgcgcagacgcacacacgtgcgcacacgcgtgtgcacacacacgcacatacacacaggtttgctctgatttgagttcaacccttatcttcatatttttcctaaaagtgggggttgtagcatctaaaagtcatgatgttcttcatagaacattagaaacgtattagggctttcaagttaaaatagctaaataggtaataatgtgtcaagttagacactgacttagttaaaatagctaaataggtaataatgtgtcaagttagacactgacttagttaaaatagctaaataggtaataacgtgtcaagttagacactgacttagttaaaatagctaaataggtagtaatgtgctaagttagacattgatttatgctactttaggcctggatagttggtgtctgatgccagtagcataaaaaaattttacggagggaaaaaaacctcaacattgagaaaattctgttcattaccttgatttttcctgagaactgggagaagcccatcgcttcaagtttttggttaaacaccttcacccagtttgagagccagtgccaggaagtggagtgcagagaccgtcggtcagttgaggctccgggttagttggggttgatttcattgctatcatcgggtgggcggtgtctagtgacaggctcacccccaaggggaccacaggcagcagcctctctcgggctacggcggccttcacagcacgcggttccccgctctccctgcaggccagcggcggctgtgggaggctgtgaagaggaggaaggccttgtgcaaacgcaagtcgtggatgagtaaggtgggtgaggaggtgggtgaggaggtgggaggggggcagcctcgaacgcccccctccgcttctggtcctgggaaccttccccagctccccggcaggtcgaatctcgccgttctgccggcactttgtacaggaccccctcgtccagggtcttatcgggcagggcacttgtagagctgctgggctaagtgtctgtctccgccagatacggacacgtgagcagcctgtgtgcggtgaggccttcacagcccctctcggcacgcctggaacaggacctcattgacaagtgtgccttaacttagccctgctgtgtctgagcgttggggccagtgtccagcgtggggtggtggacctgtctggacccagaacgtctttgcttggcttccctcctccctgaccctctctaatctctgggtttctctggtcatctgtccctgctgacagcttccttccccacagcctgtccccacctctccccacaccttgtcctaatttgggtctgtggtgtagtgagtccctggtctgactcagtggaactttgcccattgtctggaagacaatgagagaggaagtgagccagccgtggtctttcctccccacttctggcttcagggctgggttggggggtgggcagggccgaacagctgcagtgggattgggcagcagagattttcctggctgcaatccggcaaaggggctgtctcttgggatcctttggcttttcctggaaacactgtcctggtcctttgcccgggttttagggaaggatgagtagtgtcgggatggtggaggcaggagaagagagcagcgtggtttgctgagatttaggggtcttggatctgccactggctcctgataggtccctgggcggtcagtggcctccagatttttgttgtgtcttcagtgaaatgataccggtccccactgcccagctcacctcccggggctgcaggaggcaccggagataatggctgtagagggtcttgtaacctgaacattgcttgcaaacataaggaattctagttactgggaggaagcacagggcagaggccagaagaggccctcagatttgaggcaccctagcccagacggataaggatccaccagctctgggggcgtgagacccaagctggcaagaatctgcaatctggagccaaggctgtgggtgcctcagtggaggccgagtcagaccgacgtggccagctttgaccctcatggcctcctttcttctgtcccttgaccttcggctcctccctgtccaccctggcctccgagtctcctccacttttccttccgtctcagccctcagctctaggcgcccctccagagacccagctgtcttcccaggccccttcccagcaaggactagcttcatctgaaccacacacacactcacggttcaacctcagactaaaattatcctctcccctgggcaggatgaagggcagccgactccctggtgagggtggagacagacagcaccaaatggtcaggccagagaaggggccagggctaaaaatggacaaggaggtgtctgtggagggcccctgcggctccatcgatgcgggttagggctggagtctgcggggtggcgggtgcaggaagggagggtggggcaggactgggaggagactccgaccttggctgggcggtgccctccctctccacacagctgggtgtggggccgctcagccacaggctgcatgcctgtcggtctctttctggcaccctccttgaggccagcatcaggctttgggttcatgtttgggggtgtgccctggacggagtgtgggcctccagccaggctgccccactgacagtttggcaaaaccaggacctatctggaagccgaagccggggatcaccaggtggacccagcggggtgggactgagtgactgaccctggggtgttggattccatctggcccccggctgccttcaaacaggtgttcagtggaaagcgactggaggctgagttcccacctcatcactctcagagcaccttccggaagacctcgcccgcccctgggggcccagcaggggaggggcccctgcagagcctcacctgcctcattggggagaaggacctgcgcctcctggagaagctgggtgatggttcctttggcgtggtgcgcaggggcgagtgggacgcgccctcagggaagacggtgagctctctgtgtcctgccagcgcagcagaggcatgggacccggggctggtagtggctcttctgcccccaaccagggtgtggatgggactggggatgcgtcacagtgtggctcatcccagagtccgtgctcaggatttttggggttttatttatttatttatttttgagatggagtctcgctctgtcgcccaggctggagtgcagtaggcacgatctcggcttcctgcaacctccactttccgggttcaagcaatcctcctgcctcagcctcctgagtagctgggattacaggcatgcaccaccacactcagttaatttttgtatttttagtagagacggggtttcaccatgttggccaggctggtctcgaactcctgacctcagatgatctgcccactttagcctcccaaagtgcttggattacaggtgtgagccaccacgtccagcccatgctcaggtttaactaagcacatttattatttcaactataaaaataatttattataaaagtttggaaagtatttgaaaaacaagaaaaaaaaaatcgcctgtaatcccaccactcagaggaagccgagcctcttcctcccactttaggtattttgttggatttagttaagatacaaattctggatacagcttttaaaatcttgttctttcttctcggcgttgcatttaacattttcccctcagggataacgtgtcaccacagcatacagttctggtgtgactgtttcctgtgcagcagccgtgtccttactgctcagatcacgtgcggtgcattcccagcacctcagagggctcctcattctccgtccactcagtgcgtccttctcccggggaagccgctgtcactcagtgcatccttctcccggggaagccgctgtgcagacttccagctccacagctttgtttttggcattacatttacagcattttccttctacagcaaaacaccttttaatattccattttatgaccagcctgagcaatatggagaaaccccatctctactaaaaatacaaaattagccaggcgtggtggcacctgcctgtaatcccagctactcaggaggctgaggcaggagaatcacttgaacccgggaggcagaggttgcagtgagctgagatcacgtcactgcattccagcctgggcgacaagagcgagactgtctcaaaaaaaaaaattccattttataacatttgaatattctctcatcatactggttatctcttactttttggttggtatttaagcccggcattcccccaggaaggggaggtgtggccgacgatggctcctgagggccagccgtctgcccttctccagccaggcctcacgcagagcacgtaagcccaggcactggtgacatgcttacccacccagatgaggagctcacaggcagggatcgttgagccgagttggagggtggagcaggttggctccgcgtgtctgggacctggcaagtcctgagtccttgcaaatcccgctctgggcaggtgagtgtggctgtgaagtgcctgaagcccgatgtcctgagccagccagaagccatggacgacttcatccgggaggtcaatgccatgcactcgctcgaccaccgaaacctcatccgcctctacggggtggtgctcacgccgcccatgaagatggtgagtactgcgggcgggagggggcgggcagggagagggctccggtcccatatgtgtggttcggttcctctctccatcctaaggtcagaggcgccctagatcctactttggtcccccaacctgatggagtaaaggggtccacaggggcccagcctggtacgggctgtgtctgctgcggtccagtccgggtctgtctctggattttgctggtgctcagtgtcaagagagttactcccatgggaggggctggccactgagtttaatttggggaatttatgttttatttatctatttattttgagatggagtctcactttgtcgcccaggctggagtgcaatggcatgatctaggctcactgcaacctcggcctcctgggttcacgcgatattcctgcctcaggcttccaagtagctgggattacagccgtgcgctaccatgcctggctaatttttgtatttttagtagagacggggtttcaccatgttggccaggctggtctcaaactcctgacctcaaatgatccacccacctcggcctcccaaagtgctgggattacaggcgtgagccaccacgtccagctgagttttggaatttctagccactgcctctttgggctccttctctctaggcatcagtttcccaaattgcctcgagggagaggcctgagaaactgcaggactcctagaggtccccagacagcaggccaggaaggtgcgtgcagcctggctctggaaagccttcaggaaggggactgggggcccagcgtgggctgctgagaaggggcagggtcctccagctcattcctcctgcctcctccgtggcctcaggtgacagagctggcacctctgggatcgttgttggaccggctacgtaagcaccagggccacttcctcctggggactctgagccgctacgctgtgcaggtggctgagggcatgggctacctggagtccaagcgctttattcaccgtgacctggctgcccgcaatctgctgttggctacccgcgacctggtcaagatcggggactttgggctgatgcgagcactacctcagaatgacgaccattacgtcatgcaggaacatcgcaaggtgcccttcgcctggtgaggggcaggtgctgccagctcacagagtccctgcagacccaggcctcaaagcttctggggctttctggacccaccacagcccctggttttgcttgggcctgcccttgtctgttctaagcctggggtgccctcctttgcacccattcgctcaccatccatctaggaattcttgagggcccacgtgccagggtctgggtgctggaaatcacagggatacatgctgtgggactctccaaggggctttgctgggtggggtgatacggggatagatgctgtgtcctctccaaggggcattgttgggggtcgtgtttcagggatagatcctgtgtcctctccaaggggcattgctggcgggggggtgttatagggataaatgctgtgtcctctccaaagggcgttgctggggggggggtgttacaaggatagatgctgtgtcctcttcaaggggcatcgctgggggggtgttacagggatagatgctgtgtcctcttcaaggggcattgctggggggggtgttacagggatagatgccgtgtcctctccaaggggcgttgctggggggggtgttagagggacagatcctgtgtcctctccaaggggcatcgctgggggcgggtgttacagggatagatgctgtgtcctctccaaggggcactgctgggggggtgttacagggatagatgctgtgtcctctccaaggggcactgctgggggggtgttagagggacagatcctgtgtcctcttcaaggggcattgctggcgggtggtgttagagggatagacactgtgtcctctccaaggggcatcgctgggggcgggtgttacagggatagacgctgtgtcctctccaaggggcattgctgggggggtgttacagggatagatgctgtgtcctctccaaggggcactgctgggggggtgttacagggatagatgctgtgtcctctccaaggggcactgctgggggggtgttagagggacagatcctgtgtcctcttcaaggggcattgctggcgggtggtgttagagggatagacactgtgtcctctccaaggggcatcgctgggggcgggtgttacagggatagacgctgtgtcctctccaaggggcattgctgggggggtgttacagggatagatgctgtgtcctctccaaggggcattgctggggggcgggtgttacagggttagatgctgtgtcctctccaaggggcattgctggggggggtgttacagggatagatgctgtgtcctctccaaggggcattgctggggggggtgttacagggatagatgctgtgtcctctccaaggggcattgctgggggggtgttacagggatagatgctgtgtcctctccgagggtcattgctgagttaggtgatacagggatatatgctgtgtcctcttcaaggggcattgctgggggggtgttacagggatagatgctgtgtcctctccgaggggcattgctggggggcgggtgttacagggttagatgctgtgtcctctccaaggggcattgctgggggggggggtgttacagggatagatgctgtgtcctctccgagggtcactgctgagttaggtgatacagggatatatgctgtgtcctcttcaaggggcattgctgggggggtgttacagggatagatgctgtgtcctctccaaggggcatttctgtggggaggtattcaaaggtttcctaaaacatcagggaagttcgccagggaaagactcgttggtaagcatgttctagggagagctagtggtagacaggcccaggccacagcaggccttgtagatgggccagggctgcttacctgtgcactaggggtggtacttggccctgccctggcccctgtgtgggcttatcctctgctgagaccattgtggttctctggtgccagaggcacccagaggtctgtgatctgcctgctttgaggcgggaagggttgttccagttctgctttcccaagcggtggctgtgggcaacccttatgatccaggacgcatggtcatcttaacgagcagctggctttacacccagggcgagcagaggtcttaaattatgcccgttgtcctggagtaatttagagcagcctcttttgtattcaggcatcctggtttgcatggtaaggtatgaatatagttgcctttaaacagcacgatgaagtgggcgggttattgttctcatttcaccaaggaggataatgaaccttagcgatctcgagtgactttcccggccccatcccctttgaggggcagggctcgctctgcttccctgtctgggcaccaccctcctctctgcacctcagtccacgccgggatgtcctttctgacctcactgcagtggcacttccccctcaaccgggggtgcccagaacgaatgggtgtatttgggtgaagccagtatgactgtttctacccattttggttcttccccaggccctacccgaatttcccacccactgcttcctgccaaaggacccaaatccgaggatcccgccccaaatctgggaattgtcattctcccaccacagtcagaaaacagcctgtgatcttctctccctgccccatcccagagcctctgacctccttcctttccatgcttctctggctgggaaacttcctttcctcttcccccaccaggctgcaagtgaataagaggcctgggcttagacgatttccccaagtccctgcatcgtgtcgtcaaggggtcctgcccgcttcacacggcgcccctgagacccactgttgaacctggcacagggggtcacaacaagtgtttgctgcatgagtgttttaagtccctggggcggacgcaggtagggtgtttgagagggcttctctttgacccctgcctctgccaggtgtgcccccgagagcctgaagacacgcaccttctcccatgccagcgacacctggatgttcggggtgacactgtgggaaatgttcacctacggccaggagccctggatcggcctcaacggcagtcaggtgagggctgggagacgggcccccatagggctggtggggtgaattccattccctgcttgcagcctggccctgctggaactgcctctcaccaatggactccctcctcccacgccccgtgcctccccccacttcccgtgcctcccaccacgccccgtgtctcctctcacgccccgtatctgtatggcctcagggagagcccagcaaagagacggggagggaaaagctggggcctgccctccttctctagcccttgccacatccacttgttccgaggctccagacctgggaagaagggactggggctctggagagggcccctcccaggcaggcagatcccttctttggaggccaggcatggcagcagccgctgcagctgtggatgggctggagggaaggcgggaagtgaagggctgggcgctctgtttgtcgtcaaactctgcacctcctcaccttcagatcctgcataagatcgacaaggagggggagcggctgccccggcccgaggactgtccccaggacatctacaacgtcatggtccagtgctgggctcacaagccagaggacagacccacgtttgtggccctgcgggacttcctgctggaggtgagggacaggtcagcccaggagagctggggtgttcaagctgaggggctacccaggcgtcagtcccagagttggccacgaccttcctcttcctccaggcccagcccacagacatgcgggcccttcaggactttgaggaaccggacaagctgcacatccagatgaatgatgtcatcaccgtcatcgagggaaggtagggagtgcagggctgggccccgccctgggatcgcttgaagggcacaggtcggagggacctgtggacagatctgtttggcctccaagattcccttggccacatacaggctggcggttgggcctgaaccctgcagtgtgaggggaggacaggcctgcctccgtcttcctagtgcctttccctgcccagcttccctccaccaccctttcccactgggctgcagccctggctgtgtggttgggccaggctgcctttatggaggggtagggagtggcctggcctcggtggcagcagagttctggactcccgtgcttcctcctctgctcctccccgcttctctccctgcttcttcctggcacagggactcagccatccacctgggtgcgtttcagtagctgaagcagcccagcctgccctcttgcagctttccatccttcctgctgagcccaccaccccctcccaggcctgcctccagcctctggtcctctcttcccatctccccttgggaggaccctctctatacctaaccctcctcccacagcctctcgggagtccctgtcttccacctgagcccccgcagttctagcgcctgccctgaggccccaccactgctggccctgccttgtgctggctgatccccagggtgtctgagcaactggctggggcagggcaggtttcaggtacctttgaggcaggggcagtattgaggaccaggaagaagagtgaagtggaggaaatcccctgtgctcgcagctcctgactcaggccaggcaaggatggggctagggctgcttcccagggagcctcttccacctgcactgcagcttttggagtctgcggccttcggtgcaatcctgtgcctcttgggggtgggtggaggagacctggggggctgtgtggagtgtgacctgcaccgctgtggccccgacaccccgagccttcccaggcccggctccctcacccttgggcccagggtctgggaataggaatgacatactgagactgcagggcctgtggttaggggtgttatgctggggaagaatgcagaaggttctagaaagagaggcctggggacaggaggcaaacagtctgcaggtttggagctgaggggccagggatgggattgcaagcgtggcgctccggggagcattctggaaataggaagattaagggtgggggggtcccctggaagtacctggcagggcctccagcccgaagtccagcctcatgaccgtgtccacctccacgagctggaaagccgtgggcctggcccctcttgtgctgctgccggagccccagatctttaccacctgcttcccttgctctcagcaggagcctgtgtgcctgccagtgtccccaggggtgactcagagtggcctgtgtttggggcgtgtgtctctggagctggtgttttaggtcaccgcccgggcaaggcgggcagtgggaggggccgggagcggctgctcctgggagggttgtgggtgtgccccgccccgcccttccgtcgaaggcccccgttggccccagccgctggttccctgtggctgctgctggtggggctctgggggctccttccccctgggccaccagccctggcttggaaccacagcacctgccctccgtgcctggagctgctcaggaggtgggaggtgaggggcaggaggccacaacagccggtgaggcttgggagcgggcctgggtgtcggtggtggcagagcttgactctgcccccttgtttcttcagtccctgaatatctccatgtttgtttggctgcctccgtctccatgtctccaggcggatggctctgtgtgagtctttgggcctgggtgtgcatctgtgggtctgtgtttggagttccctcctagcctggccttctcttcgccgtggcttcccacttgcgaagctgtgtccagtatttgtttcctggtgcggagtctgggaggccacctgccgcagctctgactgagtctaggctcagtccttctcagggtaccaggctgtgggcagaggggagacacctagatgtttcgtgctgtgtctagatttggagacacaaatgatgactggtctttcccaggggctcgtttggaggaaggggtggctggcagcacttttgttccgcatacagagcgggtgttggaatccattgcgggtccttggcctggtctggccctggagcctcggcttcctgtggtgggtgggagccaggcatccgggttatccctccaggcctgggcgcctgggacccctagggagaagagcgggcgggcgttttgaacagaatgtccggcattagttgagccatttctggactaccttcggcccggacgggaacgtggtgctgagatttccagagctggggcagccttaggcagttctcagcaccggcctctgttttccatcttgtctaccccagagatgttgaccagaggcccgggggcagcaggaggtagaaggttcatgcggaggtgttgggcccttttcctgctcccccaggaagtcctcatccgcccctgcttcagtcacggccgggtagcagccctggccctcccatggccacggggactccggcctgttcatggcgggagagagagggcgcggacagggcgggcctggaaggaagggctggcctcagtcccctctggactgctggtgcctcggccacactgagcctcacacgggtgcgtgtgggctgcgagaagtgacacggtcctcttggaagtcccactggagccttgggatgaagctgccttggagtgtgcgtgggcgccatcccgagggggagcttcctgtgcctccgagcgtgcgtgggcgccatcccgagggggagcttcttgtgcctcggagcgtgcgtgggcgccatcccgagggggagtttcttgtgcctcggagcgtgcgtgggcgccatcccgagggggagtttcttgtgcctcggagcgtgcgtgggcgccatcccgaggggagcttcgtgtgcctcggagcgtgcgtgggcgccatcccgaggggagcttcctgtgcctcggagcgtgcgtgggcgccatcccgagggggagtttcttgtgcctcggagcgtgcgtgggcgccatcccgaggggagcttcttgtgcctcggagtgtgcgtgggcgccatcccgaggggagcttcttgtgcctcggagtgtgcgtgggcgccatcccgagggggagcttcctgtgcctccgagcgtgcgtgggcgccatcccgagggggagtttcttgtgcctcggagcgtgcgtgggcgccatcccgaggggagcttcttgtgcctcggagtgtgcgtgggcgccatcccgaggggagcttcttgtgcctcggagcgtgcgtgggcgccatcccgagggggagtttcttgtgcctcggagcgtgcgtgggcgccatcccgaggggagcttcttgtgcctcggagtgtgcgtgggcgccatcccgaggggagcttcctgtgcctcggagcgtgcgtgggcgccatcccgaggggagcttcctgtgcctcggagcgtgcgtgggcgccatcccgagggagagtttcttgtgcctcggagcgtgcgtgggcgccatcccgaggggagcttcttgtgcctcggagtgtgcgtgggcgccatcccgaggggagcttcttgtgcctcggagtgtgcgtgggcgccatcccgagggggagcttcttgtgcctcggagcgtgcgtgggcgccatcccgagggggagtttcttgtgcctcggagtgtgcgtgggcgccatcccgaggggagcttcttgcacacgtcctccgcactcttactctccttcccccaggagcaagcatgttttctcgagtggtgtcaggactcccagcagccatgggggctcttgcctcggccatacctgcactaagggaggtgggcttgatgtctcctttccctctcagaagtgggtcccaaaggaggcttctgtgcctggagctgggcagtgttggcggaagggagaggccagacggagtgacctgccttgggcacgagtcacgctgctctgagcaaggtctcggcctcagcggcattctcacccagttactgagcgcctctgaagaggtgtggagagcagagtccggcgtctggcccgcggcagccaccggggagcccgtgggtgtagcgggagagccgcagcccagccggtgccggggttcctcctctacgggccgccgtgggaggctgtgtgcgtgctggggagccggggctctgctccttcgagtggccctgctatttttcagatgggactcgtctcgtctcggggtactgtcctctctccttccttccctccctgcaggcagggtgggaatcacagggtggctgtgtgtggtggggccaggccagtggccctgtgtatgaggaggctgggcagggggagcacagccccgtctccccgcgccccgcgccccccgcctccccgccgaccgtggtgctctcgggtttgactttggtctctgggatgggctgttccggagtcaccccgctccagccaggcctcgtcaccttacaaggctgtgggtctgggtgcccaggcgtcgccacctcctccgtcctctctccccggcctggctgggtttcagaggagcccttcttcacgctttggccctgggacaggagaagtgggggttggtggggagggcgtgcagtgtggtgccacacgtgtccaccctagcagctctgggctgtcaccgcccccgcgtgcccagactctgcccacggggctgtcaccgcccccgcctgcccagacactgcccacggggctctcaccgcccccgcctgcccagacactgcccacggggctctcaccgcccccgcctgcccagactctgctcacggcatcacgtatgacaagtccagcagcagacgcgggagcctcacaacctgtgagagccttcgggagtcaggagtgtcttgcgggagccctgtgcttcctggcctgcctgcccctgcccctgcccctgcccctgcccaggccccggcttaggccacatcagcagaggtttcgtgtctgaggtcagagggggactggcagccctactgtctggtcactgtgggagagctgagttcccttttggacacaggtagagcccctcctgaggagacggggaggctcccgcaggccttccgggaggtggtggaaagctccggaagcaggtgaagcggtggagggagggactgagttgcccgagtgctcctagactctcccgcgtctgcattcgggaggcaggttgtagctggaggcctggcccccagcctagtgcaaggccctaggtgtcccccggcacccccgcacctctcagaactcctggaacccagccgaggagtgaaatcaagtggccagaagaggactggggccccggccttgccagggaactgaggggtgaggaggaggtgtgggcggggcgctggccccacagacctgaaagctggcgttgggtcccaggtctgctgggatctttctggtaaccgtggacaggtcatgttgcctgctgcagcagcttccagcgtgcctccttatttgcaaaccatagggaaagctgcctgacccacctagagagttgtgggtaaggccgtgtgcaaacaggcctgtacggggcatggtgggtcacgggggctgttggggaggagggccggtggcacacagcctggtcctgaggcctgagctccatcccccttctgccacagtggccagggtgtgaggagggtcccagtgccggggctgccccgccacgcctggcgttcaccgtgccatctctgtcgcgcagggccgagaactactggtggcgtggccagaacacacggacgctgtgtgtggggcccttccctcgcaacgtggtgacctccgtggccggcctgtcggcccaggacatcagccagcccctgcagaacagcttcatccacacagggcatggcgacagtgacccccgccactgctggggcttcccggacaggattgacgagtgagtactgggcggggatggatgctgacctggccccgctcgggactccagggccctcagcacggcacgcgtgggcggaatctgctcttcaccctttcgcccgggcttcagcccccgacccgccactctcccctcctcaccctggccttactctcgggaagctgtggaaccctaggaagcccagcctggtgggggttctccaggggaatgttctccaggggagtgttctccaggggagggttctccaggggagggttctccaggggaatgttctccaggggagggttctccaggggagggttctccaggggagggttctccaggggaatgttctccaggggagggttctccaggggagggttctccggggagcgttctccaggggaatgctgtccctgccattttcaagctttggggggccgatctcctaactctgagacacttcatctgtgaaacaggttcacccccccaataaggggaaggctgtaaatgcactctgaattagcacttgctgctcagatgcaggggtcctgagagaagctttcccactcactgtagatgaaagtagggtcaggagcttctgaggatggactcctgtttggtggaaaggtccccggagccacagctgtaacccctcttggtactcgggccttaggaaaatgaacttgggaggaacccggtgggagctgctgaggaggagagcttctcccatgacccccctgtggccccctgtgaccctgtgaccctgtgacccctgcacacgagcagtggttttccttctcctgctggtggtgccagagtcctggagacgtgaacctgctggctcaggccctggggatgtatgcaggtccacatgggagtgagcctgctttccagaaccagagtgggactggggaccttggggactgcagagggaacgttaggtggcagctccgcctccccaccacacagtactctacggagctcactccatacctgggagaggccctgtctcctatgtaagaggataaggccaccgaggggcatctgggaaggacacgcagaatcagtcacttccgggatgccaccccccaccccccgaagcttcttgcgccaggcctccaagcctctctgctggccgcagggggattccaggcccctggcctctgcagcccttctcctgctgacttctgatactctggtctgccctgagaggcgtggaaagcaggggccttcacccaccgggccccacacaccagaaccccacacagcgggcccccacacaccagaacccacacagcgggcccccacacaccagaaccccacacagcgagtccccccacaccagaacccacacagcgggcccccacacaccagaacccacacagcgggcccacacacactggaaccccaagctcacagggctcagcccatgtgttttgcctaaaaagaacccagcaagggcctgagagttggggtgaaagactgcagacacctccaggagaggctggtgccctctgccccactcctggcatgctgtggccagcccagccccattcctccaggctttaatcagccccagtgactaagtctcagatactgacagttggtgcagggacggagggtggatccggagcaggacaggtggcccagcctctcccgcacctcctggccatgtggcagaagggtgcctcctgcccaccctggctgggcaccatagctgggatgccccgttcttaggccctccatcgtggcctgcgggacaggagtgtctgccctctggccgctgcctggtgtgggctgggggcctggggggttgtggaggaccacctctgcccttgtagggtgtagttggagtccctgaggtcctaggctttccatcctggggtcaggtgtcctttctctgccttctctccaggacaccccccagctgagacgtgcggtcaggttctgtggactgggaggcgggaggcctgtgcttcagacccaagactacacccggtttcctccaggacgaaggggctctgatgagattctgccacccctccacacgcttcccctgctctcttgacccagctctctcccccacagactgtatctgggaaaccccatggacccccccgacctcctgagcgtggaactgagcacctcccggcccccccagcatctaggaggggtgaaaagtaagagcccctctgctccctggtgtccctaactcatcggctactcaggaaggggcactgtcttcacaggccaccctaaggctgctgttctgtttttggggacagtggggtcagggcagcaggcgggacagctgtgtccctggctccggctgggcgtggggtggaagacaggcagctgtatccgccgaggtgggcctcctcgggctgggtctgcagcaggcccgtccgccccggcgtccctcctccctccttccacggccgagctcagatcctggctttcctcacttccccctaatcctgctctcctgtcccaagccaaaaccaccccacggctccggctctgcctggggcctcctccatctcccggtcctctgcctatcatactggaccgccgtgttcctcatcctgccgcctgcggcctcccgtttgctgggggcttgtacattcactcgcccccattcacttctctcccttcgtctctctacactctgccctctcgtccggccgtctccctcctttgtcctctgtcctgctccgtctctctccccctgtccgcatggcctttcttgcaggggagcctccacctcgcccacctcagcctgccttcttcactcagagtaagtggggctgcttccgatgccttggcccccgcccccgccccctctctctcactcctctcctggaaggtacagagcctgggcggctgggccggaggggaggtgggtgggtgtgtgctgtgagcttccgcggctgccctggcctagcatgcctgccccccctcgagcccgccccccggagcctgggcttctgctcacgagtgtggccctggcttccgcctcggcctcactccctcccagacctgtctgagcttctggagcacgagtgtggccctggcttctgccttggcctcgctgcctcccagacctgcaggcgctgtctgggctttgtggccgttggtcaggagtactgtcctctccaaggatagtccttatagcccctgatggcaggaggcggctccgtgcctgcactaatggtgtgccgtgacaggggcggggatgagggctcactaactcgccagggcgcaggagcagggccgccggggtcttgtgctggtggaggcagcgtcaggcaggagccagtgttgcttgctgcagcttagacggagcgaggcggggctcaccggcccacatggggctgccgggcagagcaggttccgccctcctgatggagtggtcggaggtgcgctgagaacctggccgccggtggctgacctcagacctcggggggagttgggagtggagggttgctgggggacacttggctttctctcccacgtgccacctcccctcgtgtcccagaccctgcctgactgccttcctgttgggctctccctttccatcacagaaccaacctatgaccctgtgagcgaggaccaagaccccttgtccagcgacttcaagaggctgggcctgcggaagccaggcctgccccgagggctgtggctggcgaagccctcggcgcgggtgccgggcaccaaggccagccgaggcagcggggctgaggtcacgctcatcgacttcggtgaggagcccgtggtcccggccctacggccctgcgcgccctccctggcgcagctggccatggacgcctgctccctgctggacgagaccccgcctcagagccccacgcgggcactgccccggcccctgcaccccacgcctgtggtggactgggacgcacgcccgctgccccccccgcccgcctatgacgacgtggcccaggatgaggatgactttgagatctgctccatcaacagcaccctcgtgggcgcgggggtccctgccgggcccagccagggccagaccaactacgcctttgtgcctgagcaggcgcggccgccccctcccctggaggacaacctgttcctcccgccccagggtgggggcaagccgcccagctccgcacagaccgcagagatcttccaggcgctacagcaggagtgcatgaggcaactgcaggctccggccggctccccggccccctctcccagcccggggggtgacgacaagccccaggtgcctcctcgggtacccatcccccctcggcccacgcgcccacacgtccagctgtctccagcccccccgggcgaggaggagaccagccagtggcctggacctgcttcccctccccgggtgcctccgcgggagcccctgtcccctcaaggctcgaggacacccagccccctggtaccacctggcagctccccgctgccaccccggctctcaagctcacctgggaagaccatgcccaccacccagagctttgcctcagaccccaagtacgccaccccccaggtgatccaggcccctggcccgcgggctggtccctgcatcctgcccatcgtccgggatggcaagaaggtcagcagcacccactattacttgctgcccgagcgaccatcctacctggagcgctaccagcgcttcctgcgtgaggcccagagccccgaggagcctacccccctgcctgtgcctctgctgctgcccccacccagcaccccagcccccgccgcccccacggccaccgtgcggccgatgccccaggctgccttggaccccaaggccaacttctccaccaacaacagcaacccaggggcccggccaccacccccgagggccactgctcggctgccacagaggggctgccctggcgatgggccagaggcgggccggccagcagacaagatccagatggtgagcacccagcctggctgtgggcgaagcggggcagggcccaaggggcctggagcagtgggccctagtggtgctgacaggggtgggtgtgcccagctgcaggccatggtgcatggggtgaccacagaggagtgccaggcggccctgcagtgccacggctggagcgtgcagagggctgcccagtatctgaaggtaccgccacctcctgctcactctggctctcagggaccctgaagcctggttctgctgcccccagccccacgccccctggctccgactcccctcttccccaccctagtcggtgccctgggcccgcgtgtccatggcgccacccttacccccaggtggagcagctcttcgggctgggtctgcggcccagaggggagtgccacaaagtgctggagatgttcgactggaacctggagcaggccggctgccaccttctgggctcctggggccctgcccaccacaagtgagtgagccccacagtctgccccgctccgtgccccaggagggctgtcccagagcctgccacactgggaggaagcccaacacctcgcaggccgctcccggccagggagacacagctctccagctgcgggagggaggcgctcacagggcccagcaaatcgtttttcctaaatgtgtttatttggacattttagccacttggttttcaaatgagtacaagagggaattggagcctctctggttgaaggaggcttgcttccctagcacctgcagtgaccctgagcggctccaggaatggcactttttaggaccccatgatttgcacacctctttctcacctctgtgtttccatatttctgtttaaagtaacatttaaaatttcagtgttggctgggcaccgtggctcatggctgtaatccccagcactgtgggaggccaaggagggaggatcacctgaggtcaggagttcgagaccagcctggccaacatggcgagaccaggtctctactaaaaatacaaaaattaaccgggtatggtggtgggcacctgtaatcccacctgctggggaggctgaggcaggagaatcgcttcaacctgggaggcggaggttgctgtgagctgagattgcaccactgcactccatcctgggcgacagagggagactgtctccaaaaaaaaaaattttctctaaaaagaaaatatattgtctttcctgtaaaaggtttatattatagtttaacaaaatatatagacatttaaaatatatacatatataaacacactttatatattatgtaaatatatatatgagagcgctgtcaagtcaaaaagaagtgaactgaggtcacatggctggagccagcaccatggcaggaggcactggcgggaggaggggctgacacgggccaggccctggagatacctgctgcccttgtcccagcagcgtggccctgtgcacggtgcggagtttctccacatataaagcgtgtagataatagtgctcaccccgtggaagggactggcgcgatggatgggggacatgtctgtcttattgcgcccagcacgcctggcgccaggatgcaggcactccgtgtcacctgtctgtcccatactgtctcgggtggttcttactgatttgcagctgggatgcaggcactccctgtcacctgtctgtcccatactgtctcgggtcgttcttaactgatttgcacctgggacgcaggcactctgtgtcacctgtctgtcattgtctcgggtggttcttactgatttgcacctgggacgcaggcattcgctgtcacctgtctgtcactgtctcgggtggttcttactgatttgcacctgggatgcaggcactccgtgtcacttgtctgtcccagtctcgggtggttcttactgatttgcacctgggatgcaggcactcggtgtcacctgtctgtcccatcctgtctcgggtcattcttaactgatttgcacccgggacgcaggcactctgtgtcacctgtctgtcactgtctcgggtggttcttactgatttgcacccgggacgcaggcactcgctgtcacctgtctgtcactgtctcgggtggttcttactgatttgcacctgggacgcaggcactcgctgtcacctgtctgtcactgtctcgggtggttcttactgatttgcatctgggacgcaggcactcgctgtcacctgtctgtcactgtctcgggtggttcttactgatttgcatctgggacgcaggcactcgctgtcacctgtctgtcactgtctcgggtggttcttactgatttgcacctgggacgcaggcactccgtgtcacctgtctgtcactgtctcgggtggttcttactgatttgcacccgggacgcaggcactcgctgtcacctgtctgtcgctgtctcgggtggttcttactgatttgcatctgggatgcaggcactccgtgtcacctgtctgtcgctgtctcgggtggttcttactgatttgcacccgggacgcaggcacttgctgtcacctgtctgtcactgtctcgggtgtttcttactgatttgcacctgggacgcaggcactccgtgtcacctgtctgtcactgtctcgggtggttcttactgatttgcacctgggacgcaggcactcgctgtcacctgtctgtcactgtctcgggtggttcttactgatttgcatctgggacgcaggcactcgctgtcacctgtctgtcactgtctcaggtggttcttactgatttgcatctgggatgcaggcactccgtgtcacctgtctgtcactgtctcgggtggttcttactgatttgcatctaggatgcaggcactccgtgtcacctgtctgtcgctgtctggggtggttcttactgatttgcagctgggatgcaggcactccgtgtcacctgtctgtcgctgtctcgggtggttcttactgatttgcatccacataggctttgggctctatcccacctgtcgtcttcggattctctaatacgcaggagtgctcttctgttagtttactcatagtttattaaagtacagagaaaagacatccaggatgataaattttacagtccttgccggggactgccagcttccagtggtgttgcctggcaccagtgtgacccccggtgcctgccccgctgaaccttctgtaaactgtttaactgtgctggtggtttcccattctctaggcgctgagatgcgtctggagagccagagggcctgcctgaaggaatcacctgagcctgtccgtccaccaggagtggggagatgcccccatccagtcctggaggacccgctgctcctgctgctcccggggatggagcaaggccaaggctgcgggaggctgggagccctgccctgcccatccctcctgcaccagcgctgtccctgcacactttggttcagtcccggtgcccctgccaagatgtggaaggggccgggtgaagacaggcttgagggctgccccagcaggctctgggtatgacctgcctctggccctggtcctgggcggggcctgtgggtggagtagtacccccaggccctgccctgggtgacagactgggaggaaaccaggctggacctgggcaggcgggatgtgttggccacagggagaggcggaccggcacccggtgggacctcctaggactgggccttcttccagggggcccctggcagcagctggggtgtcgggcagaatgtgacttgtggccttaccatggacttgaatgggacttggctggcctcaggatcttgtgcctggaaatagcctgaggtggctcaggaagcggagaaagggtgccagaccattctctggcggggaccagggcccaaggccccagggctggaaggagaccaaggggcagccgccctggagggacatcagtgcttcctcttccacccaattcccccacgcggttccatgttttcccaccagcctgttggcgaagttgctgctccggcattcagtacctgcttcttccagagaaataaagttagtttctattttatgtt

SEQ ID NO: 15857 - DNA, 32198 bp, Homo sapiens
ggagaggaggaacggagctgggacgggctgcaggagggaatggccgcaggccggcaggaggaggggcgcgaccacccggccgccggccgatggcggatgaggctatgggggctgagacgcagtagcggccctgcacttctggaggatgctcgaggcccggccccccaggacgcagggcagtgacgctgccggtgccgctgcggggcgggggctgcgggcgctgcttctctccctgaccgcagccgctgggatttggggctccatgggggagagatctgcttaccagcgcctggctgggggcgaggagggaccgcaggtaatggggaaggctaggggatagccagatacctgggccccagaccccttcgtctgctgtgagccgggctcagccctgccccctgcggcggcctcaggagtgagagtgtctgctcctgggccaggggacagagagcggtgtgtttatgtgggtgtggcggtggtgacttagtgatgctggcatctgcctgtgtgtgcatggatcccctgggaccccaaaaagctgcccgttgggctttcttccatgccccaagggagtccaggaagtactgctaggattggggttcagtcttttaggagaactgagtctgtatgtcctgggcattcccgtttactaggcttctgaatatgaatatcaagccagatgtccttgtttgcttttgaaaatatggtcacggtgttgatggatggggtagcttcccttccccttggagagaacgcacttcctctcccgaccggcagagggcagtagctgacaggagaaagggggactcggtaggagcgttggggcttaaggtcgggctgttttcctgggcgaggagaaagggggccgggccgggccgggcgcggtggctcacgcctgtcatctcagcactttgggaggccgaggcgggcagatcacctgagacgaggacgctgaggtcaggaattcgggaccagcctggccaacatggcggaaaaaaaaaaaatagctgggcacggtggcgggggcctgtaatcccagctactcgggaggctgaggcaggagaatcacttgaacccgggatcgcgccactgcactcaagcctgggcgatagagcaagactctcaaaaaaaaaaagggggtgggggttccaggagccggcctggcgctgacccacacatactttgcttcttcccgcagctggattactgggccagttacaggtcttgttcttactggacatccaaggtcaggcatggggttctggtgactttgagacacatatttctggggacgctagagtttttaatctggccattctgatccagcagacccattttgaaatagagggaataaccctgcttaaattgttccccggcccccggtccctgggtctccttccaggtgtgcttggtgccagggtaaggctgtaggcttctctgatgcaagggcacagtcagccaaggtttggggaaaagtcagctccagtgtaacgcaggcctgatcttgtccacctgacctcagcccccactccatccacacctgccatctccacaagctttgtgggctggatggcagggggatgaggaagagggactgaagttgggggtgtccttctccccacctcctggagttagaccaggaaatggctgtcccttttggcatcatcagggaggtcaagtgctgggagaggccctgggaagggagcctgggatgctgagtccccaaagccctgctccccagctgcccacccctccagccagctgaggctccctgagctggtggccagctggacagggacaagagagcagtgtgcaagaaacaggggctccctaggcatggctcagcagggaggggggtgcctggggagctggagagggcttcctgcagctgtcaggtgtgtctgggggccgtagcgaggggggtgtaagagcagctggcaccctttgaggagggccagagagatcatttgtcagttctagaaacatgagggccccacgggggcttgatggagtgtctctaggccccttaatctgaggccgtggtctgtgtcaggggttatacaggagacatcctacagctttggggtgggggcgtcccagcaggagtctcagggcatatttgtttgttttgagcgggtttgggaacttggccacctggtctgagtaggaggcaccctgggtgtttgggcagcagacagggccaccccaggggagggggtgaggatcctcaccccaccctacccttgctcttggctggactgccccactctggcaggctgccggccgcctatttccgtcgggcaccagggtaacagggccacatcagggtctgagccaggagacacccagccaaggctgggactcgggggtgggggagggtctctgaggagtcatcgcagggcccagcggagcctctggggtccaagcctcccactcaggctgtgtgttagtccccacgtccccacacaggtccatgagggagtccacagccctgcttcatacgtgctgtttgagtcacatagccgccaccctaaagtcccaggagttgtctgcaactgtgagggctggggtagaagccagagacaggagctttgtgtatggggaggcaggggggccagcgcgggtggctgggaggaagagtcccccccattcctgccgccctcttggcagtgattcagaaaggtcctttttcagccagtgtcagagctgctcagctggggagggagggagagagggagagagagaggcaggcaagagggagggcggccgggcgggcagttgggtggggaagccggggagtagggctggactgtgaccactgccctggagagaagacagaaacaggacagaggatcccggctgcagccagcgtgaggaaagctctgctccctgccagaccggccagctgtggaaacccagcggggcttgcagcagagcggaggggcccaccccgttcttcctcatttcccacccctggtgtgggatttggggggctcctgggcagagtgcgaagctccggagccgaggccactggatccccagtgactgctcgggggggtcccgctgcgtggagatgccggcagcacgtcggttccctggcctggagctctccttccctctcctggccagactgcggcgacgcctgtacacagtgagtggggggcaggggctggactgctggggactggttgggctcctcagcaccagcacttgactgagaggcagaaagcaagactgggagcggctgagggaccccgccagtgagggcttgacggggagtccgggccaagtggcctctcctgcggctgctgcattccttcttcttggcctgtgtgtttgcacgccggccacagagtagtgacggacacaggtgtgcagactccatgaggtgcgggggccaggaccatgcagaattggagagtgtttgaactctggaggagctgcagccatgccctgtgctgcacaaagaaccttgggctggagggggacttagaggggaggcggacccctgcggagtcaccctggactgagaccctgaccgcttgcctcaccagcatcccggagttccttcccgtcctcccacatgcatcccctgtgcagagctgcgctgttgctgggtcagggagcatggagtgcacagctgaacagaggtgcattagctggtgtttcagggagagggaacaggccgggctgtgctttctgaagagcttcaggggaggggcctctgggtctcccccagccctgaccaccccgggcatggctttgagctgttttcaggagcctagaggagggggcctggatccttgggagttggtggtgggaaaaagaagaggagccctggagactgctctccctgcgggagactaggagcctccatcctgaggctgagccctggagggggggggtcactttgctccagggacagggcagcggtggccgtggccgggtggagaggagacgctgcctaggcccgtgactcctagtgtgcctctgggcttgcttccggaaagccacgacgcctggtcctcttaaaccccacgcctcttgttttgtaaacagatgattttgttgaggataaatgaatacagcttaatacttagaactgttcctcgcatatagtaagtgcagttgaagtgttagattttattttattttgagatggagttttgctcttgttgcccaggctggagtgcaatggcacgatcttggctcaccacagcctccgcctcccgggttcaagtgattctcctgcctcagcctcctgagtagctgagattacaggcatgtgccaccaggcccggctaattttctattttcagtagagatggggtttctccatgttggtcaggctggtctcgaactcaggtgatccgcccacctcagcctaagtgctgggattacagctgtgagccactgtgcttggcctagatgttatttttattgttacttgtcttaaataaagttaatagaaatatataacctgttatattaacatgttaacctgtgtacagtgaaacaagcaacacagtgggaactctaatataaagagacataagaggaaggtaataatattttatgtatcctaatacgttagtaacctagacaatgtagtgaggagtcagatcttgagacctcaggtggaaacaccgtgaaggcagcatctgcaagtgctgaccgagaggggagttttgaaataatgagagggggttgccttcactgacatttttgcaaatagtggacttctgctatgttctgaataaagcaaagtccattttcccttaagtttacacagtagtttcattccaggaaaatttattttatattaaaactgtaaggccaggagcagtggctccccagcactttgggaggccagggcaggtggatcacttgagctcaggagttcgagaccagcctggccaacatggaggaaccctgtctccactaaaaatacaaaaattagccgggcgcctgtgatcccagcttcttgggaggctgaggcgggagaattgcctgaacccgggaggctgagtttgcaatgagccaagatcataccattgtactccagcctgggagtctcactctgtctcaaaaaaaaaaaaaaaaaaaaccaaaaaactataaaagtactttcttatttatatataaagtgggatcatattctaggtttgcatgatcataaacaccttcatgaattgagttgtgtgggatttgggacagtgcgagaatgtcctacgcattgcaggctagctcacgctcttgtcccccaaccacccactgaatgtcactaaggcccccccaaatgttgtggcaaccagaactgtcccatagggggctgtgcagcctcatgagaaccattccagtaaagggttacagctttaagtttggaaaccacccggctggcccagctgcctggcccggtcgccgaggtggaagagccaggatttgaactgagagtttctcattcccctttgttactctttgtacttccctgagctgcctgaaaaagtcggaactggcactgtgttggcagggccactgggaactgtgggggcaggaggctcacgctgggcccaggctgtgtgtgcctgcttctcagtgctgctcactgtgatgggagctggggaggaggccaccgctgagtgggggagggggatggcttggtccccagccgggcagctggccttttttctctcgcctgttcctctttggggattgagcatgggtccggggctagcctggccacgccctcagctctgacacaccttacgcagacagggatgggtttgctgtgcggtgggtccgcttgcttagctttgaaggtgccaccagcttctttatctgggcccaggatagtgtaggtcagaggtcactctccggtaccactggctgattgcggcctgcagtgtgctttggccagcacgctgtgtgtgcgtgtgcatgcttttcagatctgaactattcagcattgttaaaaagtcaggagaaagacgaatattaagtgaaatcagggaacagaatggtatggttaatgcgtgaatattcgtgtagggacaacagagtctgaagcgtccgcagaagacatcactggcaactcctggggagccgggtggctgtgcagctggggagggaatgagattcgtggctcagtgtgccttctgaatattttaccacgtgcatatattaccttttccaaactttaatggtgagatttcacatgtaaattgggatttatttcttgaaaaaatggaaagctttgacaacactgggccacagtttcttctgacaaccattgatgggatctgagctccctgttgacaggggtgtctgcgagcccaccgcaggccccacccctccctcctgtcttccgcttgctgtggccctgtaggcacttgagtggtggcccgtggagtggtctttggattgttaggagaggctggggtggtcaggcgctgggaggaacttagcttagagctcatctgaccctgagagttttctccgtcacatctaaggagcccatagatgggtctcggggcacattgcaccctagagatttttatcaaatattaggagtaagaacacgtcggtgttcccggagagaccactgttagtttttaaaagattttcaaggactttcgacccctagaaacttagagcaggaatgtgagcacaggttgatcttgggtcactcagtcacagatcacatttcgggagcaagaccctgactcctgactccagggccagggctgtatctccgccgccctaattgtgccctgtggctggcaggaataggggacgtgggtccaggcggttctcggtagcttccctcgggagtcagaaggtggtgtgagcccttccgggtggccgtgtagtgggatgaaggtgagcccaggtcactcgggcaggcccctgttgtccccccacaacccttgtccctgagccactcctccccccacagaggctgggaggcggcagaatgcagccagaggagggcacaggctggctgctggagctgctgtccgaggtgcagctgcaacagtacttcctgcggctccgagatgacctcaacgtcacccgcctgtcccactttgagtacgtcaagaatgaggacctggagaagatcggcatgggtcggcctggtaggtgggatgttggcctggcttgtcttgcccctgaccctttccgtcctctgtcctcaggaccactcggtgcacgggtggcagctgagaactctgtcccagagccctgagggagcaggagggacatcagtaggtgctgatgtgtgatgagaacagttggcagttataaaggtgaattggagtttgaggagagtgaggccttccctaaagctggctacacaggagtcactccatgccccgttgtgattgttctcacgtagagtgtatgtcctccattgcccctccttcataagcatcgaattgagtctgttctcatcattctgactaccggggggtccatgtgcagagatctgtagggagaacgctaactctcagatggtttgctgattcgtgctcacgctctctttcttgctctctcacacgcacacacgcatgcacacgcacaggcatacacacacacacacacacacgcaggcacacacgcacatgcgcacacacgtgcacgcacgcatgcacgtgcacacacgcatgcacgtgcgtacgcacgcgctcacacgcctgcgcacacagacacgcacacacacacacacgtgtgtgcgcacacccgcatgcacacgcacggcatacacacatgtacacacacgcgcgcagacgcacacacgtgcgcacacgcgtgtgcacacacacgcacatacacacaggtttgctctgatttgagttcaacccttatcttcatatttttcctaaaagtgggggttgtagcatctaaaagtcatgatgttcttcatagaacattagaaacgtattagggctttcaagttaaaatagctaaataggtaataatgtgtcaagttagacactgacttagttaaaatagctaaataggtaataatgtgtcaagttagacactgacttagttaaaatagctaaataggtaataacgtgtcaagttagacactgacttagttaaaatagctaaataggtagtaatgtgctaagttagacattgatttatgctactttaggcctggatagttggtgtctgatgccagtagcataaaaaaattttacggagggaaaaaaacctcaacattgagaaaattctgttcattaccttgatttttcctgagaactgggagaagcccatcgcttcaagtttttggttaaacaccttcacccagtttgagagccagtgccaggaagtggagtgcagagaccgtcggtcagttgaggctccgggttagttggggttgatttcattgctatcatcgggtgggcggtgtctagtgacaggctcacccccaaggggaccacaggcagcagcctctctcgggctacggcggccttcacagcacgcggttccccgctctccctgcaggccagcggcggctgtgggaggctgtgaagaggaggaaggccttgtgcaaacgcaagtcgtggatgagtaaggtgggtgaggaggtgggtgaggaggtgggaggggggcagcctcgaacgcccccctccgcttctggtcctgggaaccttccccagctccccggcaggtcgaatctcgccgttctgccggcactttgtacaggaccccctcgtccagggtcttatcgggcagggcacttgtagagctgctgggctaagtgtctgtctccgccagatacggacacgtgagcagcctgtgtgcggtgaggccttcacagcccctctcggcacgcctggaacaggacctcattgacaagtgtgccttaacttagccctgctgtgtctgagcgttggggccagtgtccagcgtggggtggtggacctgtctggacccagaacgtctttgcttggcttccctcctccctgaccctctctaatctctgggtttctctggtcatctgtccctgctgacagcttccttccccacagcctgtccccacctctccccacaccttgtcctaatttgggtctgtggtgtagtgagtccctggtctgactcagtggaactttgcccattgtctggaagacaatgagagaggaagtgagccagccgtggtctttcctccccacttctggcttcagggctgggttggggggtgggcagggccgaacagctgcagtgggattgggcagcagagattttcctggctgcaatccggcaaaggggctgtctcttgggatcctttggcttttcctggaaacactgtcctggtcctttgcccgggttttagggaaggatgagtagtgtcgggatggtggaggcaggagaagagagcagcgtggtttgctgagatttaggggtcttggatctgccactggctcctgataggtccctgggcggtcagtggcctccagatttttgttgtgtcttcagtgaaatgataccggtccccactgcccagctcacctcccggggctgcaggaggcaccggagataatggctgtagagggtcttgtaacctgaacattgcttgcaaacataaggaattctagttactgggaggaagcacagggcagaggccagaagaggccctcagatttgaggcaccctagcccagacggataaggatccaccagctctgggggcgtgagacccaagctggcaagaatctgcaatctggagccaaggctgtgggtgcctcagtggaggccgagtcagaccgacgtggccagctttgaccctcatggcctcctttcttctgtcccttgaccttcggctcctccctgtccaccctggcctccgagtctcctccacttttccttccgtctcagccctcagctctaggcgcccctccagagacccagctgtcttcccaggccccttcccagcaaggactagcttcatctgaaccacacacacactcacggttcaacctcagactaaaattatcctctcccctgggcaggatgaagggcagccgactccctggtgagggtggagacagacagcaccaaatggtcaggccagagaaggggccagggctaaaaatggacaaggaggtgtctgtggagggcccctgcggctccatcgatgcgggttagggctggagtctgcggggtggcgggtgcaggaagggagggtggggcaggactgggaggagactccgaccttggctgggcggtgccctccctctccacacagctgggtgtggggccgctcagccacaggctgcatgcctgtcggtctctttctggcaccctccttgaggccagcatcaggctttgggttcatgtttgggggtgtgccctggacggagtgtgggcctccagccaggctgccccactgacagtttggcaaaaccaggacctatctggaagccgaagccggggatcaccaggtggacccagcggggtgggactgagtgactgaccctggggtgttggattccatctggcccccggctgccttcaaacaggtgttcagtggaaagcgactggaggctgagttcccacctcatcactctcagagcaccttccggaagacctcgcccgcccctgggggcccagcaggggaggggcccctgcagagcctcacctgcctcattggggagaaggacctgcgcctcctggagaagctgggtgatggttcctttggcgtggtgcgcaggggcgagtgggacgcgccctcagggaagacggtgagctctctgtgtcctgccagcgcagcagaggcatgggacccggggctggtagtggctcttctgcccccaaccagggtgtggatgggactggggatgcgtcacagtgtggctcatcccagagtccgtgctcaggatttttggggttttatttatttatttatttttgagatggagtctcgctctgtcgcccaggctggagtgcagtaggcacgatctcggcttcctgcaacctccactttccgggttcaagcaatcctcctgcctcagcctcctgagtagctgggattacaggcatgcaccaccacactcagttaatttttgtatttttagtagagacggggtttcaccatgttggccaggctggtctcgaactcctgacctcagatgatctgcccactttagcctcccaaagtgcttggattacaggtgtgagccaccacgtccagcccatgctcaggtttaactaagcacatttattatttcaactataaaaataatttattataaaagtttggaaagtatttgaaaaacaagaaaaaaaaaatcgcctgtaatcccaccactcagaggaagccgagcctcttcctcccactttaggtattttgttggatttagttaagatacaaattctggatacagcttttaaaatcttgttctttcttctcggcgttgcatttaacattttcccctcagggataacgtgtcaccacagcatacagttctggtgtgactgtttcctgtgcagcagccgtgtccttactgctcagatcacgtgcggtgcattcccagcacctcagagggctcctcattctccgtccactcagtgcgtccttctcccggggaagccgctgtcactcagtgcatccttctcccggggaagccgctgtgcagacttccagctccacagctttgtttttggcattacatttacagcattttccttctacagcaaaacaccttttaatattccattttatgaccagcctgagcaatatggagaaaccccatctctactaaaaatacaaaattagccaggcgtggtggcacctgcctgtaatcccagctactcaggaggctgaggcaggagaatcacttgaacccgggaggcagaggttgcagtgagctgagatcacgtcactgcattccagcctgggcgacaagagcgagactgtctcaaaaaaaaaaattccattttataacatttgaatattctctcatcatactggttatctcttactttttggttggtatttaagcccggcattcccccaggaaggggaggtgtggccgacgatggctcctgagggccagccgtctgcccttctccagccaggcctcacgcagagcacgtaagcccaggcactggtgacatgcttacccacccagatgaggagctcacaggcagggatcgttgagccgagttggagggtggagcaggttggctccgcgtgtctgggacctggcaagtcctgagtccttgcaaatcccgctctgggcaggtgagtgtggctgtgaagtgcctgaagcccgatgtcctgagccagccagaagccatggacgacttcatccgggaggtcaatgccatgcactcgctcgaccaccgaaacctcatccgcctctacggggtggtgctcacgccgcccatgaagatggtgagtactgcgggcgggagggggcgggcagggagagggctccggtcccatatgtgtggttcggttcctctctccatcctaaggtcagaggcgccctagatcctactttggtcccccaacctgatggagtaaaggggtccacaggggcccagcctggtacgggctgtgtctgctgcggtccagtccgggtctgtctctggattttgctggtgctcagtgtcaagagagttactcccatgggaggggctggccactgagtttaatttggggaatttatgttttatttatctatttattttgagatggagtctcactttgtcgcccaggctggagtgcaatggcatgatctaggctcactgcaacctcggcctcctgggttcacgcgatattcctgcctcaggcttccaagtagctgggattacagccgtgcgctaccatgcctggctaatttttgtatttttagtagagacggggtttcaccatgttggccaggctggtctcaaactcctgacctcaaatgatccacccacctcggcctcccaaagtgctgggattacaggcgtgagccaccacgtccagctgagttttggaatttctagccactgcctctttgggctccttctctctaggcatcagtttcccaaattgcctcgagggagaggcctgagaaactgcaggactcctagaggtccccagacagcaggccaggaaggtgcgtgcagcctggctctggaaagccttcaggaaggggactgggggcccagcgtgggctgctgagaaggggcagggtcctccagctcattcctcctgcctcctccgtggcctcaggtgacagagctggcacctctgggatcgttgttggaccggctacgtaagcaccagggccacttcctcctggggactctgagccgctacgctgtgcaggtggctgagggcatgggctacctggagtccaagcgctttattcaccgtgacctggctgcccgcaatctgctgttggctacccgcgacctggtcaagatcggggactttgggctgatgcgagcactacctcagaatgacgaccattacgtcatgcaggaacatcgcaaggtgcccttcgcctggtgaggggcaggtgctgccagctcacagagtccctgcagacccaggcctcaaagcttctggggctttctggacccaccacagcccctggttttgcttgggcctgcccttgtctgttctaagcctggggtgccctcctttgcacccattcgctcaccatccatctaggaattcttgagggcccacgtgccagggtctgggtgctggaaatcacagggatacatgctgtgggactctccaaggggctttgctgggtggggtgatacggggatagatgctgtgtcctctccaaggggcattgttgggggtcgtgtttcagggatagatcctgtgtcctctccaaggggcattgctggcgggggggtgttatagggataaatgctgtgtcctctccaaagggcgttgctggggggggggtgttacaaggatagatgctgtgtcctcttcaaggggcatcgctgggggggtgttacagggatagatgctgtgtcctcttcaaggggcattgctggggggggtgttacagggatagatgccgtgtcctctccaaggggcgttgctggggggggtgttagagggacagatcctgtgtcctctccaaggggcatcgctgggggcgggtgttacagggatagatgctgtgtcctctccaaggggcactgctgggggggtgttacagggatagatgctgtgtcctctccaaggggcactgctgggggggtgttagagggacagatcctgtgtcctcttcaaggggcattgctggcgggtggtgttagagggatagacactgtgtcctctccaaggggcatcgctgggggcgggtgttacagggatagacgctgtgtcctctccaaggggcattgctgggggggtgttacagggatagatgctgtgtcctctccaaggggcactgctgggggggtgttacagggatagatgctgtgtcctctccaaggggcactgctgggggggtgttagagggacagatcctgtgtcctcttcaaggggcattgctggcgggtggtgttagagggatagacactgtgtcctctccaaggggcatcgctgggggcgggtgttacagggatagacgctgtgtcctctccaaggggcattgctgggggggtgttacagggatagatgctgtgtcctctccaaggggcattgctggggggcgggtgttacagggttagatgctgtgtcctctccaaggggcattgctggggggggtgttacagggatagatgctgtgtcctctccaaggggcattgctggggggggtgttacagggatagatgctgtgtcctctccaaggggcattgctgggggggtgttacagggatagatgctgtgtcctctccgagggtcattgctgagttaggtgatacagggatatatgctgtgtcctcttcaaggggcattgctgggggggtgttacagggatagatgctgtgtcctctccgaggggcattgctggggggcgggtgttacagggttagatgctgtgtcctctccaaggggcattgctgggggggggggtgttacagggatagatgctgtgtcctctccgagggtcactgctgagttaggtgatacagggatatatgctgtgtcctcttcaaggggcattgctgggggggtgttacagggatagatgctgtgtcctctccaaggggcatttctgtggggaggtattcaaaggtttcctaaaacatcagggaagttcgccagggaaagactcgttggtaagcatgttctagggagagctagtggtagacaggcccaggccacagcaggccttgtagatgggccagggctgcttacctgtgcactaggggtggtacttggccctgccctggcccctgtgtgggcttatcctctgctgagaccattgtggttctctggtgccagaggcacccagaggtctgtgatctgcctgctttgaggcgggaagggttgttccagttctgctttcccaagcggtggctgtgggcaacccttatgatccaggacgcatggtcatcttaacgagcagctggctttacacccagggcgagcagaggtcttaaattatgcccgttgtcctggagtaatttagagcagcctcttttgtattcaggcatcctggtttgcatggtaaggtatgaatatagttgcctttaaacagcacgatgaagtgggcgggttattgttctcatttcaccaaggaggataatgaaccttagcgatctcgagtgactttcccggccccatcccctttgaggggcagggctcgctctgcttccctgtctgggcaccaccctcctctctgcacctcagtccacgccgggatgtcctttctgacctcactgcagtggcacttccccctcaaccgggggtgcccagaacgaatgggtgtatttgggtgaagccagtatgactgtttctacccattttggttcttccccaggccctacccgaatttcccacccactgcttcctgccaaaggacccaaatccgaggatcccgccccaaatctgggaattgtcattctcccaccacagtcagaaaacagcctgtgatcttctctccctgccccatcccagagcctctgacctccttcctttccatgcttctctggctgggaaacttcctttcctcttcccccaccaggctgcaagtgaataagaggcctgggcttagacgatttccccaagtccctgcatcgtgtcgtcaaggggtcctgcccgcttcacacggcgcccctgagacccactgttgaacctggcacagggggtcacaacaagtgtttgctgcatgagtgttttaagtccctggggcggacgcaggtagggtgtttgagagggcttctctttgacccctgcctctgccaggtgtgcccccgagagcctgaagacacgcaccttctcccatgccagcgacacctggatgttcggggtgacactgtgggaaatgttcacctacggccaggagccctggatcggcctcaacggcagtcaggtgagggctgggagacgggcccccatagggctggtggggtgaattccattccctgcttgcagcctggccctgctggaactgcctctcaccaatggactccctcctcccacgccccgtgcctccccccacttcccgtgcctcccaccacgccccgtgtctcctctcacgccccgtatctgtatggcctcagggagagcccagcaaagagacggggagggaaaagctggggcctgccctccttctctagcccttgccacatccacttgttccgaggctccagacctgggaagaagggactggggctctggagagggcccctcccaggcaggcagatcccttctttggaggccaggcatggcagcagccgctgcagctgtggatgggctggagggaaggcgggaagtgaagggctgggcgctctgtttgtcgtcaaactctgcacctcctcaccttcagatcctgcataagatcgacaaggagggggagcggctgccccggcccgaggactgtccccaggacatctacaacgtcatggtccagtgctgggctcacaagccagaggacagacccacgtttgtggccctgcgggacttcctgctggaggtgagggacaggtcagcccaggagagctggggtgttcaagctgaggggctacccaggcgtcagtcccagagttggccacgaccttcctcttcctccaggcccagcccacagacatgcgggcccttcaggactttgaggaaccggacaagctgcacatccagatgaatgatgtcatcaccgtcatcgagggaaggtagggagtgcagggctgggccccgccctgggatcgcttgaagggcacaggtcggagggacctgtggacagatctgtttggcctccaagattcccttggccacatacaggctggcggttgggcctgaaccctgcagtgtgaggggaggacaggcctgcctccgtcttcctagtgcctttccctgcccagcttccctccaccaccctttcccactgggctgcagccctggctgtgtggttgggccaggctgcctttatggaggggtagggagtggcctggcctcggtggcagcagagttctggactcccgtgcttcctcctctgctcctccccgcttctctccctgcttcttcctggcacagggactcagccatccacctgggtgcgtttcagtagctgaagcagcccagcctgccctcttgcagctttccatccttcctgctgagcccaccaccccctcccaggcctgcctccagcctctggtcctctcttcccatctccccttgggaggaccctctctatacctaaccctcctcccacagcctctcgggagtccctgtcttccacctgagcccccgcagttctagcgcctgccctgaggccccaccactgctggccctgccttgtgctggctgatccccagggtgtctgagcaactggctggggcagggcaggtttcaggtacctttgaggcaggggcagtattgaggaccaggaagaagagtgaagtggaggaaatcccctgtgctcgcagctcctgactcaggccaggcaaggatggggctagggctgcttcccagggagcctcttccacctgcactgcagcttttggagtctgcggccttcggtgcaatcctgtgcctcttgggggtgggtggaggagacctggggggctgtgtggagtgtgacctgcaccgctgtggccccgacaccccgagccttcccaggcccggctccctcacccttgggcccagggtctgggaataggaatgacatactgagactgcagggcctgtggttaggggtgttatgctggggaagaatgcagaaggttctagaaagagaggcctggggacaggaggcaaacagtctgcaggtttggagctgaggggccagggatgggattgcaagcgtggcgctccggggagcattctggaaataggaagattaagggtgggggggtcccctggaagtacctggcagggcctccagcccgaagtccagcctcatgaccgtgtccacctccacgagctggaaagccgtgggcctggcccctcttgtgctgctgccggagccccagatctttaccacctgcttcccttgctctcagcaggagcctgtgtgcctgccagtgtccccaggggtgactcagagtggcctgtgtttggggcgtgtgtctctggagctggtgttttaggtcaccgcccgggcaaggcgggcagtgggaggggccgggagcggctgctcctgggagggttgtgggtgtgccccgccccgcccttccgtcgaaggcccccgttggccccagccgctggttccctgtggctgctgctggtggggctctgggggctccttccccctgggccaccagccctggcttggaaccacagcacctgccctccgtgcctggagctgctcaggaggtgggaggtgaggggcaggaggccacaacagccggtgaggcttgggagcgggcctgggtgtcggtggtggcagagcttgactctgcccccttgtttcttcagtccctgaatatctccatgtttgtttggctgcctccgtctccatgtctccaggcggatggctctgtgtgagtctttgggcctgggtgtgcatctgtgggtctgtgtttggagttccctcctagcctggccttctcttcgccgtggcttcccacttgcgaagctgtgtccagtatttgtttcctggtgcggagtctgggaggccacctgccgcagctctgactgagtctaggctcagtccttctcagggtaccaggctgtgggcagaggggagacacctagatgtttcgtgctgtgtctagatttggagacacaaatgatgactggtctttcccaggggctcgtttggaggaaggggtggctggcagcacttttgttccgcatacagagcgggtgttggaatccattgcgggtccttggcctggtctggccctggagcctcggcttcctgtggtgggtgggagccaggcatccgggttatccctccaggcctgggcgcctgggacccctagggagaagagcgggcgggcgttttgaacagaatgtccggcattagttgagccatttctggactaccttcggcccggacgggaacgtggtgctgagatttccagagctggggcagccttaggcagttctcagcaccggcctctgttttccatcttgtctaccccagagatgttgaccagaggcccgggggcagcaggaggtagaaggttcatgcggaggtgttgggcccttttcctgctcccccaggaagtcctcatccgcccctgcttcagtcacggccgggtagcagccctggccctcccatggccacggggactccggcctgttcatggcgggagagagagggcgcggacagggcgggcctggaaggaagggctggcctcagtcccctctggactgctggtgcctcggccacactgagcctcacacgggtgcgtgtgggctgcgagaagtgacacggtcctcttggaagtcccactggagccttgggatgaagctgccttggagtgtgcgtgggcgccatcccgagggggagcttcctgtgcctccgagcgtgcgtgggcgccatcccgagggggagcttcttgtgcctcggagcgtgcgtgggcgccatcccgagggggagtttcttgtgcctcggagcgtgcgtgggcgccatcccgagggggagtttcttgtgcctcggagcgtgcgtgggcgccatcccgaggggagcttcgtgtgcctcggagcgtgcgtgggcgccatcccgaggggagcttcctgtgcctcggagcgtgcgtgggcgccatcccgagggggagtttcttgtgcctcggagcgtgcgtgggcgccatcccgaggggagcttcttgtgcctcggagtgtgcgtgggcgccatcccgaggggagcttcttgtgcctcggagtgtgcgtgggcgccatcccgagggggagcttcctgtgcctccgagcgtgcgtgggcgccatcccgagggggagtttcttgtgcctcggagcgtgcgtgggcgccatcccgaggggagcttcttgtgcctcggagtgtgcgtgggcgccatcccgaggggagcttcttgtgcctcggagcgtgcgtgggcgccatcccgagggggagtttcttgtgcctcggagcgtgcgtgggcgccatcccgaggggagcttcttgtgcctcggagtgtgcgtgggcgccatcccgaggggagcttcctgtgcctcggagcgtgcgtgggcgccatcccgaggggagcttcctgtgcctcggagcgtgcgtgggcgccatcccgagggagagtttcttgtgcctcggagcgtgcgtgggcgccatcccgaggggagcttcttgtgcctcggagtgtgcgtgggcgccatcccgaggggagcttcttgtgcctcggagtgtgcgtgggcgccatcccgagggggagcttcttgtgcctcggagcgtgcgtgggcgccatcccgagggggagtttcttgtgcctcggagtgtgcgtgggcgccatcccgaggggagcttcttgcacacgtcctccgcactcttactctccttcccccaggagcaagcatgttttctcgagtggtgtcaggactcccagcagccatgggggctcttgcctcggccatacctgcactaagggaggtgggcttgatgtctcctttccctctcagaagtgggtcccaaaggaggcttctgtgcctggagctgggcagtgttggcggaagggagaggccagacggagtgacctgccttgggcacgagtcacgctgctctgagcaaggtctcggcctcagcggcattctcacccagttactgagcgcctctgaagaggtgtggagagcagagtccggcgtctggcccgcggcagccaccggggagcccgtgggtgtagcgggagagccgcagcccagccggtgccggggttcctcctctacgggccgccgtgggaggctgtgtgcgtgctggggagccggggctctgctccttcgagtggccctgctatttttcagatgggactcgtctcgtctcggggtactgtcctctctccttccttccctccctgcaggcagggtgggaatcacagggtggctgtgtgtggtggggccaggccagtggccctgtgtatgaggaggctgggcagggggagcacagccccgtctccccgcgccccgcgccccccgcctccccgccgaccgtggtgctctcgggtttgactttggtctctgggatgggctgttccggagtcaccccgctccagccaggcctcgtcaccttacaaggctgtgggtctgggtgcccaggcgtcgccacctcctccgtcctctctccccggcctggctgggtttcagaggagcccttcttcacgctttggccctgggacaggagaagtgggggttggtggggagggcgtgcagtgtggtgccacacgtgtccaccctagcagctctgggctgtcaccgcccccgcgtgcccagactctgcccacggggctgtcaccgcccccgcctgcccagacactgcccacggggctctcaccgcccccgcctgcccagacactgcccacggggctctcaccgcccccgcctgcccagactctgctcacggcatcacgtatgacaagtccagcagcagacgcgggagcctcacaacctgtgagagccttcgggagtcaggagtgtcttgcgggagccctgtgcttcctggcctgcctgcccctgcccctgcccctgcccctgcccaggccccggcttaggccacatcagcagaggtttcgtgtctgaggtcagagggggactggcagccctactgtctggtcactgtgggagagctgagttcccttttggacacaggtagagcccctcctgaggagacggggaggctcccgcaggccttccgggaggtggtggaaagctccggaagcaggtgaagcggtggagggagggactgagttgcccgagtgctcctagactctcccgcgtctgcattcgggaggcaggttgtagctggaggcctggcccccagcctagtgcaaggccctaggtgtcccccggcacccccgcacctctcagaactcctggaacccagccgaggagtgaaatcaagtggccagaagaggactggggccccggccttgccagggaactgaggggtgaggaggaggtgtgggcggggcgctggccccacagacctgaaagctggcgttgggtcccaggtctgctgggatctttctggtaaccgtggacaggtcatgttgcctgctgcagcagcttccagcgtgcctccttatttgcaaaccatagggaaagctgcctgacccacctagagagttgtgggtaaggccgtgtgcaaacaggcctgtacggggcatggtgggtcacgggggctgttggggaggagggccggtggcacacagcctggtcctgaggcctgagctccatcccccttctgccacagtggccagggtgtgaggagggtcccagtgccggggctgccccgccacgcctggcgttcaccgtgccatctctgtcgcgcagggccgagaactactggtggcgtggccagaacacacggacgctgtgtgtggggcccttccctcgcaacgtggtgacctccgtggccggcctgtcggcccaggacatcagccagcccctgcagaacagcttcatccacacagggcatggcgacagtgacccccgccactgctggggcttcccggacaggattgacgagtgagtactgggcggggatggatgctgacctggccccgctcgggactccagggccctcagcacggcacgcgtgggcggaatctgctcttcaccctttcgcccgggcttcagcccccgacccgccactctcccctcctcaccctggccttactctcgggaagctgtggaaccctaggaagcccagcctggtgggggttctccaggggaatgttctccaggggagtgttctccaggggagggttctccaggggagggttctccaggggaatgttctccaggggagggttctccaggggagggttctccaggggagggttctccaggggaatgttctccaggggagggttctccaggggagggttctccggggagcgttctccaggggaatgctgtccctgccattttcaagctttggggggccgatctcctaactctgagacacttcatctgtgaaacaggttcacccccccaataaggggaaggctgtaaatgcactctgaattagcacttgctgctcagatgcaggggtcctgagagaagctttcccactcactgtagatgaaagtagggtcaggagcttctgaggatggactcctgtttggtggaaaggtccccggagccacagctgtaacccctcttggtactcgggccttaggaaaatgaacttgggaggaacccggtgggagctgctgaggaggagagcttctcccatgacccccctgtggccccctgtgaccctgtgaccctgtgacccctgcacacgagcagtggttttccttctcctgctggtggtgccagagtcctggagacgtgaacctgctggctcaggccctggggatgtatgcaggtccacatgggagtgagcctgctttccagaaccagagtgggactggggaccttggggactgcagagggaacgttaggtggcagctccgcctccccaccacacagtactctacggagctcactccatacctgggagaggccctgtctcctatgtaagaggataaggccaccgaggggcatctgggaaggacacgcagaatcagtcacttccgggatgccaccccccaccccccgaagcttcttgcgccaggcctccaagcctctctgctggccgcagggggattccaggcccctggcctctgcagcccttctcctgctgacttctgatactctggtctgccctgagaggcgtggaaagcaggggccttcacccaccgggccccacacaccagaaccccacacagcgggcccccacacaccagaacccacacagcgggcccccacacaccagaaccccacacagcgagtccccccacaccagaacccacacagcgggcccccacacaccagaacccacacagcgggcccacacacactggaaccccaagctcacagggctcagcccatgtgttttgcctaaaaagaacccagcaagggcctgagagttggggtgaaagactgcagacacctccaggagaggctggtgccctctgccccactcctggcatgctgtggccagcccagccccattcctccaggctttaatcagccccagtgactaagtctcagatactgacagttggtgcagggacggagggtggatccggagcaggacaggtggcccagcctctcccgcacctcctggccatgtggcagaagggtgcctcctgcccaccctggctgggcaccatagctgggatgccccgttcttaggccctccatcgtggcctgcgggacaggagtgtctgccctctggccgctgcctggtgtgggctgggggcctggggggttgtggaggaccacctctgcccttgtagggtgtagttggagtccctgaggtcctaggctttccatcctggggtcaggtgtcctttctctgccttctctccaggacaccccccagctgagacgtgcggtcaggttctgtggactgggaggcgggaggcctgtgcttcagacccaagactacacccggtttcctccaggacgaaggggctctgatgagattctgccacccctccacacgcttcccctgctctcttgacccagctctctcccccacagactgtatctgggaaaccccatggacccccccgacctcctgagcgtggaactgagcacctcccggcccccccagcatctaggaggggtgaaaagtaagagcccctctgctccctggtgtccctaactcatcggctactcaggaaggggcactgtcttcacaggccaccctaaggctgctgttctgtttttggggacagtggggtcagggcagcaggcgggacagctgtgtccctggctccggctgggcgtggggtggaagacaggcagctgtatccgccgaggtgggcctcctcgggctgggtctgcagcaggcccgtccgccccggcgtccctcctccctccttccacggccgagctcagatcctggctttcctcacttccccctaatcctgctctcctgtcccaagccaaaaccaccccacggctccggctctgcctggggcctcctccatctcccggtcctctgcctatcatactggaccgccgtgttcctcatcctgccgcctgcggcctcccgtttgctgggggcttgtacattcactcgcccccattcacttctctcccttcgtctctctacactctgccctctcgtccggccgtctccctcctttgtcctctgtcctgctccgtctctctccccctgtccgcatggcctttcttgcaggggagcctccacctcgcccacctcagcctgccttcttcactcagagtaagtggggctgcttccgatgccttggcccccgcccccgccccctctctctcactcctctcctggaaggtacagagcctgggcggctgggccggaggggaggtgggtgggtgtgtgctgtgagcttccgcggctgccctggcctagcatgcctgccccccctcgagcccgccccccggagcctgggcttctgctcacgagtgtggccctggcttccgcctcggcctcactccctcccagacctgtctgagcttctggagcacgagtgtggccctggcttctgccttggcctcgctgcctcccagacctgcaggcgctgtctgggctttgtggccgttggtcaggagtactgtcctctccaaggatagtccttatagcccctgatggcaggaggcggctccgtgcctgcactaatggtgtgccgtgacaggggcggggatgagggctcactaactcgccagggcgcaggagcagggccgccggggtcttgtgctggtggaggcagcgtcaggcaggagccagtgttgcttgctgcagcttagacggagcgaggcggggctcaccggcccacatggggctgccgggcagagcaggttccgccctcctgatggagtggtcggaggtgcgctgagaacctggccgccggtggctgacctcagacctcggggggagttgggagtggagggttgctgggggacacttggctttctctcccacgtgccacctcccctcgtgtcccagaccctgcctgactgccttcctgttgggctctccctttccatcacagaaccaacctatgaccctgtgagcgaggaccaagaccccttgtccagcgacttcaagaggctgggcctgcggaagccaggcctgccccgagggctgtggctggcgaagccctcggcgcgggtgccgggcaccaaggccagccgaggcagcggggctgaggtcacgctcatcgacttcggtgaggagcccgtggtcccggccctacggccctgcgcgccctccctggcgcagctggccatggacgcctgctccctgctggacgagaccccgcctcagagccccacgcgggcactgccccggcccctgcaccccacgcctgtggtggactgggacgcacgcccgctgccccccccgcccgcctatgacgacgtggcccaggatgaggatgactttgagatctgctccatcaacagcaccctcgtgggcgcgggggtccctgccgggcccagccagggccagaccaactacgcctttgtgcctgagcaggcgcggccgccccctcccctggaggacaacctgttcctcccgccccagggtgggggcaagccgcccagctccgcacagaccgcagagatcttccaggcgctacagcaggagtgcatgaggcaactgcaggctccggccggctccccggccccctctcccagcccggggggtgacgacaagccccaggtgcctcctcgggtacccatcccccctcggcccacgcgcccacacgtccagctgtctccagcccccccgggcgaggaggagaccagccagtggcctggacctgcttcccctccccgggtgcctccgcgggagcccctgtcccctcaaggctcgaggacacccagccccctggtaccacctggcagctccccgctgccaccccggctctcaagctcacctgggaagaccatgcccaccacccagagctttgcctcagaccccaagtacgccaccccccaggtgatccaggcccctggcccgcgggctggtccctgcatcctgcccatcgtccgggatggcaagaaggtcagcagcacccactattacttgctgcccgagcgaccatcctacctggagcgctaccagcgcttcctgcgtgaggcccagagccccgaggagcctacccccctgcctgtgcctctgctgctgcccccacccagcaccccagcccccgccgcccccacggccaccgtgcggccgatgccccaggctgccttggaccccaaggccaacttctccaccaacaacagcaacccaggggcccggccaccacccccgagggccactgctcggctgccacagaggggctgccctggcgatgggccagaggcgggccggccagcagacaagatccagatggtgagcacccagcctggctgtgggcgaagcggggcagggcccaaggggcctggagcagtgggccctagtggtgctgacaggggtgggtgtgcccagctgcaggccatggtgcatggggtgaccacagaggagtgccaggcggccctgcagtgccacggctggagcgtgcagagggctgcccagtatctgaaggtaccgccacctcctgctcactctggctctcagggaccctgaagcctggttctgctgcccccagccccacgccccctggctccgactcccctcttccccaccctagtcggtgccctgggcccgcgtgtccatggcgccacccttacccccaggtggagcagctcttcgggctgggtctgcggcccagaggggagtgccacaaagtgctggagatgttcgactggaacctggagcaggccggctgccaccttctgggctcctggggccctgcccaccacaagtgagtgagccccacagtctgccccgctccgtgccccaggagggctgtcccagagcctgccacactgggaggaagcccaacacctcgcaggccgctcccggccagggagacacagctctccagctgcgggagggaggcgctcacagggcccagcaaatcgtttttcctaaatgtgtttatttggacattttagccacttggttttcaaatgagtacaagagggaattggagcctctctggttgaaggaggcttgcttccctagcacctgcagtgaccctgagcggctccaggaatggcactttttaggaccccatgatttgcacacctctttctcacctctgtgtttccatatttctgtttaaagtaacatttaaaatttcagtgttggctgggcaccgtggctcatggctgtaatccccagcactgtgggaggccaaggagggaggatcacctgaggtcaggagttcgagaccagcctggccaacatggcgagaccaggtctctactaaaaatacaaaaattaaccgggtatggtggtgggcacctgtaatcccacctgctggggaggctgaggcaggagaatcgcttcaacctgggaggcggaggttgctgtgagctgagattgcaccactgcactccatcctgggcgacagagggagactgtctccaaaaaaaaaaattttctctaaaaagaaaatatattgtctttcctgtaaaaggtttatattatagtttaacaaaatatatagacatttaaaatatatacatatataaacacactttatatattatgtaaatatatatatgagagcgctgtcaagtcaaaaagaagtgaactgaggtcacatggctggagccagcaccatggcaggaggcactggcgggaggaggggctgacacgggccaggccctggagatacctgctgcccttgtcccagcagcgtggccctgtgcacggtgcggagtttctccacatataaagcgtgtagataatagtgctcaccccgtggaagggactggcgcgatggatgggggacatgtctgtcttattgcgcccagcacgcctggcgccaggatgcaggcactccgtgtcacctgtctgtcccatactgtctcgggtggttcttactgatttgcagctgggatgcaggcactccctgtcacctgtctgtcccatactgtctcgggtcgttcttaactgatttgcacctgggacgcaggcactctgtgtcacctgtctgtcattgtctcgggtggttcttactgatttgcacctgggacgcaggcattcgctgtcacctgtctgtcactgtctcgggtggttcttactgatttgcacctgggatgcaggcactccgtgtcacttgtctgtcccagtctcgggtggttcttactgatttgcacctgggatgcaggcactcggtgtcacctgtctgtcccatcctgtctcgggtcattcttaactgatttgcacccgggacgcaggcactctgtgtcacctgtctgtcactgtctcgggtggttcttactgatttgcacccgggacgcaggcactcgctgtcacctgtctgtcactgtctcgggtggttcttactgatttgcacctgggacgcaggcactcgctgtcacctgtctgtcactgtctcgggtggttcttactgatttgcatctgggacgcaggcactcgctgtcacctgtctgtcactgtctcgggtggttcttactgatttgcatctgggacgcaggcactcgctgtcacctgtctgtcactgtctcgggtggttcttactgatttgcacctgggacgcaggcactccgtgtcacctgtctgtcactgtctcgggtggttcttactgatttgcacccgggacgcaggcactcgctgtcacctgtctgtcgctgtctcgggtggttcttactgatttgcatctgggatgcaggcactccgtgtcacctgtctgtcgctgtctcgggtggttcttactgatttgcacccgggacgcaggcacttgctgtcacctgtctgtcactgtctcgggtgtttcttactgatttgcacctgggacgcaggcactccgtgtcacctgtctgtcactgtctcgggtggttcttactgatttgcacctgggacgcaggcactcgctgtcacctgtctgtcactgtctcgggtggttcttactgatttgcatctgggacgcaggcactcgctgtcacctgtctgtcactgtctcaggtggttcttactgatttgcatctgggatgcaggcactccgtgtcacctgtctgtcactgtctcgggtggttcttactgatttgcatctaggatgcaggcactccgtgtcacctgtctgtcgctgtctggggtggttcttactgatttgcagctgggatgcaggcactccgtgtcacctgtctgtcgctgtctcgggtggttcttactgatttgcatccacataggctttgggctctatcccacctgtcgtcttcggattctctaatacgcaggagtgctcttctgttagtttactcatagtttattaaagtacagagaaaagacatccaggatgataaattttacagtccttgccggggactgccagcttccagtggtgttgcctggcaccagtgtgacccccggtgcctgccccgctgaaccttctgtaaactgtttaactgtgctggtggtttcccattctctaggcgctgagatgcgtctggagagccagagggcctgcctgaaggaatcacctgagcctgtccgtccaccaggagtggggagatgcccccatccagtcctggaggacccgctgctcctgctgctcccggggatggagcaaggccaaggctgcgggaggctgggagccctgccctgcccatccctcctgcaccagcgctgtccctgcacactttggttcagtcccggtgcccctgccaagatgtggaaggggccgggtgaagacaggcttgagggctgccccagcaggctctgggtatgacctgcctctggccctggtcctgggcggggcctgtgggtggagtagtacccccaggccctgccctgggtgacagactgggaggaaaccaggctggacctgggcaggcgggatgtgttggccacagggagaggcggaccggcacccggtgggacctcctaggactgggccttcttccagggggcccctggcagcagctggggtgtcgggcagaatgtgacttgtggccttaccatggacttgaatgggacttggctggcctcaggatcttgtgcctggaaatagcctgaggtggctcaggaagcggagaaagggtgccagaccattctctggcggggaccagggcccaaggccccagggctggaaggagaccaaggggcagccgccctggagggacatcagtgcttcctcttccacccaattcccccacgcggttccatgttttcccaccagcctgttggcgaagttgctgctccggcattcagtacctgcttcttccagagaaataaagttagtttctattttatgtta

SEQ ID NO: 15858 - DNA, 45584 bp, Homo sapiens
ggtcctgggagcggccccggcgccccgaagccgccccgagctggtggggagggcccggccggtggggccccgggggcctgcgggggaggggcgcctgggggtgcaagaggcgaattggctgcccggggtgcaggagggacaggtggtgcgggctgtccaggaaacctacctgaacgggaaggagccccaggagggagagggacccggcgaggggctcaggacccggaggcgccggcggaggaggaggtggtgactggcaggcccgggccccacggtacctccggggctgaaggggacgcaggatgtaggggcatggggagtcgggcgcagaagagtgcggggaaccgctgagctctgggagccactgcctgagggcaggccgcggccggcgggaacctcttctgccgtctcagcctgggcgtcgctgaagctgtgtctgcggggaggcagcggaaggcggcaggtaaggaagcccagtcctgttagctggagttggtgtgcttggaagtgagaggctgcaggtccctggcgagagcgtagactccacactgccctcgttcttttggcctttcatccctggagggaggaagcagtgcagttttcagcggcaaggcaggacctctcccccgccagtactgtgtatggtaattggagtgatagggcatcttcttagagtctaggcagcaggcgggacgtctgggtggctgccaggtctgtgcagagggaagagaggggtagccccagggaggagctgcaggacggtcccccctccacctgccccccgatggcagtaggggtgcctccatgctatatgctctgcatggtgcagtcaacacacaagtcctcaaaacacgtcccacagaagggaagagggcagcgtgggattaacagaaccttatcttgtaaccctgttggtcacgtgagctgagatgagtgtgacagctagtggcttgggtacggcacgagcctggcccgcttctgccacgccgtcctgtcacagctgatttaccctgagggcccagagccaaggatgattagtgggcggaaggagggagagcaactggtgagccctctcgtctctgggtgggacgacccagcgttagaggggcgggagaggagggtgcacttgcaccccagggctctgggctgcctctgtggccccaccctggggaggtttgcagatgggccgctgtggtatcatgggctctgcacctgtcaggacaggagctcccagcccagtctagaggtagggcttgtaggggccaagggtgggggctgtatttggcttgttgactccctcgtggcctgagtgccagacctactcattccgcctcgtgcccccagggggcttggcgggctgcttgtgggccttactctcctagagctgttcgcctcttacctggcactgtcaggtgcttgcttcccctgcccctgggtggggatgggtgcagggttgctgcttgcccagggccttagctagaggaccctcctctgccccagcccgaggtgtggctgtgagtcagatggacccagacccctgtcccgaaccagactgggtgctctcctctgggggcagagggagtggtgctggaggtagcagctgctggaggagccggttagcccgctcctcagacaaactcaaacccgcctgtcagcttcatcccatgcctgtcgcgctgccacccaaacactcatgcaccggaagttcagctgctgtgcccacggtgcctgacgcttctggaatggccagagtggctctcactgtctggcttcagtggagagaacggtctgttttaaacacatacacacaatcttcacctacttatttcaggtcggcgtttttgaacttgtggtagatgaatgggagaaaggccttggcatcacacagattgcttttgatctggttatatcgcttacaagctgtgtaacttccttgggcaacataatgtctttaggtttcagtttcttggtgtctgcggtgggccaggacttcccctgcagtgtcgtgagtaaagaaacctcaggccctttggagcctggtgcccacctccccggagccccggcagatgttagggaggaagggtcagactgttccctctggcccctgagcccgggattagcccccaccttgtgcttcgtctagaagatgcagtgtttctttttgtttgttttaaataacagttttattgagatataatgacatatggtaaactgagcatatttaaaacacacaatttaataagttgtggcctgtgtatatacccgtgaaaccacccccaccttcaagatagtgaacatcccccttattcccctgtccccagaagttttcttgtggaacccctccatcccccgctcctctgccatcccctaccccaggtaacaggctggtctactttctgtcactgtgtctgagtttgcagcatttactgtaaacggaatcgcgtctttcattcaacagaagtattttggagtttgtccaggtggttgcgcgtatcaacagtcattgtacacgtgtgccaaagtctgtttatccattgacctgttgatgggttttcagagaaagctgctgtgaacgtgtttgttagtctttgtgtggatgtacacttttatttatcttaggtaaatccctaggaccggaatggctgggtcatgtggtaggtacacatttaacctttaagaaactgccagactgttttccaaagtggttgtacattttatatactcatccactgtgtatgagagttctggtttgtccatgtctttgatatgtccacatctcgatgtggtcagtctctaattttagacactctcatgtctgtagtggtatctcattacaattttaatttgtatttccttaatgactcatgttgtcgggcatcttctcatgtgctcatttgccatacgtatgtctttggtgctgtgtctgttcagatcgtttgcccatttttaattgtgtagggtttttcgtgttgagttctgaagagttcttgatatattctggatataagccttttatcaggtatgtgatttacaaatcttttttccagcttgtggctttgtattttgatcctcttaacaatgtcttctaaaaaattctcatgatcagtagtgcaaaatgctgtgtttttgaagagaagttgtaaattttgattaatttactaatttgttactttgtggattgcatttttggtgtcatgtccaagaaatctttgcctgacccaaagtcccaacagttttcccctgtattttcttgtagacattttatagttttgggctttacattgagatctaggattcgtttggggttaatttttgttacgtggtgcaaggtatgaatcaatgtccagttttttgcatgtagagatctaattgatctagtagcaccatttattaaaaagatgtatctctccactgaattgcctttgaatctttgtcaaaaatcaattgctggctgggcacggtggctcactcctctaatcccagtgctttgggaggctgaggcgggcggatcatgaggtcaggagttcaaggccaagctggtgaacgtagtggaaccctgtctctactaaaaatacaaaaaattagccaggcgtggtggcgggcacctgtaatcccagctactcaggaggctgagtcaggagaatcgcatgaacccgggaggcggaggttgcagtgagccaagattgcgccactgcattccagcccgggcgacagtgtgagactccatctcaaaaagaaaaagaaaaaaatcaattgtttgtgtgtgtctaattctggattctgttttgttccattgatctatttgtctgtctttatcccagtatcacactatcttgattactgtgggtttataaactatagtaagtcttgaaatcagggtaagatctcaaacttggttttgtcttttcaaaattgctttagctattctgggttctttgcacttccatatacattttagaattagttagtcaatttctacaaaaaagcctgctgggattttgattgggattatgatcaatttggggagaattgatcggttagcagtattgagccttctgaccatgaacagtgtatatctctgtatttgtctaggttttgtttactatctctcagcagtgttttgtagtttttggtatatcagtcttttccatcttttattgaacatatccttaaatagtacctatttttatgctattgtaaatgatactggtttttcctggtagtattggttttttatttttaaaaacttttaattgtggtaaaatatacataatatactgccattgtaaccatctgcagtggtggtaaatacattcatactgttgcacagccgtcaccagcatccatctccaggacttttctcatcttgtgaaactgaaaccgcacctattaaacagtaacttcccattccctcctctctcagcccctgagaaccaccattttaccttctgactctatgaatttggctcctgtaggtgcctcatagaagtagaattttacagtgtttgtgcttttgtgcctggcttatttcacctcggcctagcgtattcaaggttcatttacattgcagcatatgtcagaattttcttctttttaaagggtaaataatattctattgtatgaatataccactttttgtttatccatttacttggattgctttcaccttttttttttttttttttaaagacaaggtctcactcactctgtctcccaggccggagagcagtggtgtgatcatggctcactgcaacctcgacttcctgggctcaggtgatcgtcccacctcagcctcctgggtagctgggactacaggtgtgtaccaccatgcctggctaatttttttttggaattttctgtagagacgggagtttggcatgttgcccaggctggtttccaactcctggcctcaagcggctttcaccttttggctgttgtcagtaatgctgttatgagatggtaccgttgtttaaactttactttccagttgtttgttgctagtatatgtaaataccattgattttgtattttgagcttgaatcctgcagtcttgctaaattgacttattctagcaagcttttttgtaacttcctttggattttctacatagggcgccgtgtcatctgctaataaagttttacttcctcctttctgatctttatgcctgttgcttctttttcttgcctgattgccctggctggatcctctggtataatgttattgtttttttgagatggagtttcatgcttgtcgcccaggctggagtgcagtggcacaatcttggcacactgcaacctctgcctcctgggttcaagcgattctcctgcctcagcctcctgagcagctgggattacaggcacccaccaccacacccggctaatttttgtatccttagtagagatggggtttcactatgttggccaggctggtctcaaactcctgacctcaggtgacctgcccgcctcggcctgccaaagtcctgggattatgggggtgggccaccaagcccagcctcatctaatataatgttgaatagaagggtagataccttgtttctgatcttccaggggatgcatttagtctctcaccattaagagtggtgttagctggccgggcgcggtggctcacgcctgtaatcccaatactttgggaggccgagatgtgcagatcacgaggtcaggagattgagaccatcctggctaacatggtgaaaccccgcctccactaaaaatacaaaaaattagctgggtgtggtggcacatgcctgtagtcccagctacttgggaggctgaggtgggagaattgcttgaacctgggaggtggaggttgcagtaagccgagatggcgccactgcattccgactctgtcacaaaagaaaaaaaaaaagtggtgttagctggccgggtgcggtggctcacgcctgtaatcccagtactttgggaggccgaggtgggtggatcacctgaggtcacgagttcaagaccagcctgggcaacatggtgaaaccttgtctctacccagaatacaaaaattagccgggtgtgatggtatgctcatgtaattccagctacttgggaggccgaggcacaagaatcgcttgaacccaggaggtggaggttgcagcgagccgagattgcgccactgcactccagtctgggtgacagagcaaaactgtctcacaagacaaaacaaaacaaaaaaaagtggtattagctataggtttttcatatctgacctttaccaggttgcaaaaagctctcttttattcctactttgctgagaggtgtttttttttttttttatgtttgtttttttttgttttttttttttgagacggagtcttgctctgttgcccaggctggagtgcagtggtgcaatctcggctcactgcaacttctgcctcctgggttcaagcaattgtcctgcctcagcctcctgagtagctggggttacaggcacatgccaccacgcctggctaacttttgtatttttagtagagatggggtttcaccatgttggccaggctggtcatgaactcctgacctcaagtgattcgcccacctcggcctcccacagtgctgggattacaggcgtgagcccccgcgcccggcccttactgtctcttaaataacttttcagtaatcccctgtattttagcattgcccttctgacactcacctcttcttccagaggtttccggggctgccagttcctgggcttttgaggattgcaggcggtcagtcaagtgtctctcacgctgggatttgtgattttcttgggtcagctctcaactgccaccagcccatctgctttccagcttccaaagttctgtggtggtttttcctctaccattctccccctccctaggggcctatggcattcagaacatccttttttaattgttgttctggtgaggtttcaggaaggagtgacactgtgtggaatctactgttttttcctggaacccctgtcccttcttcagacttcctcacagaatccatgcattcactcagcgtcagtgaatgacatggtatccactcagcgagtccaatgtgggtcataagacttccgcggggacctccatgggcccgcatccttgtgccaagcagtacagtcgtgaatgggctgaatgctggctttaccttttactctctgggtgctcttggccacctctccagagctggtttccatatttgtaaagtggggataatctggggtagtaaggcaggtttttggtcagccagtgaaggtacactctcagtgaagagctggcgcatagtgtcttcctgaggacccaggctatgacttctgccccttcatattctcccagaaaccagcatcgggtgggcatgtggggtgcatggtgggtgtctaaggaaggtgagaggggagggaggttttcctggtccctctcttcctcctcagcagctgtacctcctgggccccccagctggatgtaacaacattggactcttctgtttccctctgtcccctgtatactgtgtctgccaacattggactcctctgtttctctctgtcccctgtacactgtgtctgccaatgaagcagggcctcttctctggtaccctgaccttggcagggctctccccctaccctgtggccagaagagagtcacccttccgctaacatttgccctcccccagatcctgagcctccatgagcctccattcccgatgacagcttcctggtaccttggaccaggcacgccccttcccctttgagggtcccgggctcttcaaggtcagatggtgagcagggtccagtgggatttaaggtgtatgtcttgaagcaccggacatttctctggctcccaggctctcctgggccctgcggcctgctctaggtgacatgttcccagctcctgggtcttggtgtagacatggtcctgagggaatgagcagtgtatcttgtagactgaatgttcacttcccagctctggcatctcctctccactccttctttccacactccacctccagggccaacaataggccccttcagctctggactcttgcgtagggcttgggggtggggtatggcctgagctggcagcaggcaggatgacgagccgggcagcctctgcccagccctggaagagctctctctgggagtggctagctgctgggagctagaccacatccttccctctgggcccccgtgccgtgacagtgcatgggcaggacaggcaacgagaggcagctctctgcggcactcgtgtcctggcctcggcacctgggcatgtgtggcgtgcatgggagtgagacccagacagctgcagcaatgtgtcctctgccacccactgctgctggtgtctgtgttggggagcgatggtccaggagcacattagggccctcagtgtactgtctctttgtgtcggcgttgacactccggtcttcagctggcggagcatgaaacggtttcacagtactttcaagacttgatacagatggatgctcttgtctccacgtgtcagccccaccaagtccagtcagcctcaggttcagtgtggactgggtcacgctgtttagtcagatcctcacccctcctctctcaagtgacattcccttctccactggagttggaggggacgaggcatagcagggccctgcctggtgtgtctgcctctgcctctgtgctctgccctcccaccctggcacctgcctgttcccctcctctctctcggtgagctgggatcctgacagacccaggcccccttcccatcaccctgtgtggcagcccgcgccccagcaccccttcgcagtccgatgagaaggcaccttccttaagaccaatgtcaggctctccctctgcctgagggactggctgagttgttctggttctgagatggctttgggggactgagttgcttagtgggtctggggtcggagtggttgtgatgacatggacagcccctcttcccagaaaggtgctggcgtctctggattagaaatcatggggggaggcaaagccggggctgggagagggcaaccaggcttgttcctggcacccactgggaaagcaacctggcagcagctcacgggggaagaagcagccaccgttctccagtgttcctcacaaagactgagtccttctcagcagacacacccagggcccctgccaggttctcccttcagggcgacagatgtggacagatggttcccttacgatgtacagaccacagcagaggtatacagaccgctccttcagcacaattatgtgctgatacaaagagttacaggaatagtgaccctttaaggataggaacgtgatggataatttaaactttttaaaattcttggccgggcgcagtggctcacgcctataatctcagccctgtgggcggctgaggtgggcggatcatgaggtcaggagatcgagaccatcctggccaacagggtgaaaccccgtctcaactctactaaaaatataaaaattagctgggcgtggtggcgcacacttgtaatctcagctacttgggaggctgaggcaggagaatcgcttaaacccgggaggcagaggttgcagtcagccgagatcgcgccatggcactccagcctggcaacagagcaagactccatctcaaaaaaaaaaaattattttggctatttttcacatgtattattgtgtagttttactactcatgttttcaagcatccctccaacaaaacagcagagataaccatttgtggctaggaaatgggaatttacagaagagatggcatttgacttggatcttgaggagtgtgtgggagtttatcatgtagacacagtagaagtgtcacagacaaaaaatagctcagacattaaaattatttttttattatttatttattgagacggagtctctctgtcgcccaggctggagtgcagtggtacgatcttggctcactgcaacctccgcctcccgggttcacgccattctcctgcctcagcctcccgagtagctgggactgcaggtgcccgccaccacgcccggctaatttttatattttttagtagagatggggtttcaccatattggccaggctggtctcgaactcctgacctcaggtgatccgcctgccttggcctcccaaagtgctgggattacagacgtgagccaccgggcccagccgcagacattaaaattaaagggcatccggacatggtggctggtgcttgtcatcccagctactcaggaggctgaggtgggagggtcacttgagcccaggagttcaaaattaaaatgagccatggtcacaccactgcactccagcctgggcaacagagcaagacccagtctcttaaaaacaaaaaacaagaagaaccccagagtatgtctagggaagggcaaacacttggcttggctgggacatagagacatttgaagggaatgctaagagagagaggtggggaactaggtgaggagtgcagcccagagggcgtgcgtgccagccaggattgggccctcgaggactgagggaagggcccatagtaacagcaggcagccaggtgccgtggtggactcttcatgacagttttatgatggggattccatttttcccctctttacagatgaggaaattgaggcttagaggttgtttgctcaaaagttgcccagctggagcgtgatggagtcaggatttcagcccccatctgcctgactcctgatctcattgtcaccgttgggaggaagtctgaggcggttgaagcagcccgaccggtgtgtctggtggagaaggtggaggacggaggaggagtcttggttgggggtccgtggtggggtgtggtttctacctcgggtggctagtgttggcttgtgatgttttcagcgggatacaggagcgcagaagcagagtttaaggggtgatgctgagcccagtttggatatgcaatgtgtggtacctgtgcagcctcctggtggagctgccctgtaaatgtctggaaatgcgggtctggagccacaggaattcaggaatggagatagcacaaggtggtaataggagtccctggaggcataggtgaccccagggagcacagcatcagtggagaatagaaggaaacatgagttcaaaagtcttaggaaataccaacagttaagaagctgggggcggggggtggggggggggtgggggggtgagggggtgggcaggcgcagtggctcatgcctgtaatcccagcactttgagagagcaaggctggtagaatgcttgagcccaggagtttgagaccaacctgggcaacatgacgaaacctcatctctacaaaaaatacaaaaattagctgggtgtgatagtgcacgcctgtaatcccagctactcaggagatggaggcaggaggattgcttgagcctgcgaggcagaggttgcagtgagccaagatcgcaccactgcactccagtctagggcacagtgagatcctatctcaaacaaacaaacaaaaaacatgtggggtgaagaggcttcagggctggaccatgggcctagcactgccagcagacacagccttgcctgccctcaggacctcagctgccaggcccccctgggagggagtgggcccccgtgtcctggagatggagagactatggacagtcatggcgtgtgtctgaatcactcccttttctttcttgggccctggccagcctcctccccagaccagtgtgatgtcaggcccagccgacctgaaggtgcagggttgcctggtgcaggttcctctgggatgaggttctgagggcacccagcctggccttgctccagaagcctgggctctgcgcacagaggggtgagttaaggctgactaaacttggtggggctgacatgtggaagcaagataatcctctggctgggggaggagctgtaagcccccctctcctcatcagtatgttcttttttccttcagggcttggagaagaggtaggtggaggtgggagagggcgggctgggaggtagggttggcatatattcctgagaatacggtagattgttttggaaaaatcctcttggccggaaattgcctgtcatgtctgcgccttggtgtggatttgtcacttcgcatgcagttggagaggctggagaggggaatggacagcagagctgggctggtttccagcctcttgtttcctttagctctgcagagtggagatataaagagacaagtgaagagcagagggggtgtacacgtggggtggattctcgaactcctagaggtagtttagatcctgtggatgtcttacgataggatggtactaggacgccagagatttacagggggaggtgaggcagggagaaagcaggaaagggcactggtttggatcagatcctttatccagccagggcaagaagggaggggcctggtattttctgccttgccttctacagtctcccggctttgcagctactcccaagactagtatgtgcctttagctgcagtaagatgccgaggagcttctgtacagcatagaagcaggcgttcgggggcctcgccggcagtcatccacctaccctggtgtgcttggggtgtggaaggggctgtgtgaggagagtgggccgtagagggagcctcacctagtgaccttccagggtctggctcagccttgacgctgcgtggggaggagaggtcacagcatctgtctctcctctgccccaacccagggaaggtgccctgagctcagccctaaatacctggtactaaagagtcagtggctgcttcagatgccaccagaatgagaagcggtgccttggggccccgggggagaggaagagcctctgccctgggacttcctgtgccggcgatggcctcgcgccagtgctgggcgcggcacccccgcgtgggcctgtgttgggcggcttttgagcaggagtccgggccctcgtgtcaccgctctgaagtcaaggaggtcagtgcgtgcccagcgcacagcgcgtgcggcgttgcgggagtggcgcgcggggaaccggccgcgggggcctcggggcgggggcgtggcctgcgcgggaggcgggcgctgggaggcggcgcggagccggctgagcgcagggccgagctgcggggcaggtgggcgcccggcgttctgggagcagagtggccgccggggcaggctgggggcggggtgggctgcagccccgggatgcctcggaggagggggtctcagatggagtcggacggaggcccctctgctgtgggcttctcggatggccccttaccgtgaatacgggggactcgtgaatccccaaggccccagttggtggctctggggccctggaggcgggctgagggctgagtggagcccggttccgcggccggcgaaggcagagccccggctctcggtgggggtcagcccggggctggcacagctggctcactgggagagggtgggagccgcgccccggagaggaggaacggagctgggacgggctgcaggagggaatggccgcaggccggcaggaggaggggcgcgaccacccggccgccggccgatggcggatgaggctatgggggctgagacgcagtagcggccctgcacttctggaggatgctcgaggcccggccccccaggacgcagggcagtgacgctgccggtgccgctgcggggcgggggctgcgggcgctgcttctctccctgaccgcagccgctgggatttggggctccatgggggagagatctgcttaccagcgcctggctgggggcgaggagggaccgcaggtaatggggaaggctaggggatagccagatacctgggccccagaccccttcgtctgctgtgagccgggctcagccctgccccctgcggcggcctcaggagtgagagtgtctgctcctgggccaggggacagagagcggtgtgtttatgtgggtgtggcggtggtgacttagtgatgctggcatctgcctgtgtgtgcatggatcccctgggaccccaaaaagctgcccgttgggctttcttccatgccccaagggagtccaggaagtactgctaggattggggttcagtcttttaggagaactgagtctgtatgtcctgggcattcccgtttactaggcttctgaatatgaatatcaagccagatgtccttgtttgcttttgaaaatatggtcacggtgttgatggatggggtagcttcccttccccttggagagaacgcacttcctctcccgaccggcagagggcagtagctgacaggagaaagggggactcggtaggagcgttggggcttaaggtcgggctgttttcctgggcgaggagaaagggggccgggccgggccgggcgcggtggctcacgcctgtcatctcagcactttgggaggccgaggcgggcagatcacctgagacgaggacgctgaggtcaggaattcgggaccagcctggccaacatggcggaaaaaaaaaaaatagctgggcacggtggcgggggcctgtaatcccagctactcgggaggctgaggcaggagaatcacttgaacccgggatcgcgccactgcactcaagcctgggcgatagagcaagactctcaaaaaaaaaaagggggtgggggttccaggagccggcctggcgctgacccacacatactttgcttcttcccgcagctggattactgggccagttacaggtcttgttcttactggacatccaaggtcaggcatggggttctggtgactttgagacacatatttctggggacgctagagtttttaatctggccattctgatccagcagacccattttgaaatagagggaataaccctgcttaaattgttccccggcccccggtccctgggtctccttccaggtgtgcttggtgccagggtaaggctgtaggcttctctgatgcaagggcacagtcagccaaggtttggggaaaagtcagctccagtgtaacgcaggcctgatcttgtccacctgacctcagcccccactccatccacacctgccatctccacaagctttgtgggctggatggcagggggatgaggaagagggactgaagttgggggtgtccttctccccacctcctggagttagaccaggaaatggctgtcccttttggcatcatcagggaggtcaagtgctgggagaggccctgggaagggagcctgggatgctgagtccccaaagccctgctccccagctgcccacccctccagccagctgaggctccctgagctggtggccagctggacagggacaagagagcagtgtgcaagaaacaggggctccctaggcatggctcagcagggaggggggtgcctggggagctggagagggcttcctgcagctgtcaggtgtgtctgggggccgtagcgaggggggtgtaagagcagctggcaccctttgaggagggccagagagatcatttgtcagttctagaaacatgagggccccacgggggcttgatggagtgtctctaggccccttaatctgaggccgtggtctgtgtcaggggttatacaggagacatcctacagctttggggtgggggcgtcccagcaggagtctcagggcatatttgtttgttttgagcgggtttgggaacttggccacctggtctgagtaggaggcaccctgggtgtttgggcagcagacagggccaccccaggggagggggtgaggatcctcaccccaccctacccttgctcttggctggactgccccactctggcaggctgccggccgcctatttccgtcgggcaccagggtaacagggccacatcagggtctgagccaggagacacccagccaaggctgggactcgggggtgggggagggtctctgaggagtcatcgcagggcccagcggagcctctggggtccaagcctcccactcaggctgtgtgttagtccccacgtccccacacaggtccatgagggagtccacagccctgcttcatacgtgctgtttgagtcacatagccgccaccctaaagtcccaggagttgtctgcaactgtgagggctggggtagaagccagagacaggagctttgtgtatggggaggcaggggggccagcgcgggtggctgggaggaagagtcccccccattcctgccgccctcttggcagtgattcagaaaggtcctttttcagccagtgtcagagctgctcagctggggagggagggagagagggagagagagaggcaggcaagagggagggcggccgggcgggcagttgggtggggaagccggggagtagggctggactgtgaccactgccctggagagaagacagaaacaggacagaggatcccggctgcagccagcgtgaggaaagctctgctccctgccagaccggccagctgtggaaacccagcggggcttgcagcagagcggaggggcccaccccgttcttcctcatttcccacccctggtgtgggatttggggggctcctgggcagagtgcgaagctccggagccgaggccactggatccccagtgactgctcgggggggtcccgctgcgtggagatgccggcagcacgtcggttccctggcctggagctctccttccctctcctggccagactgcggcgacgcctgtacacagtgagtggggggcaggggctggactgctggggactggttgggctcctcagcaccagcacttgactgagaggcagaaagcaagactgggagcggctgagggaccccgccagtgagggcttgacggggagtccgggccaagtggcctctcctgcggctgctgcattccttcttcttggcctgtgtgtttgcacgccggccacagagtagtgacggacacaggtgtgcagactccatgaggtgcgggggccaggaccatgcagaattggagagtgtttgaactctggaggagctgcagccatgccctgtgctgcacaaagaaccttgggctggagggggacttagaggggaggcggacccctgcggagtcaccctggactgagaccctgaccgcttgcctcaccagcatcccggagttccttcccgtcctcccacatgcatcccctgtgcagagctgcgctgttgctgggtcagggagcatggagtgcacagctgaacagaggtgcattagctggtgtttcagggagagggaacaggccgggctgtgctttctgaagagcttcaggggaggggcctctgggtctcccccagccctgaccaccccgggcatggctttgagctgttttcaggagcctagaggagggggcctggatccttgggagttggtggtgggaaaaagaagaggagccctggagactgctctccctgcgggagactaggagcctccatcctgaggctgagccctggagggggggggtcactttgctccagggacagggcagcggtggccgtggccgggtggagaggagacgctgcctaggcccgtgactcctagtgtgcctctgggcttgcttccggaaagccacgacgcctggtcctcttaaaccccacgcctcttgttttgtaaacagatgattttgttgaggataaatgaatacagcttaatacttagaactgttcctcgcatatagtaagtgcagttgaagtgttagattttattttattttgagatggagttttgctcttgttgcccaggctggagtgcaatggcacgatcttggctcaccacagcctccgcctcccgggttcaagtgattctcctgcctcagcctcctgagtagctgagattacaggcatgtgccaccaggcccggctaattttctattttcagtagagatggggtttctccatgttggtcaggctggtctcgaactcaggtgatccgcccacctcagcctaagtgctgggattacagctgtgagccactgtgcttggcctagatgttatttttattgttacttgtcttaaataaagttaatagaaatatataacctgttatattaacatgttaacctgtgtacagtgaaacaagcaacacagtgggaactctaatataaagagacataagaggaaggtaataatattttatgtatcctaatacgttagtaacctagacaatgtagtgaggagtcagatcttgagacctcaggtggaaacaccgtgaaggcagcatctgcaagtgctgaccgagaggggagttttgaaataatgagagggggttgccttcactgacatttttgcaaatagtggacttctgctatgttctgaataaagcaaagtccattttcccttaagtttacacagtagtttcattccaggaaaatttattttatattaaaactgtaaggccaggagcagtggctccccagcactttgggaggccagggcaggtggatcacttgagctcaggagttcgagaccagcctggccaacatggaggaaccctgtctccactaaaaatacaaaaattagccgggcgcctgtgatcccagcttcttgggaggctgaggcgggagaattgcctgaacccgggaggctgagtttgcaatgagccaagatcataccattgtactccagcctgggagtctcactctgtctcaaaaaaaaaaaaaaaaaaaaccaaaaaactataaaagtactttcttatttatatataaagtgggatcatattctaggtttgcatgatcataaacaccttcatgaattgagttgtgtgggatttgggacagtgcgagaatgtcctacgcattgcaggctagctcacgctcttgtcccccaaccacccactgaatgtcactaaggcccccccaaatgttgtggcaaccagaactgtcccatagggggctgtgcagcctcatgagaaccattccagtaaagggttacagctttaagtttggaaaccacccggctggcccagctgcctggcccggtcgccgaggtggaagagccaggatttgaactgagagtttctcattcccctttgttactctttgtacttccctgagctgcctgaaaaagtcggaactggcactgtgttggcagggccactgggaactgtgggggcaggaggctcacgctgggcccaggctgtgtgtgcctgcttctcagtgctgctcactgtgatgggagctggggaggaggccaccgctgagtgggggagggggatggcttggtccccagccgggcagctggccttttttctctcgcctgttcctctttggggattgagcatgggtccggggctagcctggccacgccctcagctctgacacaccttacgcagacagggatgggtttgctgtgcggtgggtccgcttgcttagctttgaaggtgccaccagcttctttatctgggcccaggatagtgtaggtcagaggtcactctccggtaccactggctgattgcggcctgcagtgtgctttggccagcacgctgtgtgtgcgtgtgcatgcttttcagatctgaactattcagcattgttaaaaagtcaggagaaagacgaatattaagtgaaatcagggaacagaatggtatggttaatgcgtgaatattcgtgtagggacaacagagtctgaagcgtccgcagaagacatcactggcaactcctggggagccgggtggctgtgcagctggggagggaatgagattcgtggctcagtgtgccttctgaatattttaccacgtgcatatattaccttttccaaactttaatggtgagatttcacatgtaaattgggatttatttcttgaaaaaatggaaagctttgacaacactgggccacagtttcttctgacaaccattgatgggatctgagctccctgttgacaggggtgtctgcgagcccaccgcaggccccacccctccctcctgtcttccgcttgctgtggccctgtaggcacttgagtggtggcccgtggagtggtctttggattgttaggagaggctggggtggtcaggcgctgggaggaacttagcttagagctcatctgaccctgagagttttctccgtcacatctaaggagcccatagatgggtctcggggcacattgcaccctagagatttttatcaaatattaggagtaagaacacgtcggtgttcccggagagaccactgttagtttttaaaagattttcaaggactttcgacccctagaaacttagagcaggaatgtgagcacaggttgatcttgggtcactcagtcacagatcacatttcgggagcaagaccctgactcctgactccagggccagggctgtatctccgccgccctaattgtgccctgtggctggcaggaataggggacgtgggtccaggcggttctcggtagcttccctcgggagtcagaaggtggtgtgagcccttccgggtggccgtgtagtgggatgaaggtgagcccaggtcactcgggcaggcccctgttgtccccccacaacccttgtccctgagccactcctccccccacagaggctgggaggcggcagaatgcagccagaggagggcacaggctggctgctggagctgctgtccgaggtgcagctgcaacagtacttcctgcggctccgagatgacctcaacgtcacccgcctgtcccactttgagtacgtcaagaatgaggacctggagaagatcggcatgggtcggcctggtaggtgggatgttggcctggcttgtcttgcccctgaccctttccgtcctctgtcctcaggaccactcggtgcacgggtggcagctgagaactctgtcccagagccctgagggagcaggagggacatcagtaggtgctgatgtgtgatgagaacagttggcagttataaaggtgaattggagtttgaggagagtgaggccttccctaaagctggctacacaggagtcactccatgccccgttgtgattgttctcacgtagagtgtatgtcctccattgcccctccttcataagcatcgaattgagtctgttctcatcattctgactaccggggggtccatgtgcagagatctgtagggagaacgctaactctcagatggtttgctgattcgtgctcacgctctctttcttgctctctcacacgcacacacgcatgcacacgcacaggcatacacacacacacacacacacgcaggcacacacgcacatgcgcacacacgtgcacgcacgcatgcacgtgcacacacgcatgcacgtgcgtacgcacgcgctcacacgcctgcgcacacagacacgcacacacacacacacgtgtgtgcgcacacccgcatgcacacgcacggcatacacacatgtacacacacgcgcgcagacgcacacacgtgcgcacacgcgtgtgcacacacacgcacatacacacaggtttgctctgatttgagttcaacccttatcttcatatttttcctaaaagtgggggttgtagcatctaaaagtcatgatgttcttcatagaacattagaaacgtattagggctttcaagttaaaatagctaaataggtaataatgtgtcaagttagacactgacttagttaaaatagctaaataggtaataatgtgtcaagttagacactgacttagttaaaatagctaaataggtaataacgtgtcaagttagacactgacttagttaaaatagctaaataggtagtaatgtgctaagttagacattgatttatgctactttaggcctggatagttggtgtctgatgccagtagcataaaaaaattttacggagggaaaaaaacctcaacattgagaaaattctgttcattaccttgatttttcctgagaactgggagaagcccatcgcttcaagtttttggttaaacaccttcacccagtttgagagccagtgccaggaagtggagtgcagagaccgtcggtcagttgaggctccgggttagttggggttgatttcattgctatcatcgggtgggcggtgtctagtgacaggctcacccccaaggggaccacaggcagcagcctctctcgggctacggcggccttcacagcacgcggttccccgctctccctgcaggccagcggcggctgtgggaggctgtgaagaggaggaaggccttgtgcaaacgcaagtcgtggatgagtaaggtgggtgaggaggtgggtgaggaggtgggaggggggcagcctcgaacgcccccctccgcttctggtcctgggaaccttccccagctccccggcaggtcgaatctcgccgttctgccggcactttgtacaggaccccctcgtccagggtcttatcgggcagggcacttgtagagctgctgggctaagtgtctgtctccgccagatacggacacgtgagcagcctgtgtgcggtgaggccttcacagcccctctcggcacgcctggaacaggacctcattgacaagtgtgccttaacttagccctgctgtgtctgagcgttggggccagtgtccagcgtggggtggtggacctgtctggacccagaacgtctttgcttggcttccctcctccctgaccctctctaatctctgggtttctctggtcatctgtccctgctgacagcttccttccccacagcctgtccccacctctccccacaccttgtcctaatttgggtctgtggtgtagtgagtccctggtctgactcagtggaactttgcccattgtctggaagacaatgagagaggaagtgagccagccgtggtctttcctccccacttctggcttcagggctgggttggggggtgggcagggccgaacagctgcagtgggattgggcagcagagattttcctggctgcaatccggcaaaggggctgtctcttgggatcctttggcttttcctggaaacactgtcctggtcctttgcccgggttttagggaaggatgagtagtgtcgggatggtggaggcaggagaagagagcagcgtggtttgctgagatttaggggtcttggatctgccactggctcctgataggtccctgggcggtcagtggcctccagatttttgttgtgtcttcagtgaaatgataccggtccccactgcccagctcacctcccggggctgcaggaggcaccggagataatggctgtagagggtcttgtaacctgaacattgcttgcaaacataaggaattctagttactgggaggaagcacagggcagaggccagaagaggccctcagatttgaggcaccctagcccagacggataaggatccaccagctctgggggcgtgagacccaagctggcaagaatctgcaatctggagccaaggctgtgggtgcctcagtggaggccgagtcagaccgacgtggccagctttgaccctcatggcctcctttcttctgtcccttgaccttcggctcctccctgtccaccctggcctccgagtctcctccacttttccttccgtctcagccctcagctctaggcgcccctccagagacccagctgtcttcccaggccccttcccagcaaggactagcttcatctgaaccacacacacactcacggttcaacctcagactaaaattatcctctcccctgggcaggatgaagggcagccgactccctggtgagggtggagacagacagcaccaaatggtcaggccagagaaggggccagggctaaaaatggacaaggaggtgtctgtggagggcccctgcggctccatcgatgcgggttagggctggagtctgcggggtggcgggtgcaggaagggagggtggggcaggactgggaggagactccgaccttggctgggcggtgccctccctctccacacagctgggtgtggggccgctcagccacaggctgcatgcctgtcggtctctttctggcaccctccttgaggccagcatcaggctttgggttcatgtttgggggtgtgccctggacggagtgtgggcctccagccaggctgccccactgacagtttggcaaaaccaggacctatctggaagccgaagccggggatcaccaggtggacccagcggggtgggactgagtgactgaccctggggtgttggattccatctggcccccggctgccttcaaacaggtgttcagtggaaagcgactggaggctgagttcccacctcatcactctcagagcaccttccggaagacctcgcccgcccctgggggcccagcaggggaggggcccctgcagagcctcacctgcctcattggggagaaggacctgcgcctcctggagaagctgggtgatggttcctttggcgtggtgcgcaggggcgagtgggacgcgccctcagggaagacggtgagctctctgtgtcctgccagcgcagcagaggcatgggacccggggctggtagtggctcttctgcccccaaccagggtgtggatgggactggggatgcgtcacagtgtggctcatcccagagtccgtgctcaggatttttggggttttatttatttatttatttttgagatggagtctcgctctgtcgcccaggctggagtgcagtaggcacgatctcggcttcctgcaacctccactttccgggttcaagcaatcctcctgcctcagcctcctgagtagctgggattacaggcatgcaccaccacactcagttaatttttgtatttttagtagagacggggtttcaccatgttggccaggctggtctcgaactcctgacctcagatgatctgcccactttagcctcccaaagtgcttggattacaggtgtgagccaccacgtccagcccatgctcaggtttaactaagcacatttattatttcaactataaaaataatttattataaaagtttggaaagtatttgaaaaacaagaaaaaaaaaatcgcctgtaatcccaccactcagaggaagccgagcctcttcctcccactttaggtattttgttggatttagttaagatacaaattctggatacagcttttaaaatcttgttctttcttctcggcgttgcatttaacattttcccctcagggataacgtgtcaccacagcatacagttctggtgtgactgtttcctgtgcagcagccgtgtccttactgctcagatcacgtgcggtgcattcccagcacctcagagggctcctcattctccgtccactcagtgcgtccttctcccggggaagccgctgtcactcagtgcatccttctcccggggaagccgctgtgcagacttccagctccacagctttgtttttggcattacatttacagcattttccttctacagcaaaacaccttttaatattccattttatgaccagcctgagcaatatggagaaaccccatctctactaaaaatacaaaattagccaggcgtggtggcacctgcctgtaatcccagctactcaggaggctgaggcaggagaatcacttgaacccgggaggcagaggttgcagtgagctgagatcacgtcactgcattccagcctgggcgacaagagcgagactgtctcaaaaaaaaaaattccattttataacatttgaatattctctcatcatactggttatctcttactttttggttggtatttaagcccggcattcccccaggaaggggaggtgtggccgacgatggctcctgagggccagccgtctgcccttctccagccaggcctcacgcagagcacgtaagcccaggcactggtgacatgcttacccacccagatgaggagctcacaggcagggatcgttgagccgagttggagggtggagcaggttggctccgcgtgtctgggacctggcaagtcctgagtccttgcaaatcccgctctgggcaggtgagtgtggctgtgaagtgcctgaagcccgatgtcctgagccagccagaagccatggacgacttcatccgggaggtcaatgccatgcactcgctcgaccaccgaaacctcatccgcctctacggggtggtgctcacgccgcccatgaagatggtgagtactgcgggcgggagggggcgggcagggagagggctccggtcccatatgtgtggttcggttcctctctccatcctaaggtcagaggcgccctagatcctactttggtcccccaacctgatggagtaaaggggtccacaggggcccagcctggtacgggctgtgtctgctgcggtccagtccgggtctgtctctggattttgctggtgctcagtgtcaagagagttactcccatgggaggggctggccactgagtttaatttggggaatttatgttttatttatctatttattttgagatggagtctcactttgtcgcccaggctggagtgcaatggcatgatctaggctcactgcaacctcggcctcctgggttcacgcgatattcctgcctcaggcttccaagtagctgggattacagccgtgcgctaccatgcctggctaatttttgtatttttagtagagacggggtttcaccatgttggccaggctggtctcaaactcctgacctcaaatgatccacccacctcggcctcccaaagtgctgggattacaggcgtgagccaccacgtccagctgagttttggaatttctagccactgcctctttgggctccttctctctaggcatcagtttcccaaattgcctcgagggagaggcctgagaaactgcaggactcctagaggtccccagacagcaggccaggaaggtgcgtgcagcctggctctggaaagccttcaggaaggggactgggggcccagcgtgggctgctgagaaggggcagggtcctccagctcattcctcctgcctcctccgtggcctcaggtgacagagctggcacctctgggatcgttgttggaccggctacgtaagcaccagggccacttcctcctggggactctgagccgctacgctgtgcaggtggctgagggcatgggctacctggagtccaagcgctttattcaccgtgacctggctgcccgcaatctgctgttggctacccgcgacctggtcaagatcggggactttgggctgatgcgagcactacctcagaatgacgaccattacgtcatgcaggaacatcgcaaggtgcccttcgcctggtgaggggcaggtgctgccagctcacagagtccctgcagacccaggcctcaaagcttctggggctttctggacccaccacagcccctggttttgcttgggcctgcccttgtctgttctaagcctggggtgccctcctttgcacccattcgctcaccatccatctaggaattcttgagggcccacgtgccagggtctgggtgctggaaatcacagggatacatgctgtgggactctccaaggggctttgctgggtggggtgatacggggatagatgctgtgtcctctccaaggggcattgttgggggtcgtgtttcagggatagatcctgtgtcctctccaaggggcattgctggcgggggggtgttatagggataaatgctgtgtcctctccaaagggcgttgctggggggggggtgttacaaggatagatgctgtgtcctcttcaaggggcatcgctgggggggtgttacagggatagatgctgtgtcctcttcaaggggcattgctggggggggtgttacagggatagatgccgtgtcctctccaaggggcgttgctggggggggtgttagagggacagatcctgtgtcctctccaaggggcatcgctgggggcgggtgttacagggatagatgctgtgtcctctccaaggggcactgctgggggggtgttacagggatagatgctgtgtcctctccaaggggcactgctgggggggtgttagagggacagatcctgtgtcctcttcaaggggcattgctggcgggtggtgttagagggatagacactgtgtcctctccaaggggcatcgctgggggcgggtgttacagggatagacgctgtgtcctctccaaggggcattgctgggggggtgttacagggatagatgctgtgtcctctccaaggggcactgctgggggggtgttacagggatagatgctgtgtcctctccaaggggcactgctgggggggtgttagagggacagatcctgtgtcctcttcaaggggcattgctggcgggtggtgttagagggatagacactgtgtcctctccaaggggcatcgctgggggcgggtgttacagggatagacgctgtgtcctctccaaggggcattgctgggggggtgttacagggatagatgctgtgtcctctccaaggggcattgctggggggcgggtgttacagggttagatgctgtgtcctctccaaggggcattgctggggggggtgttacagggatagatgctgtgtcctctccaaggggcattgctggggggggtgttacagggatagatgctgtgtcctctccaaggggcattgctgggggggtgttacagggatagatgctgtgtcctctccgagggtcattgctgagttaggtgatacagggatatatgctgtgtcctcttcaaggggcattgctgggggggtgttacagggatagatgctgtgtcctctccgaggggcattgctggggggcgggtgttacagggttagatgctgtgtcctctccaaggggcattgctgggggggggggtgttacagggatagatgctgtgtcctctccgagggtcactgctgagttaggtgatacagggatatatgctgtgtcctcttcaaggggcattgctgggggggtgttacagggatagatgctgtgtcctctccaaggggcatttctgtggggaggtattcaaaggtttcctaaaacatcagggaagttcgccagggaaagactcgttggtaagcatgttctagggagagctagtggtagacaggcccaggccacagcaggccttgtagatgggccagggctgcttacctgtgcactaggggtggtacttggccctgccctggcccctgtgtgggcttatcctctgctgagaccattgtggttctctggtgccagaggcacccagaggtctgtgatctgcctgctttgaggcgggaagggttgttccagttctgctttcccaagcggtggctgtgggcaacccttatgatccaggacgcatggtcatcttaacgagcagctggctttacacccagggcgagcagaggtcttaaattatgcccgttgtcctggagtaatttagagcagcctcttttgtattcaggcatcctggtttgcatggtaaggtatgaatatagttgcctttaaacagcacgatgaagtgggcgggttattgttctcatttcaccaaggaggataatgaaccttagcgatctcgagtgactttcccggccccatcccctttgaggggcagggctcgctctgcttccctgtctgggcaccaccctcctctctgcacctcagtccacgccgggatgtcctttctgacctcactgcagtggcacttccccctcaaccgggggtgcccagaacgaatgggtgtatttgggtgaagccagtatgactgtttctacccattttggttcttccccaggccctacccgaatttcccacccactgcttcctgccaaaggacccaaatccgaggatcccgccccaaatctgggaattgtcattctcccaccacagtcagaaaacagcctgtgatcttctctccctgccccatcccagagcctctgacctccttcctttccatgcttctctggctgggaaacttcctttcctcttcccccaccaggctgcaagtgaataagaggcctgggcttagacgatttccccaagtccctgcatcgtgtcgtcaaggggtcctgcccgcttcacacggcgcccctgagacccactgttgaacctggcacagggggtcacaacaagtgtttgctgcatgagtgttttaagtccctggggcggacgcaggtagggtgtttgagagggcttctctttgacccctgcctctgccaggtgtgcccccgagagcctgaagacacgcaccttctcccatgccagcgacacctggatgttcggggtgacactgtgggaaatgttcacctacggccaggagccctggatcggcctcaacggcagtcaggtgagggctgggagacgggcccccatagggctggtggggtgaattccattccctgcttgcagcctggccctgctggaactgcctctcaccaatggactccctcctcccacgccccgtgcctccccccacttcccgtgcctcccaccacgccccgtgtctcctctcacgccccgtatctgtatggcctcagggagagcccagcaaagagacggggagggaaaagctggggcctgccctccttctctagcccttgccacatccacttgttccgaggctccagacctgggaagaagggactggggctctggagagggcccctcccaggcaggcagatcccttctttggaggccaggcatggcagcagccgctgcagctgtggatgggctggagggaaggcgggaagtgaagggctgggcgctctgtttgtcgtcaaactctgcacctcctcaccttcagatcctgcataagatcgacaaggagggggagcggctgccccggcccgaggactgtccccaggacatctacaacgtcatggtccagtgctgggctcacaagccagaggacagacccacgtttgtggccctgcgggacttcctgctggaggtgagggacaggtcagcccaggagagctggggtgttcaagctgaggggctacccaggcgtcagtcccagagttggccacgaccttcctcttcctccaggcccagcccacagacatgcgggcccttcaggactttgaggaaccggacaagctgcacatccagatgaatgatgtcatcaccgtcatcgagggaaggtagggagtgcagggctgggccccgccctgggatcgcttgaagggcacaggtcggagggacctgtggacagatctgtttggcctccaagattcccttggccacatacaggctggcggttgggcctgaaccctgcagtgtgaggggaggacaggcctgcctccgtcttcctagtgcctttccctgcccagcttccctccaccaccctttcccactgggctgcagccctggctgtgtggttgggccaggctgcctttatggaggggtagggagtggcctggcctcggtggcagcagagttctggactcccgtgcttcctcctctgctcctccccgcttctctccctgcttcttcctggcacagggactcagccatccacctgggtgcgtttcagtagctgaagcagcccagcctgccctcttgcagctttccatccttcctgctgagcccaccaccccctcccaggcctgcctccagcctctggtcctctcttcccatctccccttgggaggaccctctctatacctaaccctcctcccacagcctctcgggagtccctgtcttccacctgagcccccgcagttctagcgcctgccctgaggccccaccactgctggccctgccttgtgctggctgatccccagggtgtctgagcaactggctggggcagggcaggtttcaggtacctttgaggcaggggcagtattgaggaccaggaagaagagtgaagtggaggaaatcccctgtgctcgcagctcctgactcaggccaggcaaggatggggctagggctgcttcccagggagcctcttccacctgcactgcagcttttggagtctgcggccttcggtgcaatcctgtgcctcttgggggtgggtggaggagacctggggggctgtgtggagtgtgacctgcaccgctgtggccccgacaccccgagccttcccaggcccggctccctcacccttgggcccagggtctgggaataggaatgacatactgagactgcagggcctgtggttaggggtgttatgctggggaagaatgcagaaggttctagaaagagaggcctggggacaggaggcaaacagtctgcaggtttggagctgaggggccagggatgggattgcaagcgtggcgctccggggagcattctggaaataggaagattaagggtgggggggtcccctggaagtacctggcagggcctccagcccgaagtccagcctcatgaccgtgtccacctccacgagctggaaagccgtgggcctggcccctcttgtgctgctgccggagccccagatctttaccacctgcttcccttgctctcagcaggagcctgtgtgcctgccagtgtccccaggggtgactcagagtggcctgtgtttggggcgtgtgtctctggagctggtgttttaggtcaccgcccgggcaaggcgggcagtgggaggggccgggagcggctgctcctgggagggttgtgggtgtgccccgccccgcccttccgtcgaaggcccccgttggccccagccgctggttccctgtggctgctgctggtggggctctgggggctccttccccctgggccaccagccctggcttggaaccacagcacctgccctccgtgcctggagctgctcaggaggtgggaggtgaggggcaggaggccacaacagccggtgaggcttgggagcgggcctgggtgtcggtggtggcagagcttgactctgcccccttgtttcttcagtccctgaatatctccatgtttgtttggctgcctccgtctccatgtctccaggcggatggctctgtgtgagtctttgggcctgggtgtgcatctgtgggtctgtgtttggagttccctcctagcctggccttctcttcgccgtggcttcccacttgcgaagctgtgtccagtatttgtttcctggtgcggagtctgggaggccacctgccgcagctctgactgagtctaggctcagtccttctcagggtaccaggctgtgggcagaggggagacacctagatgtttcgtgctgtgtctagatttggagacacaaatgatgactggtctttcccaggggctcgtttggaggaaggggtggctggcagcacttttgttccgcatacagagcgggtgttggaatccattgcgggtccttggcctggtctggccctggagcctcggcttcctgtggtgggtgggagccaggcatccgggttatccctccaggcctgggcgcctgggacccctagggagaagagcgggcgggcgttttgaacagaatgtccggcattagttgagccatttctggactaccttcggcccggacgggaacgtggtgctgagatttccagagctggggcagccttaggcagttctcagcaccggcctctgttttccatcttgtctaccccagagatgttgaccagaggcccgggggcagcaggaggtagaaggttcatgcggaggtgttgggcccttttcctgctcccccaggaagtcctcatccgcccctgcttcagtcacggccgggtagcagccctggccctcccatggccacggggactccggcctgttcatggcgggagagagagggcgcggacagggcgggcctggaaggaagggctggcctcagtcccctctggactgctggtgcctcggccacactgagcctcacacgggtgcgtgtgggctgcgagaagtgacacggtcctcttggaagtcccactggagccttgggatgaagctgccttggagtgtgcgtgggcgccatcccgagggggagcttcctgtgcctccgagcgtgcgtgggcgccatcccgagggggagcttcttgtgcctcggagcgtgcgtgggcgccatcccgagggggagtttcttgtgcctcggagcgtgcgtgggcgccatcccgagggggagtttcttgtgcctcggagcgtgcgtgggcgccatcccgaggggagcttcgtgtgcctcggagcgtgcgtgggcgccatcccgaggggagcttcctgtgcctcggagcgtgcgtgggcgccatcccgagggggagtttcttgtgcctcggagcgtgcgtgggcgccatcccgaggggagcttcttgtgcctcggagtgtgcgtgggcgccatcccgaggggagcttcttgtgcctcggagtgtgcgtgggcgccatcccgagggggagcttcctgtgcctccgagcgtgcgtgggcgccatcccgagggggagtttcttgtgcctcggagcgtgcgtgggcgccatcccgaggggagcttcttgtgcctcggagtgtgcgtgggcgccatcccgaggggagcttcttgtgcctcggagcgtgcgtgggcgccatcccgagggggagtttcttgtgcctcggagcgtgcgtgggcgccatcccgaggggagcttcttgtgcctcggagtgtgcgtgggcgccatcccgaggggagcttcctgtgcctcggagcgtgcgtgggcgccatcccgaggggagcttcctgtgcctcggagcgtgcgtgggcgccatcccgagggagagtttcttgtgcctcggagcgtgcgtgggcgccatcccgaggggagcttcttgtgcctcggagtgtgcgtgggcgccatcccgaggggagcttcttgtgcctcggagtgtgcgtgggcgccatcccgagggggagcttcttgtgcctcggagcgtgcgtgggcgccatcccgagggggagtttcttgtgcctcggagtgtgcgtgggcgccatcccgaggggagcttcttgcacacgtcctccgcactcttactctccttcccccaggagcaagcatgttttctcgagtggtgtcaggactcccagcagccatgggggctcttgcctcggccatacctgcactaagggaggtgggcttgatgtctcctttccctctcagaagtgggtcccaaaggaggcttctgtgcctggagctgggcagtgttggcggaagggagaggccagacggagtgacctgccttgggcacgagtcacgctgctctgagcaaggtctcggcctcagcggcattctcacccagttactgagcgcctctgaagaggtgtggagagcagagtccggcgtctggcccgcggcagccaccggggagcccgtgggtgtagcgggagagccgcagcccagccggtgccggggttcctcctctacgggccgccgtgggaggctgtgtgcgtgctggggagccggggctctgctccttcgagtggccctgctatttttcagatgggactcgtctcgtctcggggtactgtcctctctccttccttccctccctgcaggcagggtgggaatcacagggtggctgtgtgtggtggggccaggccagtggccctgtgtatgaggaggctgggcagggggagcacagccccgtctccccgcgccccgcgccccccgcctccccgccgaccgtggtgctctcgggtttgactttggtctctgggatgggctgttccggagtcaccccgctccagccaggcctcgtcaccttacaaggctgtgggtctgggtgcccaggcgtcgccacctcctccgtcctctctccccggcctggctgggtttcagaggagcccttcttcacgctttggccctgggacaggagaagtgggggttggtggggagggcgtgcagtgtggtgccacacgtgtccaccctagcagctctgggctgtcaccgcccccgcgtgcccagactctgcccacggggctgtcaccgcccccgcctgcccagacactgcccacggggctctcaccgcccccgcctgcccagacactgcccacggggctctcaccgcccccgcctgcccagactctgctcacggcatcacgtatgacaagtccagcagcagacgcgggagcctcacaacctgtgagagccttcgggagtcaggagtgtcttgcgggagccctgtgcttcctggcctgcctgcccctgcccctgcccctgcccctgcccaggccccggcttaggccacatcagcagaggtttcgtgtctgaggtcagagggggactggcagccctactgtctggtcactgtgggagagctgagttcccttttggacacaggtagagcccctcctgaggagacggggaggctcccgcaggccttccgggaggtggtggaaagctccggaagcaggtgaagcggtggagggagggactgagttgcccgagtgctcctagactctcccgcgtctgcattcgggaggcaggttgtagctggaggcctggcccccagcctagtgcaaggccctaggtgtcccccggcacccccgcacctctcagaactcctggaacccagccgaggagtgaaatcaagtggccagaagaggactggggccccggccttgccagggaactgaggggtgaggaggaggtgtgggcggggcgctggccccacagacctgaaagctggcgttgggtcccaggtctgctgggatctttctggtaaccgtggacaggtcatgttgcctgctgcagcagcttccagcgtgcctccttatttgcaaaccatagggaaagctgcctgacccacctagagagttgtgggtaaggccgtgtgcaaacaggcctgtacggggcatggtgggtcacgggggctgttggggaggagggccggtggcacacagcctggtcctgaggcctgagctccatcccccttctgccacagtggccagggtgtgaggagggtcccagtgccggggctgccccgccacgcctggcgttcaccgtgccatctctgtcgcgcagggccgagaactactggtggcgtggccagaacacacggacgctgtgtgtggggcccttccctcgcaacgtggtgacctccgtggccggcctgtcggcccaggacatcagccagcccctgcagaacagcttcatccacacagggcatggcgacagtgacccccgccactgctggggcttcccggacaggattgacgagtgagtactgggcggggatggatgctgacctggccccgctcgggactccagggccctcagcacggcacgcgtgggcggaatctgctcttcaccctttcgcccgggcttcagcccccgacccgccactctcccctcctcaccctggccttactctcgggaagctgtggaaccctaggaagcccagcctggtgggggttctccaggggaatgttctccaggggagtgttctccaggggagggttctccaggggagggttctccaggggaatgttctccaggggagggttctccaggggagggttctccaggggagggttctccaggggaatgttctccaggggagggttctccaggggagggttctccggggagcgttctccaggggaatgctgtccctgccattttcaagctttggggggccgatctcctaactctgagacacttcatctgtgaaacaggttcacccccccaataaggggaaggctgtaaatgcactctgaattagcacttgctgctcagatgcaggggtcctgagagaagctttcccactcactgtagatgaaagtagggtcaggagcttctgaggatggactcctgtttggtggaaaggtccccggagccacagctgtaacccctcttggtactcgggccttaggaaaatgaacttgggaggaacccggtgggagctgctgaggaggagagcttctcccatgacccccctgtggccccctgtgaccctgtgaccctgtgacccctgcacacgagcagtggttttccttctcctgctggtggtgccagagtcctggagacgtgaacctgctggctcaggccctggggatgtatgcaggtccacatgggagtgagcctgctttccagaaccagagtgggactggggaccttggggactgcagagggaacgttaggtggcagctccgcctccccaccacacagtactctacggagctcactccatacctgggagaggccctgtctcctatgtaagaggataaggccaccgaggggcatctgggaaggacacgcagaatcagtcacttccgggatgccaccccccaccccccgaagcttcttgcgccaggcctccaagcctctctgctggccgcagggggattccaggcccctggcctctgcagcccttctcctgctgacttctgatactctggtctgccctgagaggcgtggaaagcaggggccttcacccaccgggccccacacaccagaaccccacacagcgggcccccacacaccagaacccacacagcgggcccccacacaccagaaccccacacagcgagtccccccacaccagaacccacacagcgggcccccacacaccagaacccacacagcgggcccacacacactggaaccccaagctcacagggctcagcccatgtgttttgcctaaaaagaacccagcaagggcctgagagttggggtgaaagactgcagacacctccaggagaggctggtgccctctgccccactcctggcatgctgtggccagcccagccccattcctccaggctttaatcagccccagtgactaagtctcagatactgacagttggtgcagggacggagggtggatccggagcaggacaggtggcccagcctctcccgcacctcctggccatgtggcagaagggtgcctcctgcccaccctggctgggcaccatagctgggatgccccgttcttaggccctccatcgtggcctgcgggacaggagtgtctgccctctggccgctgcctggtgtgggctgggggcctggggggttgtggaggaccacctctgcccttgtagggtgtagttggagtccctgaggtcctaggctttccatcctggggtcaggtgtcctttctctgccttctctccaggacaccccccagctgagacgtgcggtcaggttctgtggactgggaggcgggaggcctgtgcttcagacccaagactacacccggtttcctccaggacgaaggggctctgatgagattctgccacccctccacacgcttcccctgctctcttgacccagctctctcccccacagactgtatctgggaaaccccatggacccccccgacctcctgagcgtggaactgagcacctcccggcccccccagcatctaggaggggtgaaaagtaagagcccctctgctccctggtgtccctaactcatcggctactcaggaaggggcactgtcttcacaggccaccctaaggctgctgttctgtttttggggacagtggggtcagggcagcaggcgggacagctgtgtccctggctccggctgggcgtggggtggaagacaggcagctgtatccgccgaggtgggcctcctcgggctgggtctgcagcaggcccgtccgccccggcgtccctcctccctccttccacggccgagctcagatcctggctttcctcacttccccctaatcctgctctcctgtcccaagccaaaaccaccccacggctccggctctgcctggggcctcctccatctcccggtcctctgcctatcatactggaccgccgtgttcctcatcctgccgcctgcggcctcccgtttgctgggggcttgtacattcactcgcccccattcacttctctcccttcgtctctctacactctgccctctcgtccggccgtctccctcctttgtcctctgtcctgctccgtctctctccccctgtccgcatggcctttcttgcaggggagcctccacctcgcccacctcagcctgccttcttcactcagagtaagtggggctgcttccgatgccttggcccccgcccccgccccctctctctcactcctctcctggaaggtacagagcctgggcggctgggccggaggggaggtgggtgggtgtgtgctgtgagcttccgcggctgccctggcctagcatgcctgccccccctcgagcccgccccccggagcctgggcttctgctcacgagtgtggccctggcttccgcctcggcctcactccctcccagacctgtctgagcttctggagcacgagtgtggccctggcttctgccttggcctcgctgcctcccagacctgcaggcgctgtctgggctttgtggccgttggtcaggagtactgtcctctccaaggatagtccttatagcccctgatggcaggaggcggctccgtgcctgcactaatggtgtgccgtgacaggggcggggatgagggctcactaactcgccagggcgcaggagcagggccgccggggtcttgtgctggtggaggcagcgtcaggcaggagccagtgttgcttgctgcagcttagacggagcgaggcggggctcaccggcccacatggggctgccgggcagagcaggttccgccctcctgatggagtggtcggaggtgcgctgagaacctggccgccggtggctgacctcagacctcggggggagttgggagtggagggttgctgggggacacttggctttctctcccacgtgccacctcccctcgtgtcccagaccctgcctgactgccttcctgttgggctctccctttccatcacagaaccaacctatgaccctgtgagcgaggaccaagaccccttgtccagcgacttcaagaggctgggcctgcggaagccaggcctgccccgagggctgtggctggcgaagccctcggcgcgggtgccgggcaccaaggccagccgaggcagcggggctgaggtcacgctcatcgacttcggtgaggagcccgtggtcccggccctacggccctgcgcgccctccctggcgcagctggccatggacgcctgctccctgctggacgagaccccgcctcagagccccacgcgggcactgccccggcccctgcaccccacgcctgtggtggactgggacgcacgcccgctgccccccccgcccgcctatgacgacgtggcccaggatgaggatgactttgagatctgctccatcaacagcaccctcgtgggcgcgggggtccctgccgggcccagccagggccagaccaactacgcctttgtgcctgagcaggcgcggccgccccctcccctggaggacaacctgttcctcccgccccagggtgggggcaagccgcccagctccgcacagaccgcagagatcttccaggcgctacagcaggagtgcatgaggcaactgcaggctccggccggctccccggccccctctcccagcccggggggtgacgacaagccccaggtgcctcctcgggtacccatcccccctcggcccacgcgcccacacgtccagctgtctccagcccccccgggcgaggaggagaccagccagtggcctggacctgcttcccctccccgggtgcctccgcgggagcccctgtcccctcaaggctcgaggacacccagccccctggtaccacctggcagctccccgctgccaccccggctctcaagctcacctgggaagaccatgcccaccacccagagctttgcctcagaccccaagtacgccaccccccaggtgatccaggcccctggcccgcgggctggtccctgcatcctgcccatcgtccgggatggcaagaaggtcagcagcacccactattacttgctgcccgagcgaccatcctacctggagcgctaccagcgcttcctgcgtgaggcccagagccccgaggagcctacccccctgcctgtgcctctgctgctgcccccacccagcaccccagcccccgccgcccccacggccaccgtgcggccgatgccccaggctgccttggaccccaaggccaacttctccaccaacaacagcaacccaggggcccggccaccacccccgagggccactgctcggctgccacagaggggctgccctggcgatgggccagaggcgggccggccagcagacaagatccagatggtgagcacccagcctggctgtgggcgaagcggggcagggcccaaggggcctggagcagtgggccctagtggtgctgacaggggtgggtgtgcccagctgcaggccatggtgcatggggtgaccacagaggagtgccaggcggccctgcagtgccacggctggagcgtgcagagggctgcccagtatctgaaggtaccgccacctcctgctcactctggctctcagggaccctgaagcctggttctgctgcccccagccccacgccccctggctccgactcccctcttccccaccctagtcggtgccctgggcccgcgtgtccatggcgccacccttacccccaggtggagcagctcttcgggctgggtctgcggcccagaggggagtgccacaaagtgctggagatgttcgactggaacctggagcaggccggctgccaccttctgggctcctggggccctgcccaccacaagtgagtgagccccacagtctgccccgctccgtgccccaggagggctgtcccagagcctgccacactgggaggaagcccaacacctcgcaggccgctcccggccagggagacacagctctccagctgcgggagggaggcgctcacagggcccagcaaatcgtttttcctaaatgtgtttatttggacattttagccacttggttttcaaatgagtacaagagggaattggagcctctctggttgaaggaggcttgcttccctagcacctgcagtgaccctgagcggctccaggaatggcactttttaggaccccatgatttgcacacctctttctcacctctgtgtttccatatttctgtttaaagtaacatttaaaatttcagtgttggctgggcaccgtggctcatggctgtaatccccagcactgtgggaggccaaggagggaggatcacctgaggtcaggagttcgagaccagcctggccaacatggcgagaccaggtctctactaaaaatacaaaaattaaccgggtatggtggtgggcacctgtaatcccacctgctggggaggctgaggcaggagaatcgcttcaacctgggaggcggaggttgctgtgagctgagattgcaccactgcactccatcctgggcgacagagggagactgtctccaaaaaaaaaaattttctctaaaaagaaaatatattgtctttcctgtaaaaggtttatattatagtttaacaaaatatatagacatttaaaatatatacatatataaacacactttatatattatgtaaatatatatatgagagcgctgtcaagtcaaaaagaagtgaactgaggtcacatggctggagccagcaccatggcaggaggcactggcgggaggaggggctgacacgggccaggccctggagatacctgctgcccttgtcccagcagcgtggccctgtgcacggtgcggagtttctccacatataaagcgtgtagataatagtgctcaccccgtggaagggactggcgcgatggatgggggacatgtctgtcttattgcgcccagcacgcctggcgccaggatgcaggcactccgtgtcacctgtctgtcccatactgtctcgggtggttcttactgatttgcagctgggatgcaggcactccctgtcacctgtctgtcccatactgtctcgggtcgttcttaactgatttgcacctgggacgcaggcactctgtgtcacctgtctgtcattgtctcgggtggttcttactgatttgcacctgggacgcaggcattcgctgtcacctgtctgtcactgtctcgggtggttcttactgatttgcacctgggatgcaggcactccgtgtcacttgtctgtcccagtctcgggtggttcttactgatttgcacctgggatgcaggcactcggtgtcacctgtctgtcccatcctgtctcgggtcattcttaactgatttgcacccgggacgcaggcactctgtgtcacctgtctgtcactgtctcgggtggttcttactgatttgcacccgggacgcaggcactcgctgtcacctgtctgtcactgtctcgggtggttcttactgatttgcacctgggacgcaggcactcgctgtcacctgtctgtcactgtctcgggtggttcttactgatttgcatctgggacgcaggcactcgctgtcacctgtctgtcactgtctcgggtggttcttactgatttgcatctgggacgcaggcactcgctgtcacctgtctgtcactgtctcgggtggttcttactgatttgcacctgggacgcaggcactccgtgtcacctgtctgtcactgtctcgggtggttcttactgatttgcacccgggacgcaggcactcgctgtcacctgtctgtcgctgtctcgggtggttcttactgatttgcatctgggatgcaggcactccgtgtcacctgtctgtcgctgtctcgggtggttcttactgatttgcacccgggacgcaggcacttgctgtcacctgtctgtcactgtctcgggtgtttcttactgatttgcacctgggacgcaggcactccgtgtcacctgtctgtcactgtctcgggtggttcttactgatttgcacctgggacgcaggcactcgctgtcacctgtctgtcactgtctcgggtggttcttactgatttgcatctgggacgcaggcactcgctgtcacctgtctgtcactgtctcaggtggttcttactgatttgcatctgggatgcaggcactccgtgtcacctgtctgtcactgtctcgggtggttcttactgatttgcatctaggatgcaggcactccgtgtcacctgtctgtcgctgtctggggtggttcttactgatttgcagctgggatgcaggcactccgtgtcacctgtctgtcgctgtctcgggtggttcttactgatttgcatccacataggctttgggctctatcccacctgtcgtcttcggattctctaatacgcaggagtgctcttctgttagtttactcatagtttattaaagtacagagaaaagacatccaggatgataaattttacagtccttgccggggactgccagcttccagtggtgttgcctggcaccagtgtgacccccggtgcctgccccgctgaaccttctgtaaactgtttaactgtgctggtggtttcccattctctaggcgctgagatgcgtctggagagccagagggcctgcctgaaggaatcacctgagcctgtccgtccaccaggagtggggagatgcccccatccagtcctggaggacccgctgctcctgctgctcccggggatggagcaaggccaaggctgcgggaggctgggagccctgccctgcccatccctcctgcaccagcgctgtccctgcacactttggttcagtcccggtgcccctgccaagatgtggaaggggccgggtgaagacaggcttgagggctgccccagcaggctctgggtatgacctgcctctggccctggtcctgggcggggcctgtgggtggagtagtacccccaggccctgccctgggtgacagactgggaggaaaccaggctggacctgggcaggcgggatgtgttggccacagggagaggcggaccggcacccggtgggacctcctaggactgggccttcttccagggggcccctggcagcagctggggtgtcgggcagaatgtgacttgtggccttaccatggacttgaatgggacttggctggcctcaggatcttgtgcctggaaatagcctgaggtggctcaggaagcggagaaagggtgccagaccattctctggcggggaccagggcccaaggccccagggctggaaggagaccaaggggcagccgccctggagggacatcagtgcttcctcttccacccaattcccccacgcggttccatgttttcccaccagcctgttggcgaagttgctgctccggcattcagtacctgcttcttccagagaaataaagttagtttctattttatgtta

SEQ ID NO: 15859 - DNA, 45394 bp, Homo sapiens
gagggagagggacccggcgaggggctcaggacccggaggcgccggcggaggaggaggtggtgactggcaggcccgggccccacggtacctccggggctgaaggggacgcaggatgtaggggcatggggagtcgggcgcagaagagtgcggggaaccgctgagctctgggagccactgcctgagggcaggccgcggccggcgggaacctcttctgccgtctcagcctgggcgtcgctgaagctgtgtctgcggggaggcagcggaaggcggcaggtaaggaagcccagtcctgttagctggagttggtgtgcttggaagtgagaggctgcaggtccctggcgagagcgtagactccacactgccctcgttcttttggcctttcatccctggagggaggaagcagtgcagttttcagcggcaaggcaggacctctcccccgccagtactgtgtatggtaattggagtgatagggcatcttcttagagtctaggcagcaggcgggacgtctgggtggctgccaggtctgtgcagagggaagagaggggtagccccagggaggagctgcaggacggtcccccctccacctgccccccgatggcagtaggggtgcctccatgctatatgctctgcatggtgcagtcaacacacaagtcctcaaaacacgtcccacagaagggaagagggcagcgtgggattaacagaaccttatcttgtaaccctgttggtcacgtgagctgagatgagtgtgacagctagtggcttgggtacggcacgagcctggcccgcttctgccacgccgtcctgtcacagctgatttaccctgagggcccagagccaaggatgattagtgggcggaaggagggagagcaactggtgagccctctcgtctctgggtgggacgacccagcgttagaggggcgggagaggagggtgcacttgcaccccagggctctgggctgcctctgtggccccaccctggggaggtttgcagatgggccgctgtggtatcatgggctctgcacctgtcaggacaggagctcccagcccagtctagaggtagggcttgtaggggccaagggtgggggctgtatttggcttgttgactccctcgtggcctgagtgccagacctactcattccgcctcgtgcccccagggggcttggcgggctgcttgtgggccttactctcctagagctgttcgcctcttacctggcactgtcaggtgcttgcttcccctgcccctgggtggggatgggtgcagggttgctgcttgcccagggccttagctagaggaccctcctctgccccagcccgaggtgtggctgtgagtcagatggacccagacccctgtcccgaaccagactgggtgctctcctctgggggcagagggagtggtgctggaggtagcagctgctggaggagccggttagcccgctcctcagacaaactcaaacccgcctgtcagcttcatcccatgcctgtcgcgctgccacccaaacactcatgcaccggaagttcagctgctgtgcccacggtgcctgacgcttctggaatggccagagtggctctcactgtctggcttcagtggagagaacggtctgttttaaacacatacacacaatcttcacctacttatttcaggtcggcgtttttgaacttgtggtagatgaatgggagaaaggccttggcatcacacagattgcttttgatctggttatatcgcttacaagctgtgtaacttccttgggcaacataatgtctttaggtttcagtttcttggtgtctgcggtgggccaggacttcccctgcagtgtcgtgagtaaagaaacctcaggccctttggagcctggtgcccacctccccggagccccggcagatgttagggaggaagggtcagactgttccctctggcccctgagcccgggattagcccccaccttgtgcttcgtctagaagatgcagtgtttctttttgtttgttttaaataacagttttattgagatataatgacatatggtaaactgagcatatttaaaacacacaatttaataagttgtggcctgtgtatatacccgtgaaaccacccccaccttcaagatagtgaacatcccccttattcccctgtccccagaagttttcttgtggaacccctccatcccccgctcctctgccatcccctaccccaggtaacaggctggtctactttctgtcactgtgtctgagtttgcagcatttactgtaaacggaatcgcgtctttcattcaacagaagtattttggagtttgtccaggtggttgcgcgtatcaacagtcattgtacacgtgtgccaaagtctgtttatccattgacctgttgatgggttttcagagaaagctgctgtgaacgtgtttgttagtctttgtgtggatgtacacttttatttatcttaggtaaatccctaggaccggaatggctgggtcatgtggtaggtacacatttaacctttaagaaactgccagactgttttccaaagtggttgtacattttatatactcatccactgtgtatgagagttctggtttgtccatgtctttgatatgtccacatctcgatgtggtcagtctctaattttagacactctcatgtctgtagtggtatctcattacaattttaatttgtatttccttaatgactcatgttgtcgggcatcttctcatgtgctcatttgccatacgtatgtctttggtgctgtgtctgttcagatcgtttgcccatttttaattgtgtagggtttttcgtgttgagttctgaagagttcttgatatattctggatataagccttttatcaggtatgtgatttacaaatcttttttccagcttgtggctttgtattttgatcctcttaacaatgtcttctaaaaaattctcatgatcagtagtgcaaaatgctgtgtttttgaagagaagttgtaaattttgattaatttactaatttgttactttgtggattgcatttttggtgtcatgtccaagaaatctttgcctgacccaaagtcccaacagttttcccctgtattttcttgtagacattttatagttttgggctttacattgagatctaggattcgtttggggttaatttttgttacgtggtgcaaggtatgaatcaatgtccagttttttgcatgtagagatctaattgatctagtagcaccatttattaaaaagatgtatctctccactgaattgcctttgaatctttgtcaaaaatcaattgctggctgggcacggtggctcactcctctaatcccagtgctttgggaggctgaggcgggcggatcatgaggtcaggagttcaaggccaagctggtgaacgtagtggaaccctgtctctactaaaaatacaaaaaattagccaggcgtggtggcgggcacctgtaatcccagctactcaggaggctgagtcaggagaatcgcatgaacccgggaggcggaggttgcagtgagccaagattgcgccactgcattccagcccgggcgacagtgtgagactccatctcaaaaagaaaaagaaaaaaatcaattgtttgtgtgtgtctaattctggattctgttttgttccattgatctatttgtctgtctttatcccagtatcacactatcttgattactgtgggtttataaactatagtaagtcttgaaatcagggtaagatctcaaacttggttttgtcttttcaaaattgctttagctattctgggttctttgcacttccatatacattttagaattagttagtcaatttctacaaaaaagcctgctgggattttgattgggattatgatcaatttggggagaattgatcggttagcagtattgagccttctgaccatgaacagtgtatatctctgtatttgtctaggttttgtttactatctctcagcagtgttttgtagtttttggtatatcagtcttttccatcttttattgaacatatccttaaatagtacctatttttatgctattgtaaatgatactggtttttcctggtagtattggttttttatttttaaaaacttttaattgtggtaaaatatacataatatactgccattgtaaccatctgcagtggtggtaaatacattcatactgttgcacagccgtcaccagcatccatctccaggacttttctcatcttgtgaaactgaaaccgcacctattaaacagtaacttcccattccctcctctctcagcccctgagaaccaccattttaccttctgactctatgaatttggctcctgtaggtgcctcatagaagtagaattttacagtgtttgtgcttttgtgcctggcttatttcacctcggcctagcgtattcaaggttcatttacattgcagcatatgtcagaattttcttctttttaaagggtaaataatattctattgtatgaatataccactttttgtttatccatttacttggattgctttcaccttttttttttttttttttaaagacaaggtctcactcactctgtctcccaggccggagagcagtggtgtgatcatggctcactgcaacctcgacttcctgggctcaggtgatcgtcccacctcagcctcctgggtagctgggactacaggtgtgtaccaccatgcctggctaatttttttttggaattttctgtagagacgggagtttggcatgttgcccaggctggtttccaactcctggcctcaagcggctttcaccttttggctgttgtcagtaatgctgttatgagatggtaccgttgtttaaactttactttccagttgtttgttgctagtatatgtaaataccattgattttgtattttgagcttgaatcctgcagtcttgctaaattgacttattctagcaagcttttttgtaacttcctttggattttctacatagggcgccgtgtcatctgctaataaagttttacttcctcctttctgatctttatgcctgttgcttctttttcttgcctgattgccctggctggatcctctggtataatgttattgtttttttgagatggagtttcatgcttgtcgcccaggctggagtgcagtggcacaatcttggcacactgcaacctctgcctcctgggttcaagcgattctcctgcctcagcctcctgagcagctgggattacaggcacccaccaccacacccggctaatttttgtatccttagtagagatggggtttcactatgttggccaggctggtctcaaactcctgacctcaggtgacctgcccgcctcggcctgccaaagtcctgggattatgggggtgggccaccaagcccagcctcatctaatataatgttgaatagaagggtagataccttgtttctgatcttccaggggatgcatttagtctctcaccattaagagtggtgttagctggccgggcgcggtggctcacgcctgtaatcccaatactttgggaggccgagatgtgcagatcacgaggtcaggagattgagaccatcctggctaacatggtgaaaccccgcctccactaaaaatacaaaaaattagctgggtgtggtggcacatgcctgtagtcccagctacttgggaggctgaggtgggagaattgcttgaacctgggaggtggaggttgcagtaagccgagatggcgccactgcattccgactctgtcacaaaagaaaaaaaaaaagtggtgttagctggccgggtgcggtggctcacgcctgtaatcccagtactttgggaggccgaggtgggtggatcacctgaggtcacgagttcaagaccagcctgggcaacatggtgaaaccttgtctctacccagaatacaaaaattagccgggtgtgatggtatgctcatgtaattccagctacttgggaggccgaggcacaagaatcgcttgaacccaggaggtggaggttgcagcgagccgagattgcgccactgcactccagtctgggtgacagagcaaaactgtctcacaagacaaaacaaaacaaaaaaaagtggtattagctataggtttttcatatctgacctttaccaggttgcaaaaagctctcttttattcctactttgctgagaggtgtttttttttttttttatgtttgtttttttttgttttttttttttgagacggagtcttgctctgttgcccaggctggagtgcagtggtgcaatctcggctcactgcaacttctgcctcctgggttcaagcaattgtcctgcctcagcctcctgagtagctggggttacaggcacatgccaccacgcctggctaacttttgtatttttagtagagatggggtttcaccatgttggccaggctggtcatgaactcctgacctcaagtgattcgcccacctcggcctcccacagtgctgggattacaggcgtgagcccccgcgcccggcccttactgtctcttaaataacttttcagtaatcccctgtattttagcattgcccttctgacactcacctcttcttccagaggtttccggggctgccagttcctgggcttttgaggattgcaggcggtcagtcaagtgtctctcacgctgggatttgtgattttcttgggtcagctctcaactgccaccagcccatctgctttccagcttccaaagttctgtggtggtttttcctctaccattctccccctccctaggggcctatggcattcagaacatccttttttaattgttgttctggtgaggtttcaggaaggagtgacactgtgtggaatctactgttttttcctggaacccctgtcccttcttcagacttcctcacagaatccatgcattcactcagcgtcagtgaatgacatggtatccactcagcgagtccaatgtgggtcataagacttccgcggggacctccatgggcccgcatccttgtgccaagcagtacagtcgtgaatgggctgaatgctggctttaccttttactctctgggtgctcttggccacctctccagagctggtttccatatttgtaaagtggggataatctggggtagtaaggcaggtttttggtcagccagtgaaggtacactctcagtgaagagctggcgcatagtgtcttcctgaggacccaggctatgacttctgccccttcatattctcccagaaaccagcatcgggtgggcatgtggggtgcatggtgggtgtctaaggaaggtgagaggggagggaggttttcctggtccctctcttcctcctcagcagctgtacctcctgggccccccagctggatgtaacaacattggactcttctgtttccctctgtcccctgtatactgtgtctgccaacattggactcctctgtttctctctgtcccctgtacactgtgtctgccaatgaagcagggcctcttctctggtaccctgaccttggcagggctctccccctaccctgtggccagaagagagtcacccttccgctaacatttgccctcccccagatcctgagcctccatgagcctccattcccgatgacagcttcctggtaccttggaccaggcacgccccttcccctttgagggtcccgggctcttcaaggtcagatggtgagcagggtccagtgggatttaaggtgtatgtcttgaagcaccggacatttctctggctcccaggctctcctgggccctgcggcctgctctaggtgacatgttcccagctcctgggtcttggtgtagacatggtcctgagggaatgagcagtgtatcttgtagactgaatgttcacttcccagctctggcatctcctctccactccttctttccacactccacctccagggccaacaataggccccttcagctctggactcttgcgtagggcttgggggtggggtatggcctgagctggcagcaggcaggatgacgagccgggcagcctctgcccagccctggaagagctctctctgggagtggctagctgctgggagctagaccacatccttccctctgggcccccgtgccgtgacagtgcatgggcaggacaggcaacgagaggcagctctctgcggcactcgtgtcctggcctcggcacctgggcatgtgtggcgtgcatgggagtgagacccagacagctgcagcaatgtgtcctctgccacccactgctgctggtgtctgtgttggggagcgatggtccaggagcacattagggccctcagtgtactgtctctttgtgtcggcgttgacactccggtcttcagctggcggagcatgaaacggtttcacagtactttcaagacttgatacagatggatgctcttgtctccacgtgtcagccccaccaagtccagtcagcctcaggttcagtgtggactgggtcacgctgtttagtcagatcctcacccctcctctctcaagtgacattcccttctccactggagttggaggggacgaggcatagcagggccctgcctggtgtgtctgcctctgcctctgtgctctgccctcccaccctggcacctgcctgttcccctcctctctctcggtgagctgggatcctgacagacccaggcccccttcccatcaccctgtgtggcagcccgcgccccagcaccccttcgcagtccgatgagaaggcaccttccttaagaccaatgtcaggctctccctctgcctgagggactggctgagttgttctggttctgagatggctttgggggactgagttgcttagtgggtctggggtcggagtggttgtgatgacatggacagcccctcttcccagaaaggtgctggcgtctctggattagaaatcatggggggaggcaaagccggggctgggagagggcaaccaggcttgttcctggcacccactgggaaagcaacctggcagcagctcacgggggaagaagcagccaccgttctccagtgttcctcacaaagactgagtccttctcagcagacacacccagggcccctgccaggttctcccttcagggcgacagatgtggacagatggttcccttacgatgtacagaccacagcagaggtatacagaccgctccttcagcacaattatgtgctgatacaaagagttacaggaatagtgaccctttaaggataggaacgtgatggataatttaaactttttaaaattcttggccgggcgcagtggctcacgcctataatctcagccctgtgggcggctgaggtgggcggatcatgaggtcaggagatcgagaccatcctggccaacagggtgaaaccccgtctcaactctactaaaaatataaaaattagctgggcgtggtggcgcacacttgtaatctcagctacttgggaggctgaggcaggagaatcgcttaaacccgggaggcagaggttgcagtcagccgagatcgcgccatggcactccagcctggcaacagagcaagactccatctcaaaaaaaaaaaattattttggctatttttcacatgtattattgtgtagttttactactcatgttttcaagcatccctccaacaaaacagcagagataaccatttgtggctaggaaatgggaatttacagaagagatggcatttgacttggatcttgaggagtgtgtgggagtttatcatgtagacacagtagaagtgtcacagacaaaaaatagctcagacattaaaattatttttttattatttatttattgagacggagtctctctgtcgcccaggctggagtgcagtggtacgatcttggctcactgcaacctccgcctcccgggttcacgccattctcctgcctcagcctcccgagtagctgggactgcaggtgcccgccaccacgcccggctaatttttatattttttagtagagatggggtttcaccatattggccaggctggtctcgaactcctgacctcaggtgatccgcctgccttggcctcccaaagtgctgggattacagacgtgagccaccgggcccagccgcagacattaaaattaaagggcatccggacatggtggctggtgcttgtcatcccagctactcaggaggctgaggtgggagggtcacttgagcccaggagttcaaaattaaaatgagccatggtcacaccactgcactccagcctgggcaacagagcaagacccagtctcttaaaaacaaaaaacaagaagaaccccagagtatgtctagggaagggcaaacacttggcttggctgggacatagagacatttgaagggaatgctaagagagagaggtggggaactaggtgaggagtgcagcccagagggcgtgcgtgccagccaggattgggccctcgaggactgagggaagggcccatagtaacagcaggcagccaggtgccgtggtggactcttcatgacagttttatgatggggattccatttttcccctctttacagatgaggaaattgaggcttagaggttgtttgctcaaaagttgcccagctggagcgtgatggagtcaggatttcagcccccatctgcctgactcctgatctcattgtcaccgttgggaggaagtctgaggcggttgaagcagcccgaccggtgtgtctggtggagaaggtggaggacggaggaggagtcttggttgggggtccgtggtggggtgtggtttctacctcgggtggctagtgttggcttgtgatgttttcagcgggatacaggagcgcagaagcagagtttaaggggtgatgctgagcccagtttggatatgcaatgtgtggtacctgtgcagcctcctggtggagctgccctgtaaatgtctggaaatgcgggtctggagccacaggaattcaggaatggagatagcacaaggtggtaataggagtccctggaggcataggtgaccccagggagcacagcatcagtggagaatagaaggaaacatgagttcaaaagtcttaggaaataccaacagttaagaagctgggggcggggggtggggggggggtgggggggtgagggggtgggcaggcgcagtggctcatgcctgtaatcccagcactttgagagagcaaggctggtagaatgcttgagcccaggagtttgagaccaacctgggcaacatgacgaaacctcatctctacaaaaaatacaaaaattagctgggtgtgatagtgcacgcctgtaatcccagctactcaggagatggaggcaggaggattgcttgagcctgcgaggcagaggttgcagtgagccaagatcgcaccactgcactccagtctagggcacagtgagatcctatctcaaacaaacaaacaaaaaacatgtggggtgaagaggcttcagggctggaccatgggcctagcactgccagcagacacagccttgcctgccctcaggacctcagctgccaggcccccctgggagggagtgggcccccgtgtcctggagatggagagactatggacagtcatggcgtgtgtctgaatcactcccttttctttcttgggccctggccagcctcctccccagaccagtgtgatgtcaggcccagccgacctgaaggtgcagggttgcctggtgcaggttcctctgggatgaggttctgagggcacccagcctggccttgctccagaagcctgggctctgcgcacagaggggtgagttaaggctgactaaacttggtggggctgacatgtggaagcaagataatcctctggctgggggaggagctgtaagcccccctctcctcatcagtatgttcttttttccttcagggcttggagaagaggtaggtggaggtgggagagggcgggctgggaggtagggttggcatatattcctgagaatacggtagattgttttggaaaaatcctcttggccggaaattgcctgtcatgtctgcgccttggtgtggatttgtcacttcgcatgcagttggagaggctggagaggggaatggacagcagagctgggctggtttccagcctcttgtttcctttagctctgcagagtggagatataaagagacaagtgaagagcagagggggtgtacacgtggggtggattctcgaactcctagaggtagtttagatcctgtggatgtcttacgataggatggtactaggacgccagagatttacagggggaggtgaggcagggagaaagcaggaaagggcactggtttggatcagatcctttatccagccagggcaagaagggaggggcctggtattttctgccttgccttctacagtctcccggctttgcagctactcccaagactagtatgtgcctttagctgcagtaagatgccgaggagcttctgtacagcatagaagcaggcgttcgggggcctcgccggcagtcatccacctaccctggtgtgcttggggtgtggaaggggctgtgtgaggagagtgggccgtagagggagcctcacctagtgaccttccagggtctggctcagccttgacgctgcgtggggaggagaggtcacagcatctgtctctcctctgccccaacccagggaaggtgccctgagctcagccctaaatacctggtactaaagagtcagtggctgcttcagatgccaccagaatgagaagcggtgccttggggccccgggggagaggaagagcctctgccctgggacttcctgtgccggcgatggcctcgcgccagtgctgggcgcggcacccccgcgtgggcctgtgttgggcggcttttgagcaggagtccgggccctcgtgtcaccgctctgaagtcaaggaggtcagtgcgtgcccagcgcacagcgcgtgcggcgttgcgggagtggcgcgcggggaaccggccgcgggggcctcggggcgggggcgtggcctgcgcgggaggcgggcgctgggaggcggcgcggagccggctgagcgcagggccgagctgcggggcaggtgggcgcccggcgttctgggagcagagtggccgccggggcaggctgggggcggggtgggctgcagccccgggatgcctcggaggagggggtctcagatggagtcggacggaggcccctctgctgtgggcttctcggatggccccttaccgtgaatacgggggactcgtgaatccccaaggccccagttggtggctctggggccctggaggcgggctgagggctgagtggagcccggttccgcggccggcgaaggcagagccccggctctcggtgggggtcagcccggggctggcacagctggctcactgggagagggtgggagccgcgccccggagaggaggaacggagctgggacgggctgcaggagggaatggccgcaggccggcaggaggaggggcgcgaccacccggccgccggccgatggcggatgaggctatgggggctgagacgcagtagcggccctgcacttctggaggatgctcgaggcccggccccccaggacgcagggcagtgacgctgccggtgccgctgcggggcgggggctgcgggcgctgcttctctccctgaccgcagccgctgggatttggggctccatgggggagagatctgcttaccagcgcctggctgggggcgaggagggaccgcaggtaatggggaaggctaggggatagccagatacctgggccccagaccccttcgtctgctgtgagccgggctcagccctgccccctgcggcggcctcaggagtgagagtgtctgctcctgggccaggggacagagagcggtgtgtttatgtgggtgtggcggtggtgacttagtgatgctggcatctgcctgtgtgtgcatggatcccctgggaccccaaaaagctgcccgttgggctttcttccatgccccaagggagtccaggaagtactgctaggattggggttcagtcttttaggagaactgagtctgtatgtcctgggcattcccgtttactaggcttctgaatatgaatatcaagccagatgtccttgtttgcttttgaaaatatggtcacggtgttgatggatggggtagcttcccttccccttggagagaacgcacttcctctcccgaccggcagagggcagtagctgacaggagaaagggggactcggtaggagcgttggggcttaaggtcgggctgttttcctgggcgaggagaaagggggccgggccgggccgggcgcggtggctcacgcctgtcatctcagcactttgggaggccgaggcgggcagatcacctgagacgaggacgctgaggtcaggaattcgggaccagcctggccaacatggcggaaaaaaaaaaaatagctgggcacggtggcgggggcctgtaatcccagctactcgggaggctgaggcaggagaatcacttgaacccgggatcgcgccactgcactcaagcctgggcgatagagcaagactctcaaaaaaaaaaagggggtgggggttccaggagccggcctggcgctgacccacacatactttgcttcttcccgcagctggattactgggccagttacaggtcttgttcttactggacatccaaggtcaggcatggggttctggtgactttgagacacatatttctggggacgctagagtttttaatctggccattctgatccagcagacccattttgaaatagagggaataaccctgcttaaattgttccccggcccccggtccctgggtctccttccaggtgtgcttggtgccagggtaaggctgtaggcttctctgatgcaagggcacagtcagccaaggtttggggaaaagtcagctccagtgtaacgcaggcctgatcttgtccacctgacctcagcccccactccatccacacctgccatctccacaagctttgtgggctggatggcagggggatgaggaagagggactgaagttgggggtgtccttctccccacctcctggagttagaccaggaaatggctgtcccttttggcatcatcagggaggtcaagtgctgggagaggccctgggaagggagcctgggatgctgagtccccaaagccctgctccccagctgcccacccctccagccagctgaggctccctgagctggtggccagctggacagggacaagagagcagtgtgcaagaaacaggggctccctaggcatggctcagcagggaggggggtgcctggggagctggagagggcttcctgcagctgtcaggtgtgtctgggggccgtagcgaggggggtgtaagagcagctggcaccctttgaggagggccagagagatcatttgtcagttctagaaacatgagggccccacgggggcttgatggagtgtctctaggccccttaatctgaggccgtggtctgtgtcaggggttatacaggagacatcctacagctttggggtgggggcgtcccagcaggagtctcagggcatatttgtttgttttgagcgggtttgggaacttggccacctggtctgagtaggaggcaccctgggtgtttgggcagcagacagggccaccccaggggagggggtgaggatcctcaccccaccctacccttgctcttggctggactgccccactctggcaggctgccggccgcctatttccgtcgggcaccagggtaacagggccacatcagggtctgagccaggagacacccagccaaggctgggactcgggggtgggggagggtctctgaggagtcatcgcagggcccagcggagcctctggggtccaagcctcccactcaggctgtgtgttagtccccacgtccccacacaggtccatgagggagtccacagccctgcttcatacgtgctgtttgagtcacatagccgccaccctaaagtcccaggagttgtctgcaactgtgagggctggggtagaagccagagacaggagctttgtgtatggggaggcaggggggccagcgcgggtggctgggaggaagagtcccccccattcctgccgccctcttggcagtgattcagaaaggtcctttttcagccagtgtcagagctgctcagctggggagggagggagagagggagagagagaggcaggcaagagggagggcggccgggcgggcagttgggtggggaagccggggagtagggctggactgtgaccactgccctggagagaagacagaaacaggacagaggatcccggctgcagccagcgtgaggaaagctctgctccctgccagaccggccagctgtggaaacccagcggggcttgcagcagagcggaggggcccaccccgttcttcctcatttcccacccctggtgtgggatttggggggctcctgggcagagtgcgaagctccggagccgaggccactggatccccagtgactgctcgggggggtcccgctgcgtggagatgccggcagcacgtcggttccctggcctggagctctccttccctctcctggccagactgcggcgacgcctgtacacagtgagtggggggcaggggctggactgctggggactggttgggctcctcagcaccagcacttgactgagaggcagaaagcaagactgggagcggctgagggaccccgccagtgagggcttgacggggagtccgggccaagtggcctctcctgcggctgctgcattccttcttcttggcctgtgtgtttgcacgccggccacagagtagtgacggacacaggtgtgcagactccatgaggtgcgggggccaggaccatgcagaattggagagtgtttgaactctggaggagctgcagccatgccctgtgctgcacaaagaaccttgggctggagggggacttagaggggaggcggacccctgcggagtcaccctggactgagaccctgaccgcttgcctcaccagcatcccggagttccttcccgtcctcccacatgcatcccctgtgcagagctgcgctgttgctgggtcagggagcatggagtgcacagctgaacagaggtgcattagctggtgtttcagggagagggaacaggccgggctgtgctttctgaagagcttcaggggaggggcctctgggtctcccccagccctgaccaccccgggcatggctttgagctgttttcaggagcctagaggagggggcctggatccttgggagttggtggtgggaaaaagaagaggagccctggagactgctctccctgcgggagactaggagcctccatcctgaggctgagccctggagggggggggtcactttgctccagggacagggcagcggtggccgtggccgggtggagaggagacgctgcctaggcccgtgactcctagtgtgcctctgggcttgcttccggaaagccacgacgcctggtcctcttaaaccccacgcctcttgttttgtaaacagatgattttgttgaggataaatgaatacagcttaatacttagaactgttcctcgcatatagtaagtgcagttgaagtgttagattttattttattttgagatggagttttgctcttgttgcccaggctggagtgcaatggcacgatcttggctcaccacagcctccgcctcccgggttcaagtgattctcctgcctcagcctcctgagtagctgagattacaggcatgtgccaccaggcccggctaattttctattttcagtagagatggggtttctccatgttggtcaggctggtctcgaactcaggtgatccgcccacctcagcctaagtgctgggattacagctgtgagccactgtgcttggcctagatgttatttttattgttacttgtcttaaataaagttaatagaaatatataacctgttatattaacatgttaacctgtgtacagtgaaacaagcaacacagtgggaactctaatataaagagacataagaggaaggtaataatattttatgtatcctaatacgttagtaacctagacaatgtagtgaggagtcagatcttgagacctcaggtggaaacaccgtgaaggcagcatctgcaagtgctgaccgagaggggagttttgaaataatgagagggggttgccttcactgacatttttgcaaatagtggacttctgctatgttctgaataaagcaaagtccattttcccttaagtttacacagtagtttcattccaggaaaatttattttatattaaaactgtaaggccaggagcagtggctccccagcactttgggaggccagggcaggtggatcacttgagctcaggagttcgagaccagcctggccaacatggaggaaccctgtctccactaaaaatacaaaaattagccgggcgcctgtgatcccagcttcttgggaggctgaggcgggagaattgcctgaacccgggaggctgagtttgcaatgagccaagatcataccattgtactccagcctgggagtctcactctgtctcaaaaaaaaaaaaaaaaaaaaccaaaaaactataaaagtactttcttatttatatataaagtgggatcatattctaggtttgcatgatcataaacaccttcatgaattgagttgtgtgggatttgggacagtgcgagaatgtcctacgcattgcaggctagctcacgctcttgtcccccaaccacccactgaatgtcactaaggcccccccaaatgttgtggcaaccagaactgtcccatagggggctgtgcagcctcatgagaaccattccagtaaagggttacagctttaagtttggaaaccacccggctggcccagctgcctggcccggtcgccgaggtggaagagccaggatttgaactgagagtttctcattcccctttgttactctttgtacttccctgagctgcctgaaaaagtcggaactggcactgtgttggcagggccactgggaactgtgggggcaggaggctcacgctgggcccaggctgtgtgtgcctgcttctcagtgctgctcactgtgatgggagctggggaggaggccaccgctgagtgggggagggggatggcttggtccccagccgggcagctggccttttttctctcgcctgttcctctttggggattgagcatgggtccggggctagcctggccacgccctcagctctgacacaccttacgcagacagggatgggtttgctgtgcggtgggtccgcttgcttagctttgaaggtgccaccagcttctttatctgggcccaggatagtgtaggtcagaggtcactctccggtaccactggctgattgcggcctgcagtgtgctttggccagcacgctgtgtgtgcgtgtgcatgcttttcagatctgaactattcagcattgttaaaaagtcaggagaaagacgaatattaagtgaaatcagggaacagaatggtatggttaatgcgtgaatattcgtgtagggacaacagagtctgaagcgtccgcagaagacatcactggcaactcctggggagccgggtggctgtgcagctggggagggaatgagattcgtggctcagtgtgccttctgaatattttaccacgtgcatatattaccttttccaaactttaatggtgagatttcacatgtaaattgggatttatttcttgaaaaaatggaaagctttgacaacactgggccacagtttcttctgacaaccattgatgggatctgagctccctgttgacaggggtgtctgcgagcccaccgcaggccccacccctccctcctgtcttccgcttgctgtggccctgtaggcacttgagtggtggcccgtggagtggtctttggattgttaggagaggctggggtggtcaggcgctgggaggaacttagcttagagctcatctgaccctgagagttttctccgtcacatctaaggagcccatagatgggtctcggggcacattgcaccctagagatttttatcaaatattaggagtaagaacacgtcggtgttcccggagagaccactgttagtttttaaaagattttcaaggactttcgacccctagaaacttagagcaggaatgtgagcacaggttgatcttgggtcactcagtcacagatcacatttcgggagcaagaccctgactcctgactccagggccagggctgtatctccgccgccctaattgtgccctgtggctggcaggaataggggacgtgggtccaggcggttctcggtagcttccctcgggagtcagaaggtggtgtgagcccttccgggtggccgtgtagtgggatgaaggtgagcccaggtcactcgggcaggcccctgttgtccccccacaacccttgtccctgagccactcctccccccacagaggctgggaggcggcagaatgcagccagaggagggcacaggctggctgctggagctgctgtccgaggtgcagctgcaacagtacttcctgcggctccgagatgacctcaacgtcacccgcctgtcccactttgagtacgtcaagaatgaggacctggagaagatcggcatgggtcggcctggtaggtgggatgttggcctggcttgtcttgcccctgaccctttccgtcctctgtcctcaggaccactcggtgcacgggtggcagctgagaactctgtcccagagccctgagggagcaggagggacatcagtaggtgctgatgtgtgatgagaacagttggcagttataaaggtgaattggagtttgaggagagtgaggccttccctaaagctggctacacaggagtcactccatgccccgttgtgattgttctcacgtagagtgtatgtcctccattgcccctccttcataagcatcgaattgagtctgttctcatcattctgactaccggggggtccatgtgcagagatctgtagggagaacgctaactctcagatggtttgctgattcgtgctcacgctctctttcttgctctctcacacgcacacacgcatgcacacgcacaggcatacacacacacacacacacacgcaggcacacacgcacatgcgcacacacgtgcacgcacgcatgcacgtgcacacacgcatgcacgtgcgtacgcacgcgctcacacgcctgcgcacacagacacgcacacacacacacacgtgtgtgcgcacacccgcatgcacacgcacggcatacacacatgtacacacacgcgcgcagacgcacacacgtgcgcacacgcgtgtgcacacacacgcacatacacacaggtttgctctgatttgagttcaacccttatcttcatatttttcctaaaagtgggggttgtagcatctaaaagtcatgatgttcttcatagaacattagaaacgtattagggctttcaagttaaaatagctaaataggtaataatgtgtcaagttagacactgacttagttaaaatagctaaataggtaataatgtgtcaagttagacactgacttagttaaaatagctaaataggtaataacgtgtcaagttagacactgacttagttaaaatagctaaataggtagtaatgtgctaagttagacattgatttatgctactttaggcctggatagttggtgtctgatgccagtagcataaaaaaattttacggagggaaaaaaacctcaacattgagaaaattctgttcattaccttgatttttcctgagaactgggagaagcccatcgcttcaagtttttggttaaacaccttcacccagtttgagagccagtgccaggaagtggagtgcagagaccgtcggtcagttgaggctccgggttagttggggttgatttcattgctatcatcgggtgggcggtgtctagtgacaggctcacccccaaggggaccacaggcagcagcctctctcgggctacggcggccttcacagcacgcggttccccgctctccctgcaggccagcggcggctgtgggaggctgtgaagaggaggaaggccttgtgcaaacgcaagtcgtggatgagtaaggtgggtgaggaggtgggtgaggaggtgggaggggggcagcctcgaacgcccccctccgcttctggtcctgggaaccttccccagctccccggcaggtcgaatctcgccgttctgccggcactttgtacaggaccccctcgtccagggtcttatcgggcagggcacttgtagagctgctgggctaagtgtctgtctccgccagatacggacacgtgagcagcctgtgtgcggtgaggccttcacagcccctctcggcacgcctggaacaggacctcattgacaagtgtgccttaacttagccctgctgtgtctgagcgttggggccagtgtccagcgtggggtggtggacctgtctggacccagaacgtctttgcttggcttccctcctccctgaccctctctaatctctgggtttctctggtcatctgtccctgctgacagcttccttccccacagcctgtccccacctctccccacaccttgtcctaatttgggtctgtggtgtagtgagtccctggtctgactcagtggaactttgcccattgtctggaagacaatgagagaggaagtgagccagccgtggtctttcctccccacttctggcttcagggctgggttggggggtgggcagggccgaacagctgcagtgggattgggcagcagagattttcctggctgcaatccggcaaaggggctgtctcttgggatcctttggcttttcctggaaacactgtcctggtcctttgcccgggttttagggaaggatgagtagtgtcgggatggtggaggcaggagaagagagcagcgtggtttgctgagatttaggggtcttggatctgccactggctcctgataggtccctgggcggtcagtggcctccagatttttgttgtgtcttcagtgaaatgataccggtccccactgcccagctcacctcccggggctgcaggaggcaccggagataatggctgtagagggtcttgtaacctgaacattgcttgcaaacataaggaattctagttactgggaggaagcacagggcagaggccagaagaggccctcagatttgaggcaccctagcccagacggataaggatccaccagctctgggggcgtgagacccaagctggcaagaatctgcaatctggagccaaggctgtgggtgcctcagtggaggccgagtcagaccgacgtggccagctttgaccctcatggcctcctttcttctgtcccttgaccttcggctcctccctgtccaccctggcctccgagtctcctccacttttccttccgtctcagccctcagctctaggcgcccctccagagacccagctgtcttcccaggccccttcccagcaaggactagcttcatctgaaccacacacacactcacggttcaacctcagactaaaattatcctctcccctgggcaggatgaagggcagccgactccctggtgagggtggagacagacagcaccaaatggtcaggccagagaaggggccagggctaaaaatggacaaggaggtgtctgtggagggcccctgcggctccatcgatgcgggttagggctggagtctgcggggtggcgggtgcaggaagggagggtggggcaggactgggaggagactccgaccttggctgggcggtgccctccctctccacacagctgggtgtggggccgctcagccacaggctgcatgcctgtcggtctctttctggcaccctccttgaggccagcatcaggctttgggttcatgtttgggggtgtgccctggacggagtgtgggcctccagccaggctgccccactgacagtttggcaaaaccaggacctatctggaagccgaagccggggatcaccaggtggacccagcggggtgggactgagtgactgaccctggggtgttggattccatctggcccccggctgccttcaaacaggtgttcagtggaaagcgactggaggctgagttcccacctcatcactctcagagcaccttccggaagacctcgcccgcccctgggggcccagcaggggaggggcccctgcagagcctcacctgcctcattggggagaaggacctgcgcctcctggagaagctgggtgatggttcctttggcgtggtgcgcaggggcgagtgggacgcgccctcagggaagacggtgagctctctgtgtcctgccagcgcagcagaggcatgggacccggggctggtagtggctcttctgcccccaaccagggtgtggatgggactggggatgcgtcacagtgtggctcatcccagagtccgtgctcaggatttttggggttttatttatttatttatttttgagatggagtctcgctctgtcgcccaggctggagtgcagtaggcacgatctcggcttcctgcaacctccactttccgggttcaagcaatcctcctgcctcagcctcctgagtagctgggattacaggcatgcaccaccacactcagttaatttttgtatttttagtagagacggggtttcaccatgttggccaggctggtctcgaactcctgacctcagatgatctgcccactttagcctcccaaagtgcttggattacaggtgtgagccaccacgtccagcccatgctcaggtttaactaagcacatttattatttcaactataaaaataatttattataaaagtttggaaagtatttgaaaaacaagaaaaaaaaaatcgcctgtaatcccaccactcagaggaagccgagcctcttcctcccactttaggtattttgttggatttagttaagatacaaattctggatacagcttttaaaatcttgttctttcttctcggcgttgcatttaacattttcccctcagggataacgtgtcaccacagcatacagttctggtgtgactgtttcctgtgcagcagccgtgtccttactgctcagatcacgtgcggtgcattcccagcacctcagagggctcctcattctccgtccactcagtgcgtccttctcccggggaagccgctgtcactcagtgcatccttctcccggggaagccgctgtgcagacttccagctccacagctttgtttttggcattacatttacagcattttccttctacagcaaaacaccttttaatattccattttatgaccagcctgagcaatatggagaaaccccatctctactaaaaatacaaaattagccaggcgtggtggcacctgcctgtaatcccagctactcaggaggctgaggcaggagaatcacttgaacccgggaggcagaggttgcagtgagctgagatcacgtcactgcattccagcctgggcgacaagagcgagactgtctcaaaaaaaaaaattccattttataacatttgaatattctctcatcatactggttatctcttactttttggttggtatttaagcccggcattcccccaggaaggggaggtgtggccgacgatggctcctgagggccagccgtctgcccttctccagccaggcctcacgcagagcacgtaagcccaggcactggtgacatgcttacccacccagatgaggagctcacaggcagggatcgttgagccgagttggagggtggagcaggttggctccgcgtgtctgggacctggcaagtcctgagtccttgcaaatcccgctctgggcaggtgagtgtggctgtgaagtgcctgaagcccgatgtcctgagccagccagaagccatggacgacttcatccgggaggtcaatgccatgcactcgctcgaccaccgaaacctcatccgcctctacggggtggtgctcacgccgcccatgaagatggtgagtactgcgggcgggagggggcgggcagggagagggctccggtcccatatgtgtggttcggttcctctctccatcctaaggtcagaggcgccctagatcctactttggtcccccaacctgatggagtaaaggggtccacaggggcccagcctggtacgggctgtgtctgctgcggtccagtccgggtctgtctctggattttgctggtgctcagtgtcaagagagttactcccatgggaggggctggccactgagtttaatttggggaatttatgttttatttatctatttattttgagatggagtctcactttgtcgcccaggctggagtgcaatggcatgatctaggctcactgcaacctcggcctcctgggttcacgcgatattcctgcctcaggcttccaagtagctgggattacagccgtgcgctaccatgcctggctaatttttgtatttttagtagagacggggtttcaccatgttggccaggctggtctcaaactcctgacctcaaatgatccacccacctcggcctcccaaagtgctgggattacaggcgtgagccaccacgtccagctgagttttggaatttctagccactgcctctttgggctccttctctctaggcatcagtttcccaaattgcctcgagggagaggcctgagaaactgcaggactcctagaggtccccagacagcaggccaggaaggtgcgtgcagcctggctctggaaagccttcaggaaggggactgggggcccagcgtgggctgctgagaaggggcagggtcctccagctcattcctcctgcctcctccgtggcctcaggtgacagagctggcacctctgggatcgttgttggaccggctacgtaagcaccagggccacttcctcctggggactctgagccgctacgctgtgcaggtggctgagggcatgggctacctggagtccaagcgctttattcaccgtgacctggctgcccgcaatctgctgttggctacccgcgacctggtcaagatcggggactttgggctgatgcgagcactacctcagaatgacgaccattacgtcatgcaggaacatcgcaaggtgcccttcgcctggtgaggggcaggtgctgccagctcacagagtccctgcagacccaggcctcaaagcttctggggctttctggacccaccacagcccctggttttgcttgggcctgcccttgtctgttctaagcctggggtgccctcctttgcacccattcgctcaccatccatctaggaattcttgagggcccacgtgccagggtctgggtgctggaaatcacagggatacatgctgtgggactctccaaggggctttgctgggtggggtgatacggggatagatgctgtgtcctctccaaggggcattgttgggggtcgtgtttcagggatagatcctgtgtcctctccaaggggcattgctggcgggggggtgttatagggataaatgctgtgtcctctccaaagggcgttgctggggggggggtgttacaaggatagatgctgtgtcctcttcaaggggcatcgctgggggggtgttacagggatagatgctgtgtcctcttcaaggggcattgctggggggggtgttacagggatagatgccgtgtcctctccaaggggcgttgctggggggggtgttagagggacagatcctgtgtcctctccaaggggcatcgctgggggcgggtgttacagggatagatgctgtgtcctctccaaggggcactgctgggggggtgttacagggatagatgctgtgtcctctccaaggggcactgctgggggggtgttagagggacagatcctgtgtcctcttcaaggggcattgctggcgggtggtgttagagggatagacactgtgtcctctccaaggggcatcgctgggggcgggtgttacagggatagacgctgtgtcctctccaaggggcattgctgggggggtgttacagggatagatgctgtgtcctctccaaggggcactgctgggggggtgttacagggatagatgctgtgtcctctccaaggggcactgctgggggggtgttagagggacagatcctgtgtcctcttcaaggggcattgctggcgggtggtgttagagggatagacactgtgtcctctccaaggggcatcgctgggggcgggtgttacagggatagacgctgtgtcctctccaaggggcattgctgggggggtgttacagggatagatgctgtgtcctctccaaggggcattgctggggggcgggtgttacagggttagatgctgtgtcctctccaaggggcattgctggggggggtgttacagggatagatgctgtgtcctctccaaggggcattgctggggggggtgttacagggatagatgctgtgtcctctccaaggggcattgctgggggggtgttacagggatagatgctgtgtcctctccgagggtcattgctgagttaggtgatacagggatatatgctgtgtcctcttcaaggggcattgctgggggggtgttacagggatagatgctgtgtcctctccgaggggcattgctggggggcgggtgttacagggttagatgctgtgtcctctccaaggggcattgctgggggggggggtgttacagggatagatgctgtgtcctctccgagggtcactgctgagttaggtgatacagggatatatgctgtgtcctcttcaaggggcattgctgggggggtgttacagggatagatgctgtgtcctctccaaggggcatttctgtggggaggtattcaaaggtttcctaaaacatcagggaagttcgccagggaaagactcgttggtaagcatgttctagggagagctagtggtagacaggcccaggccacagcaggccttgtagatgggccagggctgcttacctgtgcactaggggtggtacttggccctgccctggcccctgtgtgggcttatcctctgctgagaccattgtggttctctggtgccagaggcacccagaggtctgtgatctgcctgctttgaggcgggaagggttgttccagttctgctttcccaagcggtggctgtgggcaacccttatgatccaggacgcatggtcatcttaacgagcagctggctttacacccagggcgagcagaggtcttaaattatgcccgttgtcctggagtaatttagagcagcctcttttgtattcaggcatcctggtttgcatggtaaggtatgaatatagttgcctttaaacagcacgatgaagtgggcgggttattgttctcatttcaccaaggaggataatgaaccttagcgatctcgagtgactttcccggccccatcccctttgaggggcagggctcgctctgcttccctgtctgggcaccaccctcctctctgcacctcagtccacgccgggatgtcctttctgacctcactgcagtggcacttccccctcaaccgggggtgcccagaacgaatgggtgtatttgggtgaagccagtatgactgtttctacccattttggttcttccccaggccctacccgaatttcccacccactgcttcctgccaaaggacccaaatccgaggatcccgccccaaatctgggaattgtcattctcccaccacagtcagaaaacagcctgtgatcttctctccctgccccatcccagagcctctgacctccttcctttccatgcttctctggctgggaaacttcctttcctcttcccccaccaggctgcaagtgaataagaggcctgggcttagacgatttccccaagtccctgcatcgtgtcgtcaaggggtcctgcccgcttcacacggcgcccctgagacccactgttgaacctggcacagggggtcacaacaagtgtttgctgcatgagtgttttaagtccctggggcggacgcaggtagggtgtttgagagggcttctctttgacccctgcctctgccaggtgtgcccccgagagcctgaagacacgcaccttctcccatgccagcgacacctggatgttcggggtgacactgtgggaaatgttcacctacggccaggagccctggatcggcctcaacggcagtcaggtgagggctgggagacgggcccccatagggctggtggggtgaattccattccctgcttgcagcctggccctgctggaactgcctctcaccaatggactccctcctcccacgccccgtgcctccccccacttcccgtgcctcccaccacgccccgtgtctcctctcacgccccgtatctgtatggcctcagggagagcccagcaaagagacggggagggaaaagctggggcctgccctccttctctagcccttgccacatccacttgttccgaggctccagacctgggaagaagggactggggctctggagagggcccctcccaggcaggcagatcccttctttggaggccaggcatggcagcagccgctgcagctgtggatgggctggagggaaggcgggaagtgaagggctgggcgctctgtttgtcgtcaaactctgcacctcctcaccttcagatcctgcataagatcgacaaggagggggagcggctgccccggcccgaggactgtccccaggacatctacaacgtcatggtccagtgctgggctcacaagccagaggacagacccacgtttgtggccctgcgggacttcctgctggaggtgagggacaggtcagcccaggagagctggggtgttcaagctgaggggctacccaggcgtcagtcccagagttggccacgaccttcctcttcctccaggcccagcccacagacatgcgggcccttcaggactttgaggaaccggacaagctgcacatccagatgaatgatgtcatcaccgtcatcgagggaaggtagggagtgcagggctgggccccgccctgggatcgcttgaagggcacaggtcggagggacctgtggacagatctgtttggcctccaagattcccttggccacatacaggctggcggttgggcctgaaccctgcagtgtgaggggaggacaggcctgcctccgtcttcctagtgcctttccctgcccagcttccctccaccaccctttcccactgggctgcagccctggctgtgtggttgggccaggctgcctttatggaggggtagggagtggcctggcctcggtggcagcagagttctggactcccgtgcttcctcctctgctcctccccgcttctctccctgcttcttcctggcacagggactcagccatccacctgggtgcgtttcagtagctgaagcagcccagcctgccctcttgcagctttccatccttcctgctgagcccaccaccccctcccaggcctgcctccagcctctggtcctctcttcccatctccccttgggaggaccctctctatacctaaccctcctcccacagcctctcgggagtccctgtcttccacctgagcccccgcagttctagcgcctgccctgaggccccaccactgctggccctgccttgtgctggctgatccccagggtgtctgagcaactggctggggcagggcaggtttcaggtacctttgaggcaggggcagtattgaggaccaggaagaagagtgaagtggaggaaatcccctgtgctcgcagctcctgactcaggccaggcaaggatggggctagggctgcttcccagggagcctcttccacctgcactgcagcttttggagtctgcggccttcggtgcaatcctgtgcctcttgggggtgggtggaggagacctggggggctgtgtggagtgtgacctgcaccgctgtggccccgacaccccgagccttcccaggcccggctccctcacccttgggcccagggtctgggaataggaatgacatactgagactgcagggcctgtggttaggggtgttatgctggggaagaatgcagaaggttctagaaagagaggcctggggacaggaggcaaacagtctgcaggtttggagctgaggggccagggatgggattgcaagcgtggcgctccggggagcattctggaaataggaagattaagggtgggggggtcccctggaagtacctggcagggcctccagcccgaagtccagcctcatgaccgtgtccacctccacgagctggaaagccgtgggcctggcccctcttgtgctgctgccggagccccagatctttaccacctgcttcccttgctctcagcaggagcctgtgtgcctgccagtgtccccaggggtgactcagagtggcctgtgtttggggcgtgtgtctctggagctggtgttttaggtcaccgcccgggcaaggcgggcagtgggaggggccgggagcggctgctcctgggagggttgtgggtgtgccccgccccgcccttccgtcgaaggcccccgttggccccagccgctggttccctgtggctgctgctggtggggctctgggggctccttccccctgggccaccagccctggcttggaaccacagcacctgccctccgtgcctggagctgctcaggaggtgggaggtgaggggcaggaggccacaacagccggtgaggcttgggagcgggcctgggtgtcggtggtggcagagcttgactctgcccccttgtttcttcagtccctgaatatctccatgtttgtttggctgcctccgtctccatgtctccaggcggatggctctgtgtgagtctttgggcctgggtgtgcatctgtgggtctgtgtttggagttccctcctagcctggccttctcttcgccgtggcttcccacttgcgaagctgtgtccagtatttgtttcctggtgcggagtctgggaggccacctgccgcagctctgactgagtctaggctcagtccttctcagggtaccaggctgtgggcagaggggagacacctagatgtttcgtgctgtgtctagatttggagacacaaatgatgactggtctttcccaggggctcgtttggaggaaggggtggctggcagcacttttgttccgcatacagagcgggtgttggaatccattgcgggtccttggcctggtctggccctggagcctcggcttcctgtggtgggtgggagccaggcatccgggttatccctccaggcctgggcgcctgggacccctagggagaagagcgggcgggcgttttgaacagaatgtccggcattagttgagccatttctggactaccttcggcccggacgggaacgtggtgctgagatttccagagctggggcagccttaggcagttctcagcaccggcctctgttttccatcttgtctaccccagagatgttgaccagaggcccgggggcagcaggaggtagaaggttcatgcggaggtgttgggcccttttcctgctcccccaggaagtcctcatccgcccctgcttcagtcacggccgggtagcagccctggccctcccatggccacggggactccggcctgttcatggcgggagagagagggcgcggacagggcgggcctggaaggaagggctggcctcagtcccctctggactgctggtgcctcggccacactgagcctcacacgggtgcgtgtgggctgcgagaagtgacacggtcctcttggaagtcccactggagccttgggatgaagctgccttggagtgtgcgtgggcgccatcccgagggggagcttcctgtgcctccgagcgtgcgtgggcgccatcccgagggggagcttcttgtgcctcggagcgtgcgtgggcgccatcccgagggggagtttcttgtgcctcggagcgtgcgtgggcgccatcccgagggggagtttcttgtgcctcggagcgtgcgtgggcgccatcccgaggggagcttcgtgtgcctcggagcgtgcgtgggcgccatcccgaggggagcttcctgtgcctcggagcgtgcgtgggcgccatcccgagggggagtttcttgtgcctcggagcgtgcgtgggcgccatcccgaggggagcttcttgtgcctcggagtgtgcgtgggcgccatcccgaggggagcttcttgtgcctcggagtgtgcgtgggcgccatcccgagggggagcttcctgtgcctccgagcgtgcgtgggcgccatcccgagggggagtttcttgtgcctcggagcgtgcgtgggcgccatcccgaggggagcttcttgtgcctcggagtgtgcgtgggcgccatcccgaggggagcttcttgtgcctcggagcgtgcgtgggcgccatcccgagggggagtttcttgtgcctcggagcgtgcgtgggcgccatcccgaggggagcttcttgtgcctcggagtgtgcgtgggcgccatcccgaggggagcttcctgtgcctcggagcgtgcgtgggcgccatcccgaggggagcttcctgtgcctcggagcgtgcgtgggcgccatcccgagggagagtttcttgtgcctcggagcgtgcgtgggcgccatcccgaggggagcttcttgtgcctcggagtgtgcgtgggcgccatcccgaggggagcttcttgtgcctcggagtgtgcgtgggcgccatcccgagggggagcttcttgtgcctcggagcgtgcgtgggcgccatcccgagggggagtttcttgtgcctcggagtgtgcgtgggcgccatcccgaggggagcttcttgcacacgtcctccgcactcttactctccttcccccaggagcaagcatgttttctcgagtggtgtcaggactcccagcagccatgggggctcttgcctcggccatacctgcactaagggaggtgggcttgatgtctcctttccctctcagaagtgggtcccaaaggaggcttctgtgcctggagctgggcagtgttggcggaagggagaggccagacggagtgacctgccttgggcacgagtcacgctgctctgagcaaggtctcggcctcagcggcattctcacccagttactgagcgcctctgaagaggtgtggagagcagagtccggcgtctggcccgcggcagccaccggggagcccgtgggtgtagcgggagagccgcagcccagccggtgccggggttcctcctctacgggccgccgtgggaggctgtgtgcgtgctggggagccggggctctgctccttcgagtggccctgctatttttcagatgggactcgtctcgtctcggggtactgtcctctctccttccttccctccctgcaggcagggtgggaatcacagggtggctgtgtgtggtggggccaggccagtggccctgtgtatgaggaggctgggcagggggagcacagccccgtctccccgcgccccgcgccccccgcctccccgccgaccgtggtgctctcgggtttgactttggtctctgggatgggctgttccggagtcaccccgctccagccaggcctcgtcaccttacaaggctgtgggtctgggtgcccaggcgtcgccacctcctccgtcctctctccccggcctggctgggtttcagaggagcccttcttcacgctttggccctgggacaggagaagtgggggttggtggggagggcgtgcagtgtggtgccacacgtgtccaccctagcagctctgggctgtcaccgcccccgcgtgcccagactctgcccacggggctgtcaccgcccccgcctgcccagacactgcccacggggctctcaccgcccccgcctgcccagacactgcccacggggctctcaccgcccccgcctgcccagactctgctcacggcatcacgtatgacaagtccagcagcagacgcgggagcctcacaacctgtgagagccttcgggagtcaggagtgtcttgcgggagccctgtgcttcctggcctgcctgcccctgcccctgcccctgcccctgcccaggccccggcttaggccacatcagcagaggtttcgtgtctgaggtcagagggggactggcagccctactgtctggtcactgtgggagagctgagttcccttttggacacaggtagagcccctcctgaggagacggggaggctcccgcaggccttccgggaggtggtggaaagctccggaagcaggtgaagcggtggagggagggactgagttgcccgagtgctcctagactctcccgcgtctgcattcgggaggcaggttgtagctggaggcctggcccccagcctagtgcaaggccctaggtgtcccccggcacccccgcacctctcagaactcctggaacccagccgaggagtgaaatcaagtggccagaagaggactggggccccggccttgccagggaactgaggggtgaggaggaggtgtgggcggggcgctggccccacagacctgaaagctggcgttgggtcccaggtctgctgggatctttctggtaaccgtggacaggtcatgttgcctgctgcagcagcttccagcgtgcctccttatttgcaaaccatagggaaagctgcctgacccacctagagagttgtgggtaaggccgtgtgcaaacaggcctgtacggggcatggtgggtcacgggggctgttggggaggagggccggtggcacacagcctggtcctgaggcctgagctccatcccccttctgccacagtggccagggtgtgaggagggtcccagtgccggggctgccccgccacgcctggcgttcaccgtgccatctctgtcgcgcagggccgagaactactggtggcgtggccagaacacacggacgctgtgtgtggggcccttccctcgcaacgtggtgacctccgtggccggcctgtcggcccaggacatcagccagcccctgcagaacagcttcatccacacagggcatggcgacagtgacccccgccactgctggggcttcccggacaggattgacgagtgagtactgggcggggatggatgctgacctggccccgctcgggactccagggccctcagcacggcacgcgtgggcggaatctgctcttcaccctttcgcccgggcttcagcccccgacccgccactctcccctcctcaccctggccttactctcgggaagctgtggaaccctaggaagcccagcctggtgggggttctccaggggaatgttctccaggggagtgttctccaggggagggttctccaggggagggttctccaggggaatgttctccaggggagggttctccaggggagggttctccaggggagggttctccaggggaatgttctccaggggagggttctccaggggagggttctccggggagcgttctccaggggaatgctgtccctgccattttcaagctttggggggccgatctcctaactctgagacacttcatctgtgaaacaggttcacccccccaataaggggaaggctgtaaatgcactctgaattagcacttgctgctcagatgcaggggtcctgagagaagctttcccactcactgtagatgaaagtagggtcaggagcttctgaggatggactcctgtttggtggaaaggtccccggagccacagctgtaacccctcttggtactcgggccttaggaaaatgaacttgggaggaacccggtgggagctgctgaggaggagagcttctcccatgacccccctgtggccccctgtgaccctgtgaccctgtgacccctgcacacgagcagtggttttccttctcctgctggtggtgccagagtcctggagacgtgaacctgctggctcaggccctggggatgtatgcaggtccacatgggagtgagcctgctttccagaaccagagtgggactggggaccttggggactgcagagggaacgttaggtggcagctccgcctccccaccacacagtactctacggagctcactccatacctgggagaggccctgtctcctatgtaagaggataaggccaccgaggggcatctgggaaggacacgcagaatcagtcacttccgggatgccaccccccaccccccgaagcttcttgcgccaggcctccaagcctctctgctggccgcagggggattccaggcccctggcctctgcagcccttctcctgctgacttctgatactctggtctgccctgagaggcgtggaaagcaggggccttcacccaccgggccccacacaccagaaccccacacagcgggcccccacacaccagaacccacacagcgggcccccacacaccagaaccccacacagcgagtccccccacaccagaacccacacagcgggcccccacacaccagaacccacacagcgggcccacacacactggaaccccaagctcacagggctcagcccatgtgttttgcctaaaaagaacccagcaagggcctgagagttggggtgaaagactgcagacacctccaggagaggctggtgccctctgccccactcctggcatgctgtggccagcccagccccattcctccaggctttaatcagccccagtgactaagtctcagatactgacagttggtgcagggacggagggtggatccggagcaggacaggtggcccagcctctcccgcacctcctggccatgtggcagaagggtgcctcctgcccaccctggctgggcaccatagctgggatgccccgttcttaggccctccatcgtggcctgcgggacaggagtgtctgccctctggccgctgcctggtgtgggctgggggcctggggggttgtggaggaccacctctgcccttgtagggtgtagttggagtccctgaggtcctaggctttccatcctggggtcaggtgtcctttctctgccttctctccaggacaccccccagctgagacgtgcggtcaggttctgtggactgggaggcgggaggcctgtgcttcagacccaagactacacccggtttcctccaggacgaaggggctctgatgagattctgccacccctccacacgcttcccctgctctcttgacccagctctctcccccacagactgtatctgggaaaccccatggacccccccgacctcctgagcgtggaactgagcacctcccggcccccccagcatctaggaggggtgaaaagtaagagcccctctgctccctggtgtccctaactcatcggctactcaggaaggggcactgtcttcacaggccaccctaaggctgctgttctgtttttggggacagtggggtcagggcagcaggcgggacagctgtgtccctggctccggctgggcgtggggtggaagacaggcagctgtatccgccgaggtgggcctcctcgggctgggtctgcagcaggcccgtccgccccggcgtccctcctccctccttccacggccgagctcagatcctggctttcctcacttccccctaatcctgctctcctgtcccaagccaaaaccaccccacggctccggctctgcctggggcctcctccatctcccggtcctctgcctatcatactggaccgccgtgttcctcatcctgccgcctgcggcctcccgtttgctgggggcttgtacattcactcgcccccattcacttctctcccttcgtctctctacactctgccctctcgtccggccgtctccctcctttgtcctctgtcctgctccgtctctctccccctgtccgcatggcctttcttgcaggggagcctccacctcgcccacctcagcctgccttcttcactcagagtaagtggggctgcttccgatgccttggcccccgcccccgccccctctctctcactcctctcctggaaggtacagagcctgggcggctgggccggaggggaggtgggtgggtgtgtgctgtgagcttccgcggctgccctggcctagcatgcctgccccccctcgagcccgccccccggagcctgggcttctgctcacgagtgtggccctggcttccgcctcggcctcactccctcccagacctgtctgagcttctggagcacgagtgtggccctggcttctgccttggcctcgctgcctcccagacctgcaggcgctgtctgggctttgtggccgttggtcaggagtactgtcctctccaaggatagtccttatagcccctgatggcaggaggcggctccgtgcctgcactaatggtgtgccgtgacaggggcggggatgagggctcactaactcgccagggcgcaggagcagggccgccggggtcttgtgctggtggaggcagcgtcaggcaggagccagtgttgcttgctgcagcttagacggagcgaggcggggctcaccggcccacatggggctgccgggcagagcaggttccgccctcctgatggagtggtcggaggtgcgctgagaacctggccgccggtggctgacctcagacctcggggggagttgggagtggagggttgctgggggacacttggctttctctcccacgtgccacctcccctcgtgtcccagaccctgcctgactgccttcctgttgggctctccctttccatcacagaaccaacctatgaccctgtgagcgaggaccaagaccccttgtccagcgacttcaagaggctgggcctgcggaagccaggcctgccccgagggctgtggctggcgaagccctcggcgcgggtgccgggcaccaaggccagccgaggcagcggggctgaggtcacgctcatcgacttcggtgaggagcccgtggtcccggccctacggccctgcgcgccctccctggcgcagctggccatggacgcctgctccctgctggacgagaccccgcctcagagccccacgcgggcactgccccggcccctgcaccccacgcctgtggtggactgggacgcacgcccgctgccccccccgcccgcctatgacgacgtggcccaggatgaggatgactttgagatctgctccatcaacagcaccctcgtgggcgcgggggtccctgccgggcccagccagggccagaccaactacgcctttgtgcctgagcaggcgcggccgccccctcccctggaggacaacctgttcctcccgccccagggtgggggcaagccgcccagctccgcacagaccgcagagatcttccaggcgctacagcaggagtgcatgaggcaactgcaggctccggccggctccccggccccctctcccagcccggggggtgacgacaagccccaggtgcctcctcgggtacccatcccccctcggcccacgcgcccacacgtccagctgtctccagcccccccgggcgaggaggagaccagccagtggcctggacctgcttcccctccccgggtgcctccgcgggagcccctgtcccctcaaggctcgaggacacccagccccctggtaccacctggcagctccccgctgccaccccggctctcaagctcacctgggaagaccatgcccaccacccagagctttgcctcagaccccaagtacgccaccccccaggtgatccaggcccctggcccgcgggctggtccctgcatcctgcccatcgtccgggatggcaagaaggtcagcagcacccactattacttgctgcccgagcgaccatcctacctggagcgctaccagcgcttcctgcgtgaggcccagagccccgaggagcctacccccctgcctgtgcctctgctgctgcccccacccagcaccccagcccccgccgcccccacggccaccgtgcggccgatgccccaggctgccttggaccccaaggccaacttctccaccaacaacagcaacccaggggcccggccaccacccccgagggccactgctcggctgccacagaggggctgccctggcgatgggccagaggcgggccggccagcagacaagatccagatggtgagcacccagcctggctgtgggcgaagcggggcagggcccaaggggcctggagcagtgggccctagtggtgctgacaggggtgggtgtgcccagctgcaggccatggtgcatggggtgaccacagaggagtgccaggcggccctgcagtgccacggctggagcgtgcagagggctgcccagtatctgaaggtaccgccacctcctgctcactctggctctcagggaccctgaagcctggttctgctgcccccagccccacgccccctggctccgactcccctcttccccaccctagtcggtgccctgggcccgcgtgtccatggcgccacccttacccccaggtggagcagctcttcgggctgggtctgcggcccagaggggagtgccacaaagtgctggagatgttcgactggaacctggagcaggccggctgccaccttctgggctcctggggccctgcccaccacaagtgagtgagccccacagtctgccccgctccgtgccccaggagggctgtcccagagcctgccacactgggaggaagcccaacacctcgcaggccgctcccggccagggagacacagctctccagctgcgggagggaggcgctcacagggcccagcaaatcgtttttcctaaatgtgtttatttggacattttagccacttggttttcaaatgagtacaagagggaattggagcctctctggttgaaggaggcttgcttccctagcacctgcagtgaccctgagcggctccaggaatggcactttttaggaccccatgatttgcacacctctttctcacctctgtgtttccatatttctgtttaaagtaacatttaaaatttcagtgttggctgggcaccgtggctcatggctgtaatccccagcactgtgggaggccaaggagggaggatcacctgaggtcaggagttcgagaccagcctggccaacatggcgagaccaggtctctactaaaaatacaaaaattaaccgggtatggtggtgggcacctgtaatcccacctgctggggaggctgaggcaggagaatcgcttcaacctgggaggcggaggttgctgtgagctgagattgcaccactgcactccatcctgggcgacagagggagactgtctccaaaaaaaaaaattttctctaaaaagaaaatatattgtctttcctgtaaaaggtttatattatagtttaacaaaatatatagacatttaaaatatatacatatataaacacactttatatattatgtaaatatatatatgagagcgctgtcaagtcaaaaagaagtgaactgaggtcacatggctggagccagcaccatggcaggaggcactggcgggaggaggggctgacacgggccaggccctggagatacctgctgcccttgtcccagcagcgtggccctgtgcacggtgcggagtttctccacatataaagcgtgtagataatagtgctcaccccgtggaagggactggcgcgatggatgggggacatgtctgtcttattgcgcccagcacgcctggcgccaggatgcaggcactccgtgtcacctgtctgtcccatactgtctcgggtggttcttactgatttgcagctgggatgcaggcactccctgtcacctgtctgtcccatactgtctcgggtcgttcttaactgatttgcacctgggacgcaggcactctgtgtcacctgtctgtcattgtctcgggtggttcttactgatttgcacctgggacgcaggcattcgctgtcacctgtctgtcactgtctcgggtggttcttactgatttgcacctgggatgcaggcactccgtgtcacttgtctgtcccagtctcgggtggttcttactgatttgcacctgggatgcaggcactcggtgtcacctgtctgtcccatcctgtctcgggtcattcttaactgatttgcacccgggacgcaggcactctgtgtcacctgtctgtcactgtctcgggtggttcttactgatttgcacccgggacgcaggcactcgctgtcacctgtctgtcactgtctcgggtggttcttactgatttgcacctgggacgcaggcactcgctgtcacctgtctgtcactgtctcgggtggttcttactgatttgcatctgggacgcaggcactcgctgtcacctgtctgtcactgtctcgggtggttcttactgatttgcatctgggacgcaggcactcgctgtcacctgtctgtcactgtctcgggtggttcttactgatttgcacctgggacgcaggcactccgtgtcacctgtctgtcactgtctcgggtggttcttactgatttgcacccgggacgcaggcactcgctgtcacctgtctgtcgctgtctcgggtggttcttactgatttgcatctgggatgcaggcactccgtgtcacctgtctgtcgctgtctcgggtggttcttactgatttgcacccgggacgcaggcacttgctgtcacctgtctgtcactgtctcgggtgtttcttactgatttgcacctgggacgcaggcactccgtgtcacctgtctgtcactgtctcgggtggttcttactgatttgcacctgggacgcaggcactcgctgtcacctgtctgtcactgtctcgggtggttcttactgatttgcatctgggacgcaggcactcgctgtcacctgtctgtcactgtctcaggtggttcttactgatttgcatctgggatgcaggcactccgtgtcacctgtctgtcactgtctcgggtggttcttactgatttgcatctaggatgcaggcactccgtgtcacctgtctgtcgctgtctggggtggttcttactgatttgcagctgggatgcaggcactccgtgtcacctgtctgtcgctgtctcgggtggttcttactgatttgcatccacataggctttgggctctatcccacctgtcgtcttcggattctctaatacgcaggagtgctcttctgttagtttactcatagtttattaaagtacagagaaaagacatccaggatgataaattttacagtccttgccggggactgccagcttccagtggtgttgcctggcaccagtgtgacccccggtgcctgccccgctgaaccttctgtaaactgtttaactgtgctggtggtttcccattctctaggcgctgagatgcgtctggagagccagagggcctgcctgaaggaatcacctgagcctgtccgtccaccaggagtggggagatgcccccatccagtcctggaggacccgctgctcctgctgctcccggggatggagcaaggccaaggctgcgggaggctgggagccctgccctgcccatccctcctgcaccagcgctgtccctgcacactttggttcagtcccggtgcccctgccaagatgtggaaggggccgggtgaagacaggcttgagggctgccccagcaggctctgggtatgacctgcctctggccctggtcctgggcggggcctgtgggtggagtagtacccccaggccctgccctgggtgacagactgggaggaaaccaggctggacctgggcaggcgggatgtgttggccacagggagaggcggaccggcacccggtgggacctcctaggactgggccttcttccagggggcccctggcagcagctggggtgtcgggcagaatgtgacttgtggccttaccatggacttgaatgggacttggctggcctcaggatcttgtgcctggaaatagcctgaggtggctcaggaagcggagaaagggtgccagaccattctctggcggggaccagggcccaaggccccagggctggaaggagaccaaggggcagccgccctggagggacatcagtgcttcctcttccacccaattcccccacgcggttccatgttttcccaccagcctgttggcgaagttgctgctccggcattcagtacctgcttcttccagagaaataaagttagtttctattttatgtta

SEQ ID NO: 15860 - DNA, 32824 bp, Homo sapiens
atgtttttagtctggggctccttcctcatgtcagctccctagtggcagagcagtctccctcggtgtctctctggccaccatgatcagtgtcacggacacatcccagcatagccccagttctcaaccgcatggcagggaccgtccaggagttggtgaggaacagggtgggagggaggaagggagcaggagacctcactctttcctttgaacctaaagctccagataatcctacactagaggtgcatatggggcatggctctggcttcttgagggaaactggagagatggggggctggggaaatggggggctgtgctgccctaggagcaggaccaaccagcgtggaggcgctttgacctctagctttgtttgatttggagcttgatttactggaggggaagtttgctctaaatcagttgtttgcatctattgaccaataaaatctagttagtcctgatgcttcctgaagcagggcccctggatttggcgttgcttttttgtgcctcagattttttttttttttgaggcaaggtctggctctattgcccaggcaggagtgcagtggtgtggtctctactcagtgcaacctccacctcccaggctcaagcgatcctcccccctcggcctcccgagtagctgggattacaggtgcgtgccaccatgctctgctaatttttctattttttttgtagagacagggttttgccgtgttgcccaggctggtcctgaacttgggagctcaaatgatttgccctcctcagcctccaaagtgctgtgattacaggcatgagtcaccacactcggtctgtgccttagactttagagtcggaaagctggatttgaatcctggcttcactactaccagctgtatggcactgaacaagtcacttggccatgtagaacctcagttctgccacgtgtaaaatggggatattatgtgtctccttgggttgtcatggggttggatgagaagaatgcgaagtgcagggccttgcacagttgggctctgtgagtcttagcaatggccatgactgaggcagcgtgagggagactgggagaaaacctcctcagtttccttctcccaaatctgttgtcttccccactttctttcctgaagccaggcgacaggggggtggtcctggcccagcctcctggctccctggggaagggctgccattactggcagtgttagataatttagtagaaagttgccctgcccacctcgcaggcaagggaccgccacccaaatccacccagactgggcctcgtgtaggtttccagaagccacccctttctcattgccctactgcgctctggccaagtccctggggcccattgctggacagtgtgagcgcagaaagagccagccctacacagtttccgatgtgtctgatcttgccacctaccgtgaactgttttgttattacatccattttctagatgagggacagtaacaagggctgagtggccctgagcccttgggctccacgcgcccgctgcccagggctgcctccgtttgggctgggacatgggtctgtgggctgggaacagggcctgcaggctgccccgccgctgggaatccgagcgctgggttttctccttctggggtgggggcagggaggagacggctcaagtgcaggaatgaaggtccgcttgcctggggctgtttctgcccaagtcctcatcaggaatcgtcaggcctgagacaaaccctccctccttcaggagtgctccgttggccccggggaaagagaggtgatggtccgggtttctgggcctttggggtgccacggtgagattgggactagaaccccagcctcactggagtgaccccagaaaccttccagtccaacctcctcacttcaactgaggttggaacaactgagaccgggtggaagtgacttttacactcgcacagtgcaacggtagctactcggaatgagagacctgttccggcgctcctccattgcgcccctcgactcggcgggacttcttcacccagggcgccaccgctcctcggcaccgcaggaaggcgcaggccgggcccgggggagtcggggagagcggggtagggccccggaggctgggggaggagccgggggaggagcgatgaggccgggccctttaagagggcgggccgactcccccccaccccccaccccggggcggcgcaggcgcaggcgcaggcgggctcggggcgctcggcaggagggacggcgggcgggcgctcacctgcgggggccggcgcggggcgggcgcccggcgggccgacgttgacgcccggaggcgagggcggggaggcgggcgcgggactcgggggcggcccggggcgggaggggagggccggggcgggcgggcggtgtgagcgggcgccgagggcagcaccatctggaggggtgggagcgcgcggcctctggggggcaagcgagtgcgctgggccgagccggtcgggggcccccggcgggtcgcgcaggaggagcgcggcgggctgagccctgcgctgccggagcagcagccgcagcgcgtaggggttctcagctggggcccgcagcagctccgcgggctgaagctcggcgtggaggagcggggcggggtgggcccggcggtgcaggaggagggcggggtgggcccggggctgcaggagcgcggcggccgcggccacgagcccagccggggggtggtgtgggggccgccggacggcgcgggctgggggcgcccgccgtggtggacgggctcggcgggctggcctgtggcgcaggaggaggggctggggccccgcgggcagcaccaggagaagggcggaggcagccccgcagtgcaggagcgcggcgaggcccgggccggggtgcaggagcgcggggaggggagcccgcggaggctgctgcagcagcccgaaccggcgtccgagtccggggaaggcccccgcgagcgcagggaggggccggaaagttccggcgaactgggggagcggcagtgggagagcgtcgggcgggaggcggtggtcctgggagcggccccggcgccccgaagccgccccgagctggtggggagggcccggccggtggggccccgggggcctgcgggggaggggcgcctgggggtgcaagaggcgaattggctgcccggggtgcaggagggacaggtggtgcgggctgtccaggaaacctacctgaacgggaaggagccccaggagggagagggacccggcgaggggctcaggacccggaggcgccggcggaggaggaggtggtgactggcaggcccgggccccacggtacctccggggctgaaggggacgcaggatgtaggggcatggggagtcgggcgcagaagagtgcggggaaccgctgagctctgggagccactgcctgagggcaggccgcggccggcgggaacctcttctgccgtctcagcctgggcgtcgctgaagctgtgtctgcggggaggcagcggaaggcggcaggtaaggaagcccagtcctgttagctggagttggtgtgcttggaagtgagaggctgcaggtccctggcgagagcgtagactccacactgccctcgttcttttggcctttcatccctggagggaggaagcagtgcagttttcagcggcaaggcaggacctctcccccgccagtactgtgtatggtaattggagtgatagggcatcttcttagagtctaggcagcaggcgggacgtctgggtggctgccaggtctgtgcagagggaagagaggggtagccccagggaggagctgcaggacggtcccccctccacctgccccccgatggcagtaggggtgcctccatgctatatgctctgcatggtgcagtcaacacacaagtcctcaaaacacgtcccacagaagggaagagggcagcgtgggattaacagaaccttatcttgtaaccctgttggtcacgtgagctgagatgagtgtgacagctagtggcttgggtacggcacgagcctggcccgcttctgccacgccgtcctgtcacagctgatttaccctgagggcccagagccaaggatgattagtgggcggaaggagggagagcaactggtgagccctctcgtctctgggtgggacgacccagcgttagaggggcgggagaggagggtgcacttgcaccccagggctctgggctgcctctgtggccccaccctggggaggtttgcagatgggccgctgtggtatcatgggctctgcacctgtcaggacaggagctcccagcccagtctagaggtagggcttgtaggggccaagggtgggggctgtatttggcttgttgactccctcgtggcctgagtgccagacctactcattccgcctcgtgcccccagggggcttggcgggctgcttgtgggccttactctcctagagctgttcgcctcttacctggcactgtcaggtgcttgcttcccctgcccctgggtggggatgggtgcagggttgctgcttgcccagggccttagctagaggaccctcctctgccccagcccgaggtgtggctgtgagtcagatggacccagacccctgtcccgaaccagactgggtgctctcctctgggggcagagggagtggtgctggaggtagcagctgctggaggagccggttagcccgctcctcagacaaactcaaacccgcctgtcagcttcatcccatgcctgtcgcgctgccacccaaacactcatgcaccggaagttcagctgctgtgcccacggtgcctgacgcttctggaatggccagagtggctctcactgtctggcttcagtggagagaacggtctgttttaaacacatacacacaatcttcacctacttatttcaggtcggcgtttttgaacttgtggtagatgaatgggagaaaggccttggcatcacacagattgcttttgatctggttatatcgcttacaagctgtgtaacttccttgggcaacataatgtctttaggtttcagtttcttggtgtctgcggtgggccaggacttcccctgcagtgtcgtgagtaaagaaacctcaggccctttggagcctggtgcccacctccccggagccccggcagatgttagggaggaagggtcagactgttccctctggcccctgagcccgggattagcccccaccttgtgcttcgtctagaagatgcagtgtttctttttgtttgttttaaataacagttttattgagatataatgacatatggtaaactgagcatatttaaaacacacaatttaataagttgtggcctgtgtatatacccgtgaaaccacccccaccttcaagatagtgaacatcccccttattcccctgtccccagaagttttcttgtggaacccctccatcccccgctcctctgccatcccctaccccaggtaacaggctggtctactttctgtcactgtgtctgagtttgcagcatttactgtaaacggaatcgcgtctttcattcaacagaagtattttggagtttgtccaggtggttgcgcgtatcaacagtcattgtacacgtgtgccaaagtctgtttatccattgacctgttgatgggttttcagagaaagctgctgtgaacgtgtttgttagtctttgtgtggatgtacacttttatttatcttaggtaaatccctaggaccggaatggctgggtcatgtggtaggtacacatttaacctttaagaaactgccagactgttttccaaagtggttgtacattttatatactcatccactgtgtatgagagttctggtttgtccatgtctttgatatgtccacatctcgatgtggtcagtctctaattttagacactctcatgtctgtagtggtatctcattacaattttaatttgtatttccttaatgactcatgttgtcgggcatcttctcatgtgctcatttgccatacgtatgtctttggtgctgtgtctgttcagatcgtttgcccatttttaattgtgtagggtttttcgtgttgagttctgaagagttcttgatatattctggatataagccttttatcaggtatgtgatttacaaatcttttttccagcttgtggctttgtattttgatcctcttaacaatgtcttctaaaaaattctcatgatcagtagtgcaaaatgctgtgtttttgaagagaagttgtaaattttgattaatttactaatttgttactttgtggattgcatttttggtgtcatgtccaagaaatctttgcctgacccaaagtcccaacagttttcccctgtattttcttgtagacattttatagttttgggctttacattgagatctaggattcgtttggggttaatttttgttacgtggtgcaaggtatgaatcaatgtccagttttttgcatgtagagatctaattgatctagtagcaccatttattaaaaagatgtatctctccactgaattgcctttgaatctttgtcaaaaatcaattgctggctgggcacggtggctcactcctctaatcccagtgctttgggaggctgaggcgggcggatcatgaggtcaggagttcaaggccaagctggtgaacgtagtggaaccctgtctctactaaaaatacaaaaaattagccaggcgtggtggcgggcacctgtaatcccagctactcaggaggctgagtcaggagaatcgcatgaacccgggaggcggaggttgcagtgagccaagattgcgccactgcattccagcccgggcgacagtgtgagactccatctcaaaaagaaaaagaaaaaaatcaattgtttgtgtgtgtctaattctggattctgttttgttccattgatctatttgtctgtctttatcccagtatcacactatcttgattactgtgggtttataaactatagtaagtcttgaaatcagggtaagatctcaaacttggttttgtcttttcaaaattgctttagctattctgggttctttgcacttccatatacattttagaattagttagtcaatttctacaaaaaagcctgctgggattttgattgggattatgatcaatttggggagaattgatcggttagcagtattgagccttctgaccatgaacagtgtatatctctgtatttgtctaggttttgtttactatctctcagcagtgttttgtagtttttggtatatcagtcttttccatcttttattgaacatatccttaaatagtacctatttttatgctattgtaaatgatactggtttttcctggtagtattggttttttatttttaaaaacttttaattgtggtaaaatatacataatatactgccattgtaaccatctgcagtggtggtaaatacattcatactgttgcacagccgtcaccagcatccatctccaggacttttctcatcttgtgaaactgaaaccgcacctattaaacagtaacttcccattccctcctctctcagcccctgagaaccaccattttaccttctgactctatgaatttggctcctgtaggtgcctcatagaagtagaattttacagtgtttgtgcttttgtgcctggcttatttcacctcggcctagcgtattcaaggttcatttacattgcagcatatgtcagaattttcttctttttaaagggtaaataatattctattgtatgaatataccactttttgtttatccatttacttggattgctttcaccttttttttttttttttttaaagacaaggtctcactcactctgtctcccaggccggagagcagtggtgtgatcatggctcactgcaacctcgacttcctgggctcaggtgatcgtcccacctcagcctcctgggtagctgggactacaggtgtgtaccaccatgcctggctaatttttttttggaattttctgtagagacgggagtttggcatgttgcccaggctggtttccaactcctggcctcaagcggctttcaccttttggctgttgtcagtaatgctgttatgagatggtaccgttgtttaaactttactttccagttgtttgttgctagtatatgtaaataccattgattttgtattttgagcttgaatcctgcagtcttgctaaattgacttattctagcaagcttttttgtaacttcctttggattttctacatagggcgccgtgtcatctgctaataaagttttacttcctcctttctgatctttatgcctgttgcttctttttcttgcctgattgccctggctggatcctctggtataatgttattgtttttttgagatggagtttcatgcttgtcgcccaggctggagtgcagtggcacaatcttggcacactgcaacctctgcctcctgggttcaagcgattctcctgcctcagcctcctgagcagctgggattacaggcacccaccaccacacccggctaatttttgtatccttagtagagatggggtttcactatgttggccaggctggtctcaaactcctgacctcaggtgacctgcccgcctcggcctgccaaagtcctgggattatgggggtgggccaccaagcccagcctcatctaatataatgttgaatagaagggtagataccttgtttctgatcttccaggggatgcatttagtctctcaccattaagagtggtgttagctggccgggcgcggtggctcacgcctgtaatcccaatactttgggaggccgagatgtgcagatcacgaggtcaggagattgagaccatcctggctaacatggtgaaaccccgcctccactaaaaatacaaaaaattagctgggtgtggtggcacatgcctgtagtcccagctacttgggaggctgaggtgggagaattgcttgaacctgggaggtggaggttgcagtaagccgagatggcgccactgcattccgactctgtcacaaaagaaaaaaaaaaagtggtgttagctggccgggtgcggtggctcacgcctgtaatcccagtactttgggaggccgaggtgggtggatcacctgaggtcacgagttcaagaccagcctgggcaacatggtgaaaccttgtctctacccagaatacaaaaattagccgggtgtgatggtatgctcatgtaattccagctacttgggaggccgaggcacaagaatcgcttgaacccaggaggtggaggttgcagcgagccgagattgcgccactgcactccagtctgggtgacagagcaaaactgtctcacaagacaaaacaaaacaaaaaaaagtggtattagctataggtttttcatatctgacctttaccaggttgcaaaaagctctcttttattcctactttgctgagaggtgtttttttttttttttatgtttgtttttttttgttttttttttttgagacggagtcttgctctgttgcccaggctggagtgcagtggtgcaatctcggctcactgcaacttctgcctcctgggttcaagcaattgtcctgcctcagcctcctgagtagctggggttacaggcacatgccaccacgcctggctaacttttgtatttttagtagagatggggtttcaccatgttggccaggctggtcatgaactcctgacctcaagtgattcgcccacctcggcctcccacagtgctgggattacaggcgtgagcccccgcgcccggcccttactgtctcttaaataacttttcagtaatcccctgtattttagcattgcccttctgacactcacctcttcttccagaggtttccggggctgccagttcctgggcttttgaggattgcaggcggtcagtcaagtgtctctcacgctgggatttgtgattttcttgggtcagctctcaactgccaccagcccatctgctttccagcttccaaagttctgtggtggtttttcctctaccattctccccctccctaggggcctatggcattcagaacatccttttttaattgttgttctggtgaggtttcaggaaggagtgacactgtgtggaatctactgttttttcctggaacccctgtcccttcttcagacttcctcacagaatccatgcattcactcagcgtcagtgaatgacatggtatccactcagcgagtccaatgtgggtcataagacttccgcggggacctccatgggcccgcatccttgtgccaagcagtacagtcgtgaatgggctgaatgctggctttaccttttactctctgggtgctcttggccacctctccagagctggtttccatatttgtaaagtggggataatctggggtagtaaggcaggtttttggtcagccagtgaaggtacactctcagtgaagagctggcgcatagtgtcttcctgaggacccaggctatgacttctgccccttcatattctcccagaaaccagcatcgggtgggcatgtggggtgcatggtgggtgtctaaggaaggtgagaggggagggaggttttcctggtccctctcttcctcctcagcagctgtacctcctgggccccccagctggatgtaacaacattggactcttctgtttccctctgtcccctgtatactgtgtctgccaacattggactcctctgtttctctctgtcccctgtacactgtgtctgccaatgaagcagggcctcttctctggtaccctgaccttggcagggctctccccctaccctgtggccagaagagagtcacccttccgctaacatttgccctcccccagatcctgagcctccatgagcctccattcccgatgacagcttcctggtaccttggaccaggcacgccccttcccctttgagggtcccgggctcttcaaggtcagatggtgagcagggtccagtgggatttaaggtgtatgtcttgaagcaccggacatttctctggctcccaggctctcctgggccctgcggcctgctctaggtgacatgttcccagctcctgggtcttggtgtagacatggtcctgagggaatgagcagtgtatcttgtagactgaatgttcacttcccagctctggcatctcctctccactccttctttccacactccacctccagggccaacaataggccccttcagctctggactcttgcgtagggcttgggggtggggtatggcctgagctggcagcaggcaggatgacgagccgggcagcctctgcccagccctggaagagctctctctgggagtggctagctgctgggagctagaccacatccttccctctgggcccccgtgccgtgacagtgcatgggcaggacaggcaacgagaggcagctctctgcggcactcgtgtcctggcctcggcacctgggcatgtgtggcgtgcatgggagtgagacccagacagctgcagcaatgtgtcctctgccacccactgctgctggtgtctgtgttggggagcgatggtccaggagcacattagggccctcagtgtactgtctctttgtgtcggcgttgacactccggtcttcagctggcggagcatgaaacggtttcacagtactttcaagacttgatacagatggatgctcttgtctccacgtgtcagccccaccaagtccagtcagcctcaggttcagtgtggactgggtcacgctgtttagtcagatcctcacccctcctctctcaagtgacattcccttctccactggagttggaggggacgaggcatagcagggccctgcctggtgtgtctgcctctgcctctgtgctctgccctcccaccctggcacctgcctgttcccctcctctctctcggtgagctgggatcctgacagacccaggcccccttcccatcaccctgtgtggcagcccgcgccccagcaccccttcgcagtccgatgagaaggcaccttccttaagaccaatgtcaggctctccctctgcctgagggactggctgagttgttctggttctgagatggctttgggggactgagttgcttagtgggtctggggtcggagtggttgtgatgacatggacagcccctcttcccagaaaggtgctggcgtctctggattagaaatcatggggggaggcaaagccggggctgggagagggcaaccaggcttgttcctggcacccactgggaaagcaacctggcagcagctcacgggggaagaagcagccaccgttctccagtgttcctcacaaagactgagtccttctcagcagacacacccagggcccctgccaggttctcccttcagggcgacagatgtggacagatggttcccttacgatgtacagaccacagcagaggtatacagaccgctccttcagcacaattatgtgctgatacaaagagttacaggaatagtgaccctttaaggataggaacgtgatggataatttaaactttttaaaattcttggccgggcgcagtggctcacgcctataatctcagccctgtgggcggctgaggtgggcggatcatgaggtcaggagatcgagaccatcctggccaacagggtgaaaccccgtctcaactctactaaaaatataaaaattagctgggcgtggtggcgcacacttgtaatctcagctacttgggaggctgaggcaggagaatcgcttaaacccgggaggcagaggttgcagtcagccgagatcgcgccatggcactccagcctggcaacagagcaagactccatctcaaaaaaaaaaaattattttggctatttttcacatgtattattgtgtagttttactactcatgttttcaagcatccctccaacaaaacagcagagataaccatttgtggctaggaaatgggaatttacagaagagatggcatttgacttggatcttgaggagtgtgtgggagtttatcatgtagacacagtagaagtgtcacagacaaaaaatagctcagacattaaaattatttttttattatttatttattgagacggagtctctctgtcgcccaggctggagtgcagtggtacgatcttggctcactgcaacctccgcctcccgggttcacgccattctcctgcctcagcctcccgagtagctgggactgcaggtgcccgccaccacgcccggctaatttttatattttttagtagagatggggtttcaccatattggccaggctggtctcgaactcctgacctcaggtgatccgcctgccttggcctcccaaagtgctgggattacagacgtgagccaccgggcccagccgcagacattaaaattaaagggcatccggacatggtggctggtgcttgtcatcccagctactcaggaggctgaggtgggagggtcacttgagcccaggagttcaaaattaaaatgagccatggtcacaccactgcactccagcctgggcaacagagcaagacccagtctcttaaaaacaaaaaacaagaagaaccccagagtatgtctagggaagggcaaacacttggcttggctgggacatagagacatttgaagggaatgctaagagagagaggtggggaactaggtgaggagtgcagcccagagggcgtgcgtgccagccaggattgggccctcgaggactgagggaagggcccatagtaacagcaggcagccaggtgccgtggtggactcttcatgacagttttatgatggggattccatttttcccctctttacagatgaggaaattgaggcttagaggttgtttgctcaaaagttgcccagctggagcgtgatggagtcaggatttcagcccccatctgcctgactcctgatctcattgtcaccgttgggaggaagtctgaggcggttgaagcagcccgaccggtgtgtctggtggagaaggtggaggacggaggaggagtcttggttgggggtccgtggtggggtgtggtttctacctcgggtggctagtgttggcttgtgatgttttcagcgggatacaggagcgcagaagcagagtttaaggggtgatgctgagcccagtttggatatgcaatgtgtggtacctgtgcagcctcctggtggagctgccctgtaaatgtctggaaatgcgggtctggagccacaggaattcaggaatggagatagcacaaggtggtaataggagtccctggaggcataggtgaccccagggagcacagcatcagtggagaatagaaggaaacatgagttcaaaagtcttaggaaataccaacagttaagaagctgggggcggggggtggggggggggtgggggggtgagggggtgggcaggcgcagtggctcatgcctgtaatcccagcactttgagagagcaaggctggtagaatgcttgagcccaggagtttgagaccaacctgggcaacatgacgaaacctcatctctacaaaaaatacaaaaattagctgggtgtgatagtgcacgcctgtaatcccagctactcaggagatggaggcaggaggattgcttgagcctgcgaggcagaggttgcagtgagccaagatcgcaccactgcactccagtctagggcacagtgagatcctatctcaaacaaacaaacaaaaaacatgtggggtgaagaggcttcagggctggaccatgggcctagcactgccagcagacacagccttgcctgccctcaggacctcagctgccaggcccccctgggagggagtgggcccccgtgtcctggagatggagagactatggacagtcatggcgtgtgtctgaatcactcccttttctttcttgggccctggccagcctcctccccagaccagtgtgatgtcaggcccagccgacctgaaggtgcagggttgcctggtgcaggttcctctgggatgaggttctgagggcacccagcctggccttgctccagaagcctgggctctgcgcacagaggggtgagttaaggctgactaaacttggtggggctgacatgtggaagcaagataatcctctggctgggggaggagctgtaagcccccctctcctcatcagtatgttcttttttccttcagggcttggagaagaggtaggtggaggtgggagagggcgggctgggaggtagggttggcatatattcctgagaatacggtagattgttttggaaaaatcctcttggccggaaattgcctgtcatgtctgcgccttggtgtggatttgtcacttcgcatgcagttggagaggctggagaggggaatggacagcagagctgggctggtttccagcctcttgtttcctttagctctgcagagtggagatataaagagacaagtgaagagcagagggggtgtacacgtggggtggattctcgaactcctagaggtagtttagatcctgtggatgtcttacgataggatggtactaggacgccagagatttacagggggaggtgaggcagggagaaagcaggaaagggcactggtttggatcagatcctttatccagccagggcaagaagggaggggcctggtattttctgccttgccttctacagtctcccggctttgcagctactcccaagactagtatgtgcctttagctgcagtaagatgccgaggagcttctgtacagcatagaagcaggcgttcgggggcctcgccggcagtcatccacctaccctggtgtgcttggggtgtggaaggggctgtgtgaggagagtgggccgtagagggagcctcacctagtgaccttccagggtctggctcagccttgacgctgcgtggggaggagaggtcacagcatctgtctctcctctgccccaacccagggaaggtgccctgagctcagccctaaatacctggtactaaagagtcagtggctgcttcagatgccaccagaatgagaagcggtgccttggggccccgggggagaggaagagcctctgccctgggacttcctgtgccggcgatggcctcgcgccagtgctgggcgcggcacccccgcgtgggcctgtgttgggcggcttttgagcaggagtccgggccctcgtgtcaccgctctgaagtcaaggaggtcagtgcgtgcccagcgcacagcgcgtgcggcgttgcgggagtggcgcgcggggaaccggccgcgggggcctcggggcgggggcgtggcctgcgcgggaggcgggcgctgggaggcggcgcggagccggctgagcgcagggccgagctgcggggcaggtgggcgcccggcgttctgggagcagagtggccgccggggcaggctgggggcggggtgggctgcagccccgggatgcctcggaggagggggtctcagatggagtcggacggaggcccctctgctgtgggcttctcggatggccccttaccgtgaatacgggggactcgtgaatccccaaggccccagttggtggctctggggccctggaggcgggctgagggctgagtggagcccggttccgcggccggcgaaggcagagccccggctctcggtgggggtcagcccggggctggcacagctggctcactgggagagggtgggagccgcgccccggagaggaggaacggagctgggacgggctgcaggagggaatggccgcaggccggcaggaggaggggcgcgaccacccggccgccggccgatggcggatgaggctatgggggctgagacgcagtagcggccctgcacttctggaggatgctcgaggcccggccccccaggacgcagggcagtgacgctgccggtgccgctgcggggcgggggctgcgggcgctgcttctctccctgaccgcagccgctgggatttggggctccatgggggagagatctgcttaccagcgcctggctgggggcgaggagggaccgcaggtaatggggaaggctaggggatagccagatacctgggccccagaccccttcgtctgctgtgagccgggctcagccctgccccctgcggcggcctcaggagtgagagtgtctgctcctgggccaggggacagagagcggtgtgtttatgtgggtgtggcggtggtgacttagtgatgctggcatctgcctgtgtgtgcatggatcccctgggaccccaaaaagctgcccgttgggctttcttccatgccccaagggagtccaggaagtactgctaggattggggttcagtcttttaggagaactgagtctgtatgtcctgggcattcccgtttactaggcttctgaatatgaatatcaagccagatgtccttgtttgcttttgaaaatatggtcacggtgttgatggatggggtagcttcccttccccttggagagaacgcacttcctctcccgaccggcagagggcagtagctgacaggagaaagggggactcggtaggagcgttggggcttaaggtcgggctgttttcctgggcgaggagaaagggggccgggccgggccgggcgcggtggctcacgcctgtcatctcagcactttgggaggccgaggcgggcagatcacctgagacgaggacgctgaggtcaggaattcgggaccagcctggccaacatggcggaaaaaaaaaaaatagctgggcacggtggcgggggcctgtaatcccagctactcgggaggctgaggcaggagaatcacttgaacccgggatcgcgccactgcactcaagcctgggcgatagagcaagactctcaaaaaaaaaaagggggtgggggttccaggagccggcctggcgctgacccacacatactttgcttcttcccgcagctggattactgggccagttacaggtcttgttcttactggacatccaaggtcaggcatggggttctggtgactttgagacacatatttctggggacgctagagtttttaatctggccattctgatccagcagacccattttgaaatagagggaataaccctgcttaaattgttccccggcccccggtccctgggtctccttccaggtgtgcttggtgccagggtaaggctgtaggcttctctgatgcaagggcacagtcagccaaggtttggggaaaagtcagctccagtgtaacgcaggcctgatcttgtccacctgacctcagcccccactccatccacacctgccatctccacaagctttgtgggctggatggcagggggatgaggaagagggactgaagttgggggtgtccttctccccacctcctggagttagaccaggaaatggctgtcccttttggcatcatcagggaggtcaagtgctgggagaggccctgggaagggagcctgggatgctgagtccccaaagccctgctccccagctgcccacccctccagccagctgaggctccctgagctggtggccagctggacagggacaagagagcagtgtgcaagaaacaggggctccctaggcatggctcagcagggaggggggtgcctggggagctggagagggcttcctgcagctgtcaggtgtgtctgggggccgtagcgaggggggtgtaagagcagctggcaccctttgaggagggccagagagatcatttgtcagttctagaaacatgagggccccacgggggcttgatggagtgtctctaggccccttaatctgaggccgtggtctgtgtcaggggttatacaggagacatcctacagctttggggtgggggcgtcccagcaggagtctcagggcatatttgtttgttttgagcgggtttgggaacttggccacctggtctgagtaggaggcaccctgggtgtttgggcagcagacagggccaccccaggggagggggtgaggatcctcaccccaccctacccttgctcttggctggactgccccactctggcaggctgccggccgcctatttccgtcgggcaccagggtaacagggccacatcagggtctgagccaggagacacccagccaaggctgggactcgggggtgggggagggtctctgaggagtcatcgcagggcccagcggagcctctggggtccaagcctcccactcaggctgtgtgttagtccccacgtccccacacaggtccatgagggagtccacagccctgcttcatacgtgctgtttgagtcacatagccgccaccctaaagtcccaggagttgtctgcaactgtgagggctggggtagaagccagagacaggagctttgtgtatggggaggcaggggggccagcgcgggtggctgggaggaagagtcccccccattcctgccgccctcttggcagtgattcagaaaggtcctttttcagccagtgtcagagctgctcagctggggagggagggagagagggagagagagaggcaggcaagagggagggcggccgggcgggcagttgggtggggaagccggggagtagggctggactgtgaccactgccctggagagaagacagaaacaggacagaggatcccggctgcagccagcgtgaggaaagctctgctccctgccagaccggccagctgtggaaacccagcggggcttgcagcagagcggaggggcccaccccgttcttcctcatttcccacccctggtgtgggatttggggggctcctgggcagagtgcgaagctccggagccgaggccactggatccccagtgactgctcgggggggtcccgctgcgtggagatgccggcagcacgtcggttccctggcctggagctctccttccctctcctggccagactgcggcgacgcctgtacacagtgagtggggggcaggggctggactgctggggactggttgggctcctcagcaccagcacttgactgagaggcagaaagcaagactgggagcggctgagggaccccgccagtgagggcttgacggggagtccgggccaagtggcctctcctgcggctgctgcattccttcttcttggcctgtgtgtttgcacgccggccacagagtagtgacggacacaggtgtgcagactccatgaggtgcgggggccaggaccatgcagaattggagagtgtttgaactctggaggagctgcagccatgccctgtgctgcacaaagaaccttgggctggagggggacttagaggggaggcggacccctgcggagtcaccctggactgagaccctgaccgcttgcctcaccagcatcccggagttccttcccgtcctcccacatgcatcccctgtgcagagctgcgctgttgctgggtcagggagcatggagtgcacagctgaacagaggtgcattagctggtgtttcagggagagggaacaggccgggctgtgctttctgaagagcttcaggggaggggcctctgggtctcccccagccctgaccaccccgggcatggctttgagctgttttcaggagcctagaggagggggcctggatccttgggagttggtggtgggaaaaagaagaggagccctggagactgctctccctgcgggagactaggagcctccatcctgaggctgagccctggagggggggggtcactttgctccagggacagggcagcggtggccgtggccgggtggagaggagacgctgcctaggcccgtgactcctagtgtgcctctgggcttgcttccggaaagccacgacgcctggtcctcttaaaccccacgcctcttgttttgtaaacagatgattttgttgaggataaatgaatacagcttaatacttagaactgttcctcgcatatagtaagtgcagttgaagtgttagattttattttattttgagatggagttttgctcttgttgcccaggctggagtgcaatggcacgatcttggctcaccacagcctccgcctcccgggttcaagtgattctcctgcctcagcctcctgagtagctgagattacaggcatgtgccaccaggcccggctaattttctattttcagtagagatggggtttctccatgttggtcaggctggtctcgaactcaggtgatccgcccacctcagcctaagtgctgggattacagctgtgagccactgtgcttggcctagatgttatttttattgttacttgtcttaaataaagttaatagaaatatataacctgttatattaacatgttaacctgtgtacagtgaaacaagcaacacagtgggaactctaatataaagagacataagaggaaggtaataatattttatgtatcctaatacgttagtaacctagacaatgtagtgaggagtcagatcttgagacctcaggtggaaacaccgtgaaggcagcatctgcaagtgctgaccgagaggggagttttgaaataatgagagggggttgccttcactgacatttttgcaaatagtggacttctgctatgttctgaataaagcaaagtccattttcccttaagtttacacagtagtttcattccaggaaaatttattttatattaaaactgtaaggccaggagcagtggctccccagcactttgggaggccagggcaggtggatcacttgagctcaggagttcgagaccagcctggccaacatggaggaaccctgtctccactaaaaatacaaaaattagccgggcgcctgtgatcccagcttcttgggaggctgaggcgggagaattgcctgaacccgggaggctgagtttgcaatgagccaagatcataccattgtactccagcctgggagtctcactctgtctcaaaaaaaaaaaaaaaaaaaaccaaaaaactataaaagtactttcttatttatatataaagtgggatcatattctaggtttgcatgatcataaacaccttcatgaattgagttgtgtgggatttgggacagtgcgagaatgtcctacgcattgcaggctagctcacgctcttgtcccccaaccacccactgaatgtcactaaggcccccccaaatgttgtggcaaccagaactgtcccatagggggctgtgcagcctcatgagaaccattccagtaaagggttacagctttaagtttggaaaccacccggctggcccagctgcctggcccggtcgccgaggtggaagagccaggatttgaactgagagtttctcattcccctttgttactctttgtacttccctgagctgcctgaaaaagtcggaactggcactgtgttggcagggccactgggaactgtgggggcaggaggctcacgctgggcccaggctgtgtgtgcctgcttctcagtgctgctcactgtgatgggagctggggaggaggccaccgctgagtgggggagggggatggcttggtccccagccgggcagctggccttttttctctcgcctgttcctctttggggattgagcatgggtccggggctagcctggccacgccctcagctctgacacaccttacgcagacagggatgggtttgctgtgcggtgggtccgcttgcttagctttgaaggtgccaccagcttctttatctgggcccaggatagtgtaggtcagaggtcactctccggtaccactggctgattgcggcctgcagtgtgctttggccagcacgctgtgtgtgcgtgtgcatgcttttcagatctgaactattcagcattgttaaaaagtcaggagaaagacgaatattaagtgaaatcagggaacagaatggtatggttaatgcgtgaatattcgtgtagggacaacagagtctgaagcgtccgcagaagacatcactggcaactcctggggagccgggtggctgtgcagctggggagggaatgagattcgtggctcagtgtgccttctgaatattttaccacgtgcatatattaccttttccaaactttaatggtgagatttcacatgtaaattgggatttatttcttgaaaaaatggaaagctttgacaacactgggccacagtttcttctgacaaccattgatgggatctgagctccctgttgacaggggtgtctgcgagcccaccgcaggccccacccctccctcctgtcttccgcttgctgtggccctgtaggcacttgagtggtggcccgtggagtggtctttggattgttaggagaggctggggtggtcaggcgctgggaggaacttagcttagagctcatctgaccctgagagttttctccgtcacatctaaggagcccatagatgggtctcggggcacattgcaccctagagatttttatcaaatattaggagtaagaacacgtcggtgttcccggagagaccactgttagtttttaaaagattttcaaggactttcgacccctagaaacttagagcaggaatgtgagcacaggttgatcttgggtcactcagtcacagatcacatttcgggagcaagaccctgactcctgactccagggccagggctgtatctccgccgccctaattgtgccctgtggctggcaggaataggggacgtgggtccaggcggttctcggtagcttccctcgggagtcagaaggtggtgtgagcccttccgggtggccgtgtagtgggatgaaggtgagcccaggtcactcgggcaggcccctgttgtccccccacaacccttgtccctgagccactcctccccccacagaggctgggaggcggcagaatgcagccagaggagggcacaggctggctgctggagctgctgtccgaggtgcagctgcaacagtacttcctgcggctccgagatgacctcaacgtcacccgcctgtcccactttgagtacgtcaagaatgaggacctggagaagatcggcatgggtcggcctggtaggtgggatgttggcctggcttgtcttgcccctgaccctttccgtcctctgtcctcaggaccactcggtgcacgggtggcagctgagaactctgtcccagagccctgagggagcaggagggacatcagtaggtgctgatgtgtgatgagaacagttggcagttataaaggtgaattggagtttgaggagagtgaggccttccctaaagctggctacacaggagtcactccatgccccgttgtgattgttctcacgtagagtgtatgtcctccattgcccctccttcataagcatcgaattgagtctgttctcatcattctgactaccggggggtccatgtgcagagatctgtagggagaacgctaactctcagatggtttgctgattcgtgctcacgctctctttcttgctctctcacacgcacacacgcatgcacacgcacaggcatacacacacacacacacacacgcaggcacacacgcacatgcgcacacacgtgcacgcacgcatgcacgtgcacacacgcatgcacgtgcgtacgcacgcgctcacacgcctgcgcacacagacacgcacacacacacacacgtgtgtgcgcacacccgcatgcacacgcacggcatacacacatgtacacacacgcgcgcagacgcacacacgtgcgcacacgcgtgtgcacacacacgcacatacacacaggtttgctctgatttgagttcaacccttatcttcatatttttcctaaaagtgggggttgtagcatctaaaagtcatgatgttcttcatagaacattagaaacgtattagggctttcaagttaaaatagctaaataggtaataatgtgtcaagttagacactgacttagttaaaatagctaaataggtaataatgtgtcaagttagacactgacttagttaaaatagctaaataggtaataacgtgtcaagttagacactgacttagttaaaatagctaaataggtagtaatgtgctaagttagacattgatttatgctactttaggcctggatagttggtgtctgatgccagtagcataaaaaaattttacggagggaaaaaaacctcaacattgagaaaattctgttcattaccttgatttttcctgagaactgggagaagcccatcgcttcaagtttttggttaaacaccttcacccagtttgagagccagtgccaggaagtggagtgcagagaccgtcggtcagttgaggctccgggttagttggggttgatttcattgctatcatcgggtgggcggtgtctagtgacaggctcacccccaaggggaccacaggcagcagcctctctcgggctacggcggccttcacagcacgcggttccccgctctccctgcaggccagcggcggctgtgggaggctgtgaagaggaggaaggccttgtgcaaacgcaagtcgtggatgagtaaggtgggtgaggaggtgggtgaggaggtgggaggggggcagcctcgaacgcccccctccgcttctggtcctgggaaccttccccagctccccggcaggtcgaatctcgccgttctgccggcactttgtacaggaccccctcgtccagggtcttatcgggcagggcacttgtagagctgctgggctaagtgtctgtctccgccagatacggacacgtgagcagcctgtgtgcggtgaggccttcacagcccctctcggcacgcctggaacaggacctcattgacaagtgtgccttaacttagccctgctgtgtctgagcgttggggccagtgtccagcgtggggtggtggacctgtctggacccagaacgtctttgcttggcttccctcctccctgaccctctctaatctctgggtttctctggtcatctgtccctgctgacagcttccttccccacagcctgtccccacctctccccacaccttgtcctaatttgggtctgtggtgtagtgagtccctggtctgactcagtggaactttgcccattgtctggaagacaatgagagaggaagtgagccagccgtggtctttcctccccacttctggcttcagggctgggttggggggtgggcagggccgaacagctgcagtgggattgggcagcagagattttcctggctgcaatccggcaaaggggctgtctcttgggatcctttggcttttcctggaaacactgtcctggtcctttgcccgggttttagggaaggatgagtagtgtcgggatggtggaggcaggagaagagagcagcgtggtttgctgagatttaggggtcttggatctgccactggctcctgataggtccctgggcggtcagtggcctccagatttttgttgtgtcttcagtgaaatgataccggtccccactgcccagctcacctcccggggctgcaggaggcaccggagataatggctgtagagggtcttgtaacctgaacattgcttgcaaacataaggaattctagttactgggaggaagcacagggcagaggccagaagaggccctcagatttgaggcaccctagcccagacggataaggatccaccagctctgggggcgtgagacccaagctggcaagaatctgcaatctggagccaaggctgtgggtgcctcagtggaggccgagtcagaccgacgtggccagctttgaccctcatggcctcctttcttctgtcccttgaccttcggctcctccctgtccaccctggcctccgagtctcctccacttttccttccgtctcagccctcagctctaggcgcccctccagagacccagctgtcttcccaggccccttcccagcaaggactagcttcatctgaaccacacacacactcacggttcaacctcagactaaaattatcctctcccctgggcaggatgaagggcagccgactccctggtgagggtggagacagacagcaccaaatggtcaggccagagaaggggccagggctaaaaatggacaaggaggtgtctgtggagggcccctgcggctccatcgatgcgggttagggctggagtctgcggggtggcgggtgcaggaagggagggtggggcaggactgggaggagactccgaccttggctgggcggtgccctccctctccacacagctgggtgtggggccgctcagccacaggctgcatgcctgtcggtctctttctggcaccctccttgaggccagcatcaggctttgggttcatgtttgggggtgtgccctggacggagtgtgggcctccagccaggctgccccactgacagtttggcaaaaccaggacctatctggaagccgaagccggggatcaccaggtggacccagcggggtgggactgagtgactgaccctggggtgttggattccatctggcccccggctgccttcaaacaggtgttcagtggaaagcgactggaggctgagttcccacctcatcactctcagagcaccttccggaagacctcgcccgcccctgggggcccagcaggggaggggcccctgcagagcctcacctgcctcattggggagaaggacctgcgcctcctggagaagctgggtgatggttcctttggcgtggtgcgcaggggcgagtgggacgcgccctcagggaagacggtgagctctctgtgtcctgccagcgcagcagaggcatgggacccggggctggtagtggctcttctgcccccaaccagggtgtggatgggactggggatgcgtcacagtgtggctcatcccagagtccgtgctcaggatttttggggttttatttatttatttatttttgagatggagtctcgctctgtcgcccaggctggagtgcagtaggcacgatctcggcttcctgcaacctccactttccgggttcaagcaatcctcctgcctcagcctcctgagtagctgggattacaggcatgcaccaccacactcagttaatttttgtatttttagtagagacggggtttcaccatgttggccaggctggtctcgaactcctgacctcagatgatctgcccactttagcctcccaaagtgcttggattacaggtgtgagccaccacgtccagcccatgctcaggtttaactaagcacatttattatttcaactataaaaataatttattataaaagtttggaaagtatttgaaaaacaagaaaaaaaaaatcgcctgtaatcccaccactcagaggaagccgagcctcttcctcccactttaggtattttgttggatttagttaagatacaaattctggatacagcttttaaaatcttgttctttcttctcggcgttgcatttaacattttcccctcagggataacgtgtcaccacagcatacagttctggtgtgactgtttcctgtgcagcagccgtgtccttactgctcagatcacgtgcggtgcattcccagcacctcagagggctcctcattctccgtccactcagtgcgtccttctcccggggaagccgctgtcactcagtgcatccttctcccggggaagccgctgtgcagacttccagctccacagctttgtttttggcattacatttacagcattttccttctacagcaaaacaccttttaatattccattttatgaccagcctgagcaatatggagaaaccccatctctactaaaaatacaaaattagccaggcgtggtggcacctgcctgtaatcccagctactcaggaggctgaggcaggagaatcacttgaacccgggaggcagaggttgcagtgagctgagatcacgtcactgcattccagcctgggcgacaagagcgagactgtctcaaaaaaaaaaattccattttataacatttgaatattctctcatcatactggttatctcttactttttggttggtatttaagcccggcattcccccaggaaggggaggtgtggccgacgatggctcctgagggccagccgtctgcccttctccagccaggcctcacgcagagcacgtaagcccaggcactggtgacatgcttacccacccagatgaggagctcacaggcagggatcgttgagccgagttggagggtggagcaggttggctccgcgtgtctgggacctggcaagtcctgagtccttgcaaatcccgctctgggcaggtgagtgtggctgtgaagtgcctgaagcccgatgtcctgagccagccagaagccatggacgacttcatccgggaggtcaatgccatgcactcgctcgaccaccgaaacctcatccgcctctacggggtggtgctcacgccgcccatgaagatggtgagtactgcgggcgggagggggcgggcagggagagggctccggtcccatatgtgtggttcggttcctctctccatcctaaggtcagaggcgccctagatcctactttggtcccccaacctgatggagtaaaggggtccacaggggcccagcctggtacgggctgtgtctgctgcggtccagtccgggtctgtctctggattttgctggtgctcagtgtcaagagagttactcccatgggaggggctggccactgagtttaatttggggaatttatgttttatttatctatttattttgagatggagtctcactttgtcgcccaggctggagtgcaatggcatgatctaggctcactgcaacctcggcctcctgggttcacgcgatattcctgcctcaggcttccaagtagctgggattacagccgtgcgctaccatgcctggctaatttttgtatttttagtagagacggggtttcaccatgttggccaggctggtctcaaactcctgacctcaaatgatccacccacctcggcctcccaaagtgctgggattacaggcgtgagccaccacgtccagctgagttttggaatttctagccactgcctctttgggctccttctctctaggcatcagtttcccaaattgcctcgagggagaggcctgagaaactgcaggactcctagaggtccccagacagcaggccaggaaggtgcgtgcagcctggctctggaaagccttcaggaaggggactgggggcccagcgtgggctgctgagaaggggcagggtcctccagctcattcctcctgcctcctccgtggcctcaggtgacagagctggcacctctgggatcgttgttggaccggctacgtaagcaccagggccacttcctcctggggactctgagccgctacgctgtgcaggtggctgagggcatgggctacctggagtccaagcgctttattcaccgtgacctggctgcccgcaatctgctgttggctacccgcgacctggtcaagatcggggactttgggctgatgcgagcactacctcagaatgacgaccattacgtcatgcaggaacatcgcaaggtgcccttcgcctggtgaggggcaggtgctgccagctcacagagtccctgcagacccaggcctcaaagcttctggggctttctggacccaccacagcccctggttttgcttgggcctgcccttgtctgttctaagcctggggtgccctcctttgcacccattcgctcaccatccatctaggaattcttgagggcccacgtgccagggtctgggtgctggaaatcacagggatacatgctgtgggactctccaaggggctttgctgggtggggtgatacggggatagatgctgtgtcctctccaaggggcattgttgggggtcgtgtttcagggatagatcctgtgtcctctccaaggggcattgctggcgggggggtgttatagggataaatgctgtgtcctctccaaagggcgttgctggggggggggtgttacaaggatagatgctgtgtcctcttcaaggggcatcgctgggggggtgttacagggatagatgctgtgtcctcttcaaggggcattgctggggggggtgttacagggatagatgccgtgtcctctccaaggggcgttgctggggggggtgttagagggacagatcctgtgtcctctccaaggggcatcgctgggggcgggtgttacagggatagatgctgtgtcctctccaaggggcactgctgggggggtgttacagggatagatgctgtgtcctctccaaggggcactgctgggggggtgttagagggacagatcctgtgtcctcttcaaggggcattgctggcgggtggtgttagagggatagacactgtgtcctctccaaggggcatcgctgggggcgggtgttacagggatagacgctgtgtcctctccaaggggcattgctgggggggtgttacagggatagatgctgtgtcctctccaaggggcactgctgggggggtgttacagggatagatgctgtgtcctctccaaggggcactgctgggggggtgttagagggacagatcctgtgtcctcttcaaggggcattgctggcgggtggtgttagagggatagacactgtgtcctctccaaggggcatcgctgggggcgggtgttacagggatagacgctgtgtcctctccaaggggcattgctgggggggtgttacagggatagatgctgtgtcctctccaaggggcattgctggggggcgggtgttacagggttagatgctgtgtcctctccaaggggcattgctggggggggtgttacagggatagatgctgtgtcctctccaaggggcattgctggggggggtgttacagggatagatgctgtgtcctctccaaggggcattgctgggggggtgttacagggatagatgctgtgtcctctccgagggtcattgctgagttaggtgatacagggatatatgctgtgtcctcttcaaggggcattgctgggggggtgttacagggatagatgctgtgtcctctccgaggggcattgctggggggcgggtgttacagggttagatgctgtgtcctctccaaggggcattgctgggggggggggtgttacagggatagatgctgtgtcctctccgagggtcactgctgagttaggtgatacagggatatatgctgtgtcctcttcaaggggcattgctgggggggtgttacagggatagatgctgtgtcctctccaaggggcatttctgtggggaggtattcaaaggtttcctaaaacatcagggaagttcgccagggaaagactcgttggtaagcatgttctagggagagctagtggtagacaggcccaggccacagcaggccttgtagatgggccagggctgcttacctgtgcactaggggtggtacttggccctgccctggcccctgtgtgggcttatcctctgctgagaccattgtggttctctggtgccagaggcacccagaggtctgtgatctgcctgctttgaggcgggaagggttgttccagttctgctttcccaagcggtggctgtgggcaacccttatgatccaggacgcatggtcatcttaacgagcagctggctttacacccagggcgagcagaggtcttaaattatgcccgttgtcctggagtaatttagagcagcctcttttgtattcaggcatcctggtttgcatggtaaggtatgaatatagttgcctttaaacagcacgatgaagtgggcgggttattgttctcatttcaccaaggaggataatgaaccttagcgatctcgagtgactttcccggccccatcccctttgaggggcagggctcgctctgcttccctgtctgggcaccaccctcctctctgcacctcagtccacgccgggatgtcctttctgacctcactgcagtggcacttccccctcaaccgggggtgcccagaacgaatgggtgtatttgggtgaagccagtatgactgtttctacccattttggttcttccccaggccctacccgaatttcccacccactgcttcctgccaaaggacccaaatccgaggatcccgccccaaatctgggaattgtcattctcccaccacagtcagaaaacagcctgtgatcttctctccctgccccatcccagagcctctgacctccttcctttccatgcttctctggctgggaaacttcctttcctcttcccccaccaggctgcaagtgaataagaggcctgggcttagacgatttccccaagtccctgcatcgtgtcgtcaaggggtcctgcccgcttcacacggcgcccctgagacccactgttgaacctggcacagggggtcacaacaagtgtttgctgcatgagtgttttaagtccctggggcggacgcaggtagggtgtttgagagggcttctctttgacccctgcctctgccaggtgtgcccccgagagcctgaagacacgcaccttctcccatgccagcgacacctg

SEQ ID NO: 15861 - DNA, 45401 bp, Homo sapiens
gccccaggagggagagggacccggcgaggggctcaggacccggaggcgccggcggaggaggaggtggtgactggcaggcccgggccccacggtacctccggggctgaaggggacgcaggatgtaggggcatggggagtcgggcgcagaagagtgcggggaaccgctgagctctgggagccactgcctgagggcaggccgcggccggcgggaacctcttctgccgtctcagcctgggcgtcgctgaagctgtgtctgcggggaggcagcggaaggcggcaggtaaggaagcccagtcctgttagctggagttggtgtgcttggaagtgagaggctgcaggtccctggcgagagcgtagactccacactgccctcgttcttttggcctttcatccctggagggaggaagcagtgcagttttcagcggcaaggcaggacctctcccccgccagtactgtgtatggtaattggagtgatagggcatcttcttagagtctaggcagcaggcgggacgtctgggtggctgccaggtctgtgcagagggaagagaggggtagccccagggaggagctgcaggacggtcccccctccacctgccccccgatggcagtaggggtgcctccatgctatatgctctgcatggtgcagtcaacacacaagtcctcaaaacacgtcccacagaagggaagagggcagcgtgggattaacagaaccttatcttgtaaccctgttggtcacgtgagctgagatgagtgtgacagctagtggcttgggtacggcacgagcctggcccgcttctgccacgccgtcctgtcacagctgatttaccctgagggcccagagccaaggatgattagtgggcggaaggagggagagcaactggtgagccctctcgtctctgggtgggacgacccagcgttagaggggcgggagaggagggtgcacttgcaccccagggctctgggctgcctctgtggccccaccctggggaggtttgcagatgggccgctgtggtatcatgggctctgcacctgtcaggacaggagctcccagcccagtctagaggtagggcttgtaggggccaagggtgggggctgtatttggcttgttgactccctcgtggcctgagtgccagacctactcattccgcctcgtgcccccagggggcttggcgggctgcttgtgggccttactctcctagagctgttcgcctcttacctggcactgtcaggtgcttgcttcccctgcccctgggtggggatgggtgcagggttgctgcttgcccagggccttagctagaggaccctcctctgccccagcccgaggtgtggctgtgagtcagatggacccagacccctgtcccgaaccagactgggtgctctcctctgggggcagagggagtggtgctggaggtagcagctgctggaggagccggttagcccgctcctcagacaaactcaaacccgcctgtcagcttcatcccatgcctgtcgcgctgccacccaaacactcatgcaccggaagttcagctgctgtgcccacggtgcctgacgcttctggaatggccagagtggctctcactgtctggcttcagtggagagaacggtctgttttaaacacatacacacaatcttcacctacttatttcaggtcggcgtttttgaacttgtggtagatgaatgggagaaaggccttggcatcacacagattgcttttgatctggttatatcgcttacaagctgtgtaacttccttgggcaacataatgtctttaggtttcagtttcttggtgtctgcggtgggccaggacttcccctgcagtgtcgtgagtaaagaaacctcaggccctttggagcctggtgcccacctccccggagccccggcagatgttagggaggaagggtcagactgttccctctggcccctgagcccgggattagcccccaccttgtgcttcgtctagaagatgcagtgtttctttttgtttgttttaaataacagttttattgagatataatgacatatggtaaactgagcatatttaaaacacacaatttaataagttgtggcctgtgtatatacccgtgaaaccacccccaccttcaagatagtgaacatcccccttattcccctgtccccagaagttttcttgtggaacccctccatcccccgctcctctgccatcccctaccccaggtaacaggctggtctactttctgtcactgtgtctgagtttgcagcatttactgtaaacggaatcgcgtctttcattcaacagaagtattttggagtttgtccaggtggttgcgcgtatcaacagtcattgtacacgtgtgccaaagtctgtttatccattgacctgttgatgggttttcagagaaagctgctgtgaacgtgtttgttagtctttgtgtggatgtacacttttatttatcttaggtaaatccctaggaccggaatggctgggtcatgtggtaggtacacatttaacctttaagaaactgccagactgttttccaaagtggttgtacattttatatactcatccactgtgtatgagagttctggtttgtccatgtctttgatatgtccacatctcgatgtggtcagtctctaattttagacactctcatgtctgtagtggtatctcattacaattttaatttgtatttccttaatgactcatgttgtcgggcatcttctcatgtgctcatttgccatacgtatgtctttggtgctgtgtctgttcagatcgtttgcccatttttaattgtgtagggtttttcgtgttgagttctgaagagttcttgatatattctggatataagccttttatcaggtatgtgatttacaaatcttttttccagcttgtggctttgtattttgatcctcttaacaatgtcttctaaaaaattctcatgatcagtagtgcaaaatgctgtgtttttgaagagaagttgtaaattttgattaatttactaatttgttactttgtggattgcatttttggtgtcatgtccaagaaatctttgcctgacccaaagtcccaacagttttcccctgtattttcttgtagacattttatagttttgggctttacattgagatctaggattcgtttggggttaatttttgttacgtggtgcaaggtatgaatcaatgtccagttttttgcatgtagagatctaattgatctagtagcaccatttattaaaaagatgtatctctccactgaattgcctttgaatctttgtcaaaaatcaattgctggctgggcacggtggctcactcctctaatcccagtgctttgggaggctgaggcgggcggatcatgaggtcaggagttcaaggccaagctggtgaacgtagtggaaccctgtctctactaaaaatacaaaaaattagccaggcgtggtggcgggcacctgtaatcccagctactcaggaggctgagtcaggagaatcgcatgaacccgggaggcggaggttgcagtgagccaagattgcgccactgcattccagcccgggcgacagtgtgagactccatctcaaaaagaaaaagaaaaaaatcaattgtttgtgtgtgtctaattctggattctgttttgttccattgatctatttgtctgtctttatcccagtatcacactatcttgattactgtgggtttataaactatagtaagtcttgaaatcagggtaagatctcaaacttggttttgtcttttcaaaattgctttagctattctgggttctttgcacttccatatacattttagaattagttagtcaatttctacaaaaaagcctgctgggattttgattgggattatgatcaatttggggagaattgatcggttagcagtattgagccttctgaccatgaacagtgtatatctctgtatttgtctaggttttgtttactatctctcagcagtgttttgtagtttttggtatatcagtcttttccatcttttattgaacatatccttaaatagtacctatttttatgctattgtaaatgatactggtttttcctggtagtattggttttttatttttaaaaacttttaattgtggtaaaatatacataatatactgccattgtaaccatctgcagtggtggtaaatacattcatactgttgcacagccgtcaccagcatccatctccaggacttttctcatcttgtgaaactgaaaccgcacctattaaacagtaacttcccattccctcctctctcagcccctgagaaccaccattttaccttctgactctatgaatttggctcctgtaggtgcctcatagaagtagaattttacagtgtttgtgcttttgtgcctggcttatttcacctcggcctagcgtattcaaggttcatttacattgcagcatatgtcagaattttcttctttttaaagggtaaataatattctattgtatgaatataccactttttgtttatccatttacttggattgctttcaccttttttttttttttttttaaagacaaggtctcactcactctgtctcccaggccggagagcagtggtgtgatcatggctcactgcaacctcgacttcctgggctcaggtgatcgtcccacctcagcctcctgggtagctgggactacaggtgtgtaccaccatgcctggctaatttttttttggaattttctgtagagacgggagtttggcatgttgcccaggctggtttccaactcctggcctcaagcggctttcaccttttggctgttgtcagtaatgctgttatgagatggtaccgttgtttaaactttactttccagttgtttgttgctagtatatgtaaataccattgattttgtattttgagcttgaatcctgcagtcttgctaaattgacttattctagcaagcttttttgtaacttcctttggattttctacatagggcgccgtgtcatctgctaataaagttttacttcctcctttctgatctttatgcctgttgcttctttttcttgcctgattgccctggctggatcctctggtataatgttattgtttttttgagatggagtttcatgcttgtcgcccaggctggagtgcagtggcacaatcttggcacactgcaacctctgcctcctgggttcaagcgattctcctgcctcagcctcctgagcagctgggattacaggcacccaccaccacacccggctaatttttgtatccttagtagagatggggtttcactatgttggccaggctggtctcaaactcctgacctcaggtgacctgcccgcctcggcctgccaaagtcctgggattatgggggtgggccaccaagcccagcctcatctaatataatgttgaatagaagggtagataccttgtttctgatcttccaggggatgcatttagtctctcaccattaagagtggtgttagctggccgggcgcggtggctcacgcctgtaatcccaatactttgggaggccgagatgtgcagatcacgaggtcaggagattgagaccatcctggctaacatggtgaaaccccgcctccactaaaaatacaaaaaattagctgggtgtggtggcacatgcctgtagtcccagctacttgggaggctgaggtgggagaattgcttgaacctgggaggtggaggttgcagtaagccgagatggcgccactgcattccgactctgtcacaaaagaaaaaaaaaaagtggtgttagctggccgggtgcggtggctcacgcctgtaatcccagtactttgggaggccgaggtgggtggatcacctgaggtcacgagttcaagaccagcctgggcaacatggtgaaaccttgtctctacccagaatacaaaaattagccgggtgtgatggtatgctcatgtaattccagctacttgggaggccgaggcacaagaatcgcttgaacccaggaggtggaggttgcagcgagccgagattgcgccactgcactccagtctgggtgacagagcaaaactgtctcacaagacaaaacaaaacaaaaaaaagtggtattagctataggtttttcatatctgacctttaccaggttgcaaaaagctctcttttattcctactttgctgagaggtgtttttttttttttttatgtttgtttttttttgttttttttttttgagacggagtcttgctctgttgcccaggctggagtgcagtggtgcaatctcggctcactgcaacttctgcctcctgggttcaagcaattgtcctgcctcagcctcctgagtagctggggttacaggcacatgccaccacgcctggctaacttttgtatttttagtagagatggggtttcaccatgttggccaggctggtcatgaactcctgacctcaagtgattcgcccacctcggcctcccacagtgctgggattacaggcgtgagcccccgcgcccggcccttactgtctcttaaataacttttcagtaatcccctgtattttagcattgcccttctgacactcacctcttcttccagaggtttccggggctgccagttcctgggcttttgaggattgcaggcggtcagtcaagtgtctctcacgctgggatttgtgattttcttgggtcagctctcaactgccaccagcccatctgctttccagcttccaaagttctgtggtggtttttcctctaccattctccccctccctaggggcctatggcattcagaacatccttttttaattgttgttctggtgaggtttcaggaaggagtgacactgtgtggaatctactgttttttcctggaacccctgtcccttcttcagacttcctcacagaatccatgcattcactcagcgtcagtgaatgacatggtatccactcagcgagtccaatgtgggtcataagacttccgcggggacctccatgggcccgcatccttgtgccaagcagtacagtcgtgaatgggctgaatgctggctttaccttttactctctgggtgctcttggccacctctccagagctggtttccatatttgtaaagtggggataatctggggtagtaaggcaggtttttggtcagccagtgaaggtacactctcagtgaagagctggcgcatagtgtcttcctgaggacccaggctatgacttctgccccttcatattctcccagaaaccagcatcgggtgggcatgtggggtgcatggtgggtgtctaaggaaggtgagaggggagggaggttttcctggtccctctcttcctcctcagcagctgtacctcctgggccccccagctggatgtaacaacattggactcttctgtttccctctgtcccctgtatactgtgtctgccaacattggactcctctgtttctctctgtcccctgtacactgtgtctgccaatgaagcagggcctcttctctggtaccctgaccttggcagggctctccccctaccctgtggccagaagagagtcacccttccgctaacatttgccctcccccagatcctgagcctccatgagcctccattcccgatgacagcttcctggtaccttggaccaggcacgccccttcccctttgagggtcccgggctcttcaaggtcagatggtgagcagggtccagtgggatttaaggtgtatgtcttgaagcaccggacatttctctggctcccaggctctcctgggccctgcggcctgctctaggtgacatgttcccagctcctgggtcttggtgtagacatggtcctgagggaatgagcagtgtatcttgtagactgaatgttcacttcccagctctggcatctcctctccactccttctttccacactccacctccagggccaacaataggccccttcagctctggactcttgcgtagggcttgggggtggggtatggcctgagctggcagcaggcaggatgacgagccgggcagcctctgcccagccctggaagagctctctctgggagtggctagctgctgggagctagaccacatccttccctctgggcccccgtgccgtgacagtgcatgggcaggacaggcaacgagaggcagctctctgcggcactcgtgtcctggcctcggcacctgggcatgtgtggcgtgcatgggagtgagacccagacagctgcagcaatgtgtcctctgccacccactgctgctggtgtctgtgttggggagcgatggtccaggagcacattagggccctcagtgtactgtctctttgtgtcggcgttgacactccggtcttcagctggcggagcatgaaacggtttcacagtactttcaagacttgatacagatggatgctcttgtctccacgtgtcagccccaccaagtccagtcagcctcaggttcagtgtggactgggtcacgctgtttagtcagatcctcacccctcctctctcaagtgacattcccttctccactggagttggaggggacgaggcatagcagggccctgcctggtgtgtctgcctctgcctctgtgctctgccctcccaccctggcacctgcctgttcccctcctctctctcggtgagctgggatcctgacagacccaggcccccttcccatcaccctgtgtggcagcccgcgccccagcaccccttcgcagtccgatgagaaggcaccttccttaagaccaatgtcaggctctccctctgcctgagggactggctgagttgttctggttctgagatggctttgggggactgagttgcttagtgggtctggggtcggagtggttgtgatgacatggacagcccctcttcccagaaaggtgctggcgtctctggattagaaatcatggggggaggcaaagccggggctgggagagggcaaccaggcttgttcctggcacccactgggaaagcaacctggcagcagctcacgggggaagaagcagccaccgttctccagtgttcctcacaaagactgagtccttctcagcagacacacccagggcccctgccaggttctcccttcagggcgacagatgtggacagatggttcccttacgatgtacagaccacagcagaggtatacagaccgctccttcagcacaattatgtgctgatacaaagagttacaggaatagtgaccctttaaggataggaacgtgatggataatttaaactttttaaaattcttggccgggcgcagtggctcacgcctataatctcagccctgtgggcggctgaggtgggcggatcatgaggtcaggagatcgagaccatcctggccaacagggtgaaaccccgtctcaactctactaaaaatataaaaattagctgggcgtggtggcgcacacttgtaatctcagctacttgggaggctgaggcaggagaatcgcttaaacccgggaggcagaggttgcagtcagccgagatcgcgccatggcactccagcctggcaacagagcaagactccatctcaaaaaaaaaaaattattttggctatttttcacatgtattattgtgtagttttactactcatgttttcaagcatccctccaacaaaacagcagagataaccatttgtggctaggaaatgggaatttacagaagagatggcatttgacttggatcttgaggagtgtgtgggagtttatcatgtagacacagtagaagtgtcacagacaaaaaatagctcagacattaaaattatttttttattatttatttattgagacggagtctctctgtcgcccaggctggagtgcagtggtacgatcttggctcactgcaacctccgcctcccgggttcacgccattctcctgcctcagcctcccgagtagctgggactgcaggtgcccgccaccacgcccggctaatttttatattttttagtagagatggggtttcaccatattggccaggctggtctcgaactcctgacctcaggtgatccgcctgccttggcctcccaaagtgctgggattacagacgtgagccaccgggcccagccgcagacattaaaattaaagggcatccggacatggtggctggtgcttgtcatcccagctactcaggaggctgaggtgggagggtcacttgagcccaggagttcaaaattaaaatgagccatggtcacaccactgcactccagcctgggcaacagagcaagacccagtctcttaaaaacaaaaaacaagaagaaccccagagtatgtctagggaagggcaaacacttggcttggctgggacatagagacatttgaagggaatgctaagagagagaggtggggaactaggtgaggagtgcagcccagagggcgtgcgtgccagccaggattgggccctcgaggactgagggaagggcccatagtaacagcaggcagccaggtgccgtggtggactcttcatgacagttttatgatggggattccatttttcccctctttacagatgaggaaattgaggcttagaggttgtttgctcaaaagttgcccagctggagcgtgatggagtcaggatttcagcccccatctgcctgactcctgatctcattgtcaccgttgggaggaagtctgaggcggttgaagcagcccgaccggtgtgtctggtggagaaggtggaggacggaggaggagtcttggttgggggtccgtggtggggtgtggtttctacctcgggtggctagtgttggcttgtgatgttttcagcgggatacaggagcgcagaagcagagtttaaggggtgatgctgagcccagtttggatatgcaatgtgtggtacctgtgcagcctcctggtggagctgccctgtaaatgtctggaaatgcgggtctggagccacaggaattcaggaatggagatagcacaaggtggtaataggagtccctggaggcataggtgaccccagggagcacagcatcagtggagaatagaaggaaacatgagttcaaaagtcttaggaaataccaacagttaagaagctgggggcggggggtggggggggggtgggggggtgagggggtgggcaggcgcagtggctcatgcctgtaatcccagcactttgagagagcaaggctggtagaatgcttgagcccaggagtttgagaccaacctgggcaacatgacgaaacctcatctctacaaaaaatacaaaaattagctgggtgtgatagtgcacgcctgtaatcccagctactcaggagatggaggcaggaggattgcttgagcctgcgaggcagaggttgcagtgagccaagatcgcaccactgcactccagtctagggcacagtgagatcctatctcaaacaaacaaacaaaaaacatgtggggtgaagaggcttcagggctggaccatgggcctagcactgccagcagacacagccttgcctgccctcaggacctcagctgccaggcccccctgggagggagtgggcccccgtgtcctggagatggagagactatggacagtcatggcgtgtgtctgaatcactcccttttctttcttgggccctggccagcctcctccccagaccagtgtgatgtcaggcccagccgacctgaaggtgcagggttgcctggtgcaggttcctctgggatgaggttctgagggcacccagcctggccttgctccagaagcctgggctctgcgcacagaggggtgagttaaggctgactaaacttggtggggctgacatgtggaagcaagataatcctctggctgggggaggagctgtaagcccccctctcctcatcagtatgttcttttttccttcagggcttggagaagaggtaggtggaggtgggagagggcgggctgggaggtagggttggcatatattcctgagaatacggtagattgttttggaaaaatcctcttggccggaaattgcctgtcatgtctgcgccttggtgtggatttgtcacttcgcatgcagttggagaggctggagaggggaatggacagcagagctgggctggtttccagcctcttgtttcctttagctctgcagagtggagatataaagagacaagtgaagagcagagggggtgtacacgtggggtggattctcgaactcctagaggtagtttagatcctgtggatgtcttacgataggatggtactaggacgccagagatttacagggggaggtgaggcagggagaaagcaggaaagggcactggtttggatcagatcctttatccagccagggcaagaagggaggggcctggtattttctgccttgccttctacagtctcccggctttgcagctactcccaagactagtatgtgcctttagctgcagtaagatgccgaggagcttctgtacagcatagaagcaggcgttcgggggcctcgccggcagtcatccacctaccctggtgtgcttggggtgtggaaggggctgtgtgaggagagtgggccgtagagggagcctcacctagtgaccttccagggtctggctcagccttgacgctgcgtggggaggagaggtcacagcatctgtctctcctctgccccaacccagggaaggtgccctgagctcagccctaaatacctggtactaaagagtcagtggctgcttcagatgccaccagaatgagaagcggtgccttggggccccgggggagaggaagagcctctgccctgggacttcctgtgccggcgatggcctcgcgccagtgctgggcgcggcacccccgcgtgggcctgtgttgggcggcttttgagcaggagtccgggccctcgtgtcaccgctctgaagtcaaggaggtcagtgcgtgcccagcgcacagcgcgtgcggcgttgcgggagtggcgcgcggggaaccggccgcgggggcctcggggcgggggcgtggcctgcgcgggaggcgggcgctgggaggcggcgcggagccggctgagcgcagggccgagctgcggggcaggtgggcgcccggcgttctgggagcagagtggccgccggggcaggctgggggcggggtgggctgcagccccgggatgcctcggaggagggggtctcagatggagtcggacggaggcccctctgctgtgggcttctcggatggccccttaccgtgaatacgggggactcgtgaatccccaaggccccagttggtggctctggggccctggaggcgggctgagggctgagtggagcccggttccgcggccggcgaaggcagagccccggctctcggtgggggtcagcccggggctggcacagctggctcactgggagagggtgggagccgcgccccggagaggaggaacggagctgggacgggctgcaggagggaatggccgcaggccggcaggaggaggggcgcgaccacccggccgccggccgatggcggatgaggctatgggggctgagacgcagtagcggccctgcacttctggaggatgctcgaggcccggccccccaggacgcagggcagtgacgctgccggtgccgctgcggggcgggggctgcgggcgctgcttctctccctgaccgcagccgctgggatttggggctccatgggggagagatctgcttaccagcgcctggctgggggcgaggagggaccgcaggtaatggggaaggctaggggatagccagatacctgggccccagaccccttcgtctgctgtgagccgggctcagccctgccccctgcggcggcctcaggagtgagagtgtctgctcctgggccaggggacagagagcggtgtgtttatgtgggtgtggcggtggtgacttagtgatgctggcatctgcctgtgtgtgcatggatcccctgggaccccaaaaagctgcccgttgggctttcttccatgccccaagggagtccaggaagtactgctaggattggggttcagtcttttaggagaactgagtctgtatgtcctgggcattcccgtttactaggcttctgaatatgaatatcaagccagatgtccttgtttgcttttgaaaatatggtcacggtgttgatggatggggtagcttcccttccccttggagagaacgcacttcctctcccgaccggcagagggcagtagctgacaggagaaagggggactcggtaggagcgttggggcttaaggtcgggctgttttcctgggcgaggagaaagggggccgggccgggccgggcgcggtggctcacgcctgtcatctcagcactttgggaggccgaggcgggcagatcacctgagacgaggacgctgaggtcaggaattcgggaccagcctggccaacatggcggaaaaaaaaaaaatagctgggcacggtggcgggggcctgtaatcccagctactcgggaggctgaggcaggagaatcacttgaacccgggatcgcgccactgcactcaagcctgggcgatagagcaagactctcaaaaaaaaaaagggggtgggggttccaggagccggcctggcgctgacccacacatactttgcttcttcccgcagctggattactgggccagttacaggtcttgttcttactggacatccaaggtcaggcatggggttctggtgactttgagacacatatttctggggacgctagagtttttaatctggccattctgatccagcagacccattttgaaatagagggaataaccctgcttaaattgttccccggcccccggtccctgggtctccttccaggtgtgcttggtgccagggtaaggctgtaggcttctctgatgcaagggcacagtcagccaaggtttggggaaaagtcagctccagtgtaacgcaggcctgatcttgtccacctgacctcagcccccactccatccacacctgccatctccacaagctttgtgggctggatggcagggggatgaggaagagggactgaagttgggggtgtccttctccccacctcctggagttagaccaggaaatggctgtcccttttggcatcatcagggaggtcaagtgctgggagaggccctgggaagggagcctgggatgctgagtccccaaagccctgctccccagctgcccacccctccagccagctgaggctccctgagctggtggccagctggacagggacaagagagcagtgtgcaagaaacaggggctccctaggcatggctcagcagggaggggggtgcctggggagctggagagggcttcctgcagctgtcaggtgtgtctgggggccgtagcgaggggggtgtaagagcagctggcaccctttgaggagggccagagagatcatttgtcagttctagaaacatgagggccccacgggggcttgatggagtgtctctaggccccttaatctgaggccgtggtctgtgtcaggggttatacaggagacatcctacagctttggggtgggggcgtcccagcaggagtctcagggcatatttgtttgttttgagcgggtttgggaacttggccacctggtctgagtaggaggcaccctgggtgtttgggcagcagacagggccaccccaggggagggggtgaggatcctcaccccaccctacccttgctcttggctggactgccccactctggcaggctgccggccgcctatttccgtcgggcaccagggtaacagggccacatcagggtctgagccaggagacacccagccaaggctgggactcgggggtgggggagggtctctgaggagtcatcgcagggcccagcggagcctctggggtccaagcctcccactcaggctgtgtgttagtccccacgtccccacacaggtccatgagggagtccacagccctgcttcatacgtgctgtttgagtcacatagccgccaccctaaagtcccaggagttgtctgcaactgtgagggctggggtagaagccagagacaggagctttgtgtatggggaggcaggggggccagcgcgggtggctgggaggaagagtcccccccattcctgccgccctcttggcagtgattcagaaaggtcctttttcagccagtgtcagagctgctcagctggggagggagggagagagggagagagagaggcaggcaagagggagggcggccgggcgggcagttgggtggggaagccggggagtagggctggactgtgaccactgccctggagagaagacagaaacaggacagaggatcccggctgcagccagcgtgaggaaagctctgctccctgccagaccggccagctgtggaaacccagcggggcttgcagcagagcggaggggcccaccccgttcttcctcatttcccacccctggtgtgggatttggggggctcctgggcagagtgcgaagctccggagccgaggccactggatccccagtgactgctcgggggggtcccgctgcgtggagatgccggcagcacgtcggttccctggcctggagctctccttccctctcctggccagactgcggcgacgcctgtacacagtgagtggggggcaggggctggactgctggggactggttgggctcctcagcaccagcacttgactgagaggcagaaagcaagactgggagcggctgagggaccccgccagtgagggcttgacggggagtccgggccaagtggcctctcctgcggctgctgcattccttcttcttggcctgtgtgtttgcacgccggccacagagtagtgacggacacaggtgtgcagactccatgaggtgcgggggccaggaccatgcagaattggagagtgtttgaactctggaggagctgcagccatgccctgtgctgcacaaagaaccttgggctggagggggacttagaggggaggcggacccctgcggagtcaccctggactgagaccctgaccgcttgcctcaccagcatcccggagttccttcccgtcctcccacatgcatcccctgtgcagagctgcgctgttgctgggtcagggagcatggagtgcacagctgaacagaggtgcattagctggtgtttcagggagagggaacaggccgggctgtgctttctgaagagcttcaggggaggggcctctgggtctcccccagccctgaccaccccgggcatggctttgagctgttttcaggagcctagaggagggggcctggatccttgggagttggtggtgggaaaaagaagaggagccctggagactgctctccctgcgggagactaggagcctccatcctgaggctgagccctggagggggggggtcactttgctccagggacagggcagcggtggccgtggccgggtggagaggagacgctgcctaggcccgtgactcctagtgtgcctctgggcttgcttccggaaagccacgacgcctggtcctcttaaaccccacgcctcttgttttgtaaacagatgattttgttgaggataaatgaatacagcttaatacttagaactgttcctcgcatatagtaagtgcagttgaagtgttagattttattttattttgagatggagttttgctcttgttgcccaggctggagtgcaatggcacgatcttggctcaccacagcctccgcctcccgggttcaagtgattctcctgcctcagcctcctgagtagctgagattacaggcatgtgccaccaggcccggctaattttctattttcagtagagatggggtttctccatgttggtcaggctggtctcgaactcaggtgatccgcccacctcagcctaagtgctgggattacagctgtgagccactgtgcttggcctagatgttatttttattgttacttgtcttaaataaagttaatagaaatatataacctgttatattaacatgttaacctgtgtacagtgaaacaagcaacacagtgggaactctaatataaagagacataagaggaaggtaataatattttatgtatcctaatacgttagtaacctagacaatgtagtgaggagtcagatcttgagacctcaggtggaaacaccgtgaaggcagcatctgcaagtgctgaccgagaggggagttttgaaataatgagagggggttgccttcactgacatttttgcaaatagtggacttctgctatgttctgaataaagcaaagtccattttcccttaagtttacacagtagtttcattccaggaaaatttattttatattaaaactgtaaggccaggagcagtggctccccagcactttgggaggccagggcaggtggatcacttgagctcaggagttcgagaccagcctggccaacatggaggaaccctgtctccactaaaaatacaaaaattagccgggcgcctgtgatcccagcttcttgggaggctgaggcgggagaattgcctgaacccgggaggctgagtttgcaatgagccaagatcataccattgtactccagcctgggagtctcactctgtctcaaaaaaaaaaaaaaaaaaaaccaaaaaactataaaagtactttcttatttatatataaagtgggatcatattctaggtttgcatgatcataaacaccttcatgaattgagttgtgtgggatttgggacagtgcgagaatgtcctacgcattgcaggctagctcacgctcttgtcccccaaccacccactgaatgtcactaaggcccccccaaatgttgtggcaaccagaactgtcccatagggggctgtgcagcctcatgagaaccattccagtaaagggttacagctttaagtttggaaaccacccggctggcccagctgcctggcccggtcgccgaggtggaagagccaggatttgaactgagagtttctcattcccctttgttactctttgtacttccctgagctgcctgaaaaagtcggaactggcactgtgttggcagggccactgggaactgtgggggcaggaggctcacgctgggcccaggctgtgtgtgcctgcttctcagtgctgctcactgtgatgggagctggggaggaggccaccgctgagtgggggagggggatggcttggtccccagccgggcagctggccttttttctctcgcctgttcctctttggggattgagcatgggtccggggctagcctggccacgccctcagctctgacacaccttacgcagacagggatgggtttgctgtgcggtgggtccgcttgcttagctttgaaggtgccaccagcttctttatctgggcccaggatagtgtaggtcagaggtcactctccggtaccactggctgattgcggcctgcagtgtgctttggccagcacgctgtgtgtgcgtgtgcatgcttttcagatctgaactattcagcattgttaaaaagtcaggagaaagacgaatattaagtgaaatcagggaacagaatggtatggttaatgcgtgaatattcgtgtagggacaacagagtctgaagcgtccgcagaagacatcactggcaactcctggggagccgggtggctgtgcagctggggagggaatgagattcgtggctcagtgtgccttctgaatattttaccacgtgcatatattaccttttccaaactttaatggtgagatttcacatgtaaattgggatttatttcttgaaaaaatggaaagctttgacaacactgggccacagtttcttctgacaaccattgatgggatctgagctccctgttgacaggggtgtctgcgagcccaccgcaggccccacccctccctcctgtcttccgcttgctgtggccctgtaggcacttgagtggtggcccgtggagtggtctttggattgttaggagaggctggggtggtcaggcgctgggaggaacttagcttagagctcatctgaccctgagagttttctccgtcacatctaaggagcccatagatgggtctcggggcacattgcaccctagagatttttatcaaatattaggagtaagaacacgtcggtgttcccggagagaccactgttagtttttaaaagattttcaaggactttcgacccctagaaacttagagcaggaatgtgagcacaggttgatcttgggtcactcagtcacagatcacatttcgggagcaagaccctgactcctgactccagggccagggctgtatctccgccgccctaattgtgccctgtggctggcaggaataggggacgtgggtccaggcggttctcggtagcttccctcgggagtcagaaggtggtgtgagcccttccgggtggccgtgtagtgggatgaaggtgagcccaggtcactcgggcaggcccctgttgtccccccacaacccttgtccctgagccactcctccccccacagaggctgggaggcggcagaatgcagccagaggagggcacaggctggctgctggagctgctgtccgaggtgcagctgcaacagtacttcctgcggctccgagatgacctcaacgtcacccgcctgtcccactttgagtacgtcaagaatgaggacctggagaagatcggcatgggtcggcctggtaggtgggatgttggcctggcttgtcttgcccctgaccctttccgtcctctgtcctcaggaccactcggtgcacgggtggcagctgagaactctgtcccagagccctgagggagcaggagggacatcagtaggtgctgatgtgtgatgagaacagttggcagttataaaggtgaattggagtttgaggagagtgaggccttccctaaagctggctacacaggagtcactccatgccccgttgtgattgttctcacgtagagtgtatgtcctccattgcccctccttcataagcatcgaattgagtctgttctcatcattctgactaccggggggtccatgtgcagagatctgtagggagaacgctaactctcagatggtttgctgattcgtgctcacgctctctttcttgctctctcacacgcacacacgcatgcacacgcacaggcatacacacacacacacacacacgcaggcacacacgcacatgcgcacacacgtgcacgcacgcatgcacgtgcacacacgcatgcacgtgcgtacgcacgcgctcacacgcctgcgcacacagacacgcacacacacacacacgtgtgtgcgcacacccgcatgcacacgcacggcatacacacatgtacacacacgcgcgcagacgcacacacgtgcgcacacgcgtgtgcacacacacgcacatacacacaggtttgctctgatttgagttcaacccttatcttcatatttttcctaaaagtgggggttgtagcatctaaaagtcatgatgttcttcatagaacattagaaacgtattagggctttcaagttaaaatagctaaataggtaataatgtgtcaagttagacactgacttagttaaaatagctaaataggtaataatgtgtcaagttagacactgacttagttaaaatagctaaataggtaataacgtgtcaagttagacactgacttagttaaaatagctaaataggtagtaatgtgctaagttagacattgatttatgctactttaggcctggatagttggtgtctgatgccagtagcataaaaaaattttacggagggaaaaaaacctcaacattgagaaaattctgttcattaccttgatttttcctgagaactgggagaagcccatcgcttcaagtttttggttaaacaccttcacccagtttgagagccagtgccaggaagtggagtgcagagaccgtcggtcagttgaggctccgggttagttggggttgatttcattgctatcatcgggtgggcggtgtctagtgacaggctcacccccaaggggaccacaggcagcagcctctctcgggctacggcggccttcacagcacgcggttccccgctctccctgcaggccagcggcggctgtgggaggctgtgaagaggaggaaggccttgtgcaaacgcaagtcgtggatgagtaaggtgggtgaggaggtgggtgaggaggtgggaggggggcagcctcgaacgcccccctccgcttctggtcctgggaaccttccccagctccccggcaggtcgaatctcgccgttctgccggcactttgtacaggaccccctcgtccagggtcttatcgggcagggcacttgtagagctgctgggctaagtgtctgtctccgccagatacggacacgtgagcagcctgtgtgcggtgaggccttcacagcccctctcggcacgcctggaacaggacctcattgacaagtgtgccttaacttagccctgctgtgtctgagcgttggggccagtgtccagcgtggggtggtggacctgtctggacccagaacgtctttgcttggcttccctcctccctgaccctctctaatctctgggtttctctggtcatctgtccctgctgacagcttccttccccacagcctgtccccacctctccccacaccttgtcctaatttgggtctgtggtgtagtgagtccctggtctgactcagtggaactttgcccattgtctggaagacaatgagagaggaagtgagccagccgtggtctttcctccccacttctggcttcagggctgggttggggggtgggcagggccgaacagctgcagtgggattgggcagcagagattttcctggctgcaatccggcaaaggggctgtctcttgggatcctttggcttttcctggaaacactgtcctggtcctttgcccgggttttagggaaggatgagtagtgtcgggatggtggaggcaggagaagagagcagcgtggtttgctgagatttaggggtcttggatctgccactggctcctgataggtccctgggcggtcagtggcctccagatttttgttgtgtcttcagtgaaatgataccggtccccactgcccagctcacctcccggggctgcaggaggcaccggagataatggctgtagagggtcttgtaacctgaacattgcttgcaaacataaggaattctagttactgggaggaagcacagggcagaggccagaagaggccctcagatttgaggcaccctagcccagacggataaggatccaccagctctgggggcgtgagacccaagctggcaagaatctgcaatctggagccaaggctgtgggtgcctcagtggaggccgagtcagaccgacgtggccagctttgaccctcatggcctcctttcttctgtcccttgaccttcggctcctccctgtccaccctggcctccgagtctcctccacttttccttccgtctcagccctcagctctaggcgcccctccagagacccagctgtcttcccaggccccttcccagcaaggactagcttcatctgaaccacacacacactcacggttcaacctcagactaaaattatcctctcccctgggcaggatgaagggcagccgactccctggtgagggtggagacagacagcaccaaatggtcaggccagagaaggggccagggctaaaaatggacaaggaggtgtctgtggagggcccctgcggctccatcgatgcgggttagggctggagtctgcggggtggcgggtgcaggaagggagggtggggcaggactgggaggagactccgaccttggctgggcggtgccctccctctccacacagctgggtgtggggccgctcagccacaggctgcatgcctgtcggtctctttctggcaccctccttgaggccagcatcaggctttgggttcatgtttgggggtgtgccctggacggagtgtgggcctccagccaggctgccccactgacagtttggcaaaaccaggacctatctggaagccgaagccggggatcaccaggtggacccagcggggtgggactgagtgactgaccctggggtgttggattccatctggcccccggctgccttcaaacaggtgttcagtggaaagcgactggaggctgagttcccacctcatcactctcagagcaccttccggaagacctcgcccgcccctgggggcccagcaggggaggggcccctgcagagcctcacctgcctcattggggagaaggacctgcgcctcctggagaagctgggtgatggttcctttggcgtggtgcgcaggggcgagtgggacgcgccctcagggaagacggtgagctctctgtgtcctgccagcgcagcagaggcatgggacccggggctggtagtggctcttctgcccccaaccagggtgtggatgggactggggatgcgtcacagtgtggctcatcccagagtccgtgctcaggatttttggggttttatttatttatttatttttgagatggagtctcgctctgtcgcccaggctggagtgcagtaggcacgatctcggcttcctgcaacctccactttccgggttcaagcaatcctcctgcctcagcctcctgagtagctgggattacaggcatgcaccaccacactcagttaatttttgtatttttagtagagacggggtttcaccatgttggccaggctggtctcgaactcctgacctcagatgatctgcccactttagcctcccaaagtgcttggattacaggtgtgagccaccacgtccagcccatgctcaggtttaactaagcacatttattatttcaactataaaaataatttattataaaagtttggaaagtatttgaaaaacaagaaaaaaaaaatcgcctgtaatcccaccactcagaggaagccgagcctcttcctcccactttaggtattttgttggatttagttaagatacaaattctggatacagcttttaaaatcttgttctttcttctcggcgttgcatttaacattttcccctcagggataacgtgtcaccacagcatacagttctggtgtgactgtttcctgtgcagcagccgtgtccttactgctcagatcacgtgcggtgcattcccagcacctcagagggctcctcattctccgtccactcagtgcgtccttctcccggggaagccgctgtcactcagtgcatccttctcccggggaagccgctgtgcagacttccagctccacagctttgtttttggcattacatttacagcattttccttctacagcaaaacaccttttaatattccattttatgaccagcctgagcaatatggagaaaccccatctctactaaaaatacaaaattagccaggcgtggtggcacctgcctgtaatcccagctactcaggaggctgaggcaggagaatcacttgaacccgggaggcagaggttgcagtgagctgagatcacgtcactgcattccagcctgggcgacaagagcgagactgtctcaaaaaaaaaaattccattttataacatttgaatattctctcatcatactggttatctcttactttttggttggtatttaagcccggcattcccccaggaaggggaggtgtggccgacgatggctcctgagggccagccgtctgcccttctccagccaggcctcacgcagagcacgtaagcccaggcactggtgacatgcttacccacccagatgaggagctcacaggcagggatcgttgagccgagttggagggtggagcaggttggctccgcgtgtctgggacctggcaagtcctgagtccttgcaaatcccgctctgggcaggtgagtgtggctgtgaagtgcctgaagcccgatgtcctgagccagccagaagccatggacgacttcatccgggaggtcaatgccatgcactcgctcgaccaccgaaacctcatccgcctctacggggtggtgctcacgccgcccatgaagatggtgagtactgcgggcgggagggggcgggcagggagagggctccggtcccatatgtgtggttcggttcctctctccatcctaaggtcagaggcgccctagatcctactttggtcccccaacctgatggagtaaaggggtccacaggggcccagcctggtacgggctgtgtctgctgcggtccagtccgggtctgtctctggattttgctggtgctcagtgtcaagagagttactcccatgggaggggctggccactgagtttaatttggggaatttatgttttatttatctatttattttgagatggagtctcactttgtcgcccaggctggagtgcaatggcatgatctaggctcactgcaacctcggcctcctgggttcacgcgatattcctgcctcaggcttccaagtagctgggattacagccgtgcgctaccatgcctggctaatttttgtatttttagtagagacggggtttcaccatgttggccaggctggtctcaaactcctgacctcaaatgatccacccacctcggcctcccaaagtgctgggattacaggcgtgagccaccacgtccagctgagttttggaatttctagccactgcctctttgggctccttctctctaggcatcagtttcccaaattgcctcgagggagaggcctgagaaactgcaggactcctagaggtccccagacagcaggccaggaaggtgcgtgcagcctggctctggaaagccttcaggaaggggactgggggcccagcgtgggctgctgagaaggggcagggtcctccagctcattcctcctgcctcctccgtggcctcaggtgacagagctggcacctctgggatcgttgttggaccggctacgtaagcaccagggccacttcctcctggggactctgagccgctacgctgtgcaggtggctgagggcatgggctacctggagtccaagcgctttattcaccgtgacctggctgcccgcaatctgctgttggctacccgcgacctggtcaagatcggggactttgggctgatgcgagcactacctcagaatgacgaccattacgtcatgcaggaacatcgcaaggtgcccttcgcctggtgaggggcaggtgctgccagctcacagagtccctgcagacccaggcctcaaagcttctggggctttctggacccaccacagcccctggttttgcttgggcctgcccttgtctgttctaagcctggggtgccctcctttgcacccattcgctcaccatccatctaggaattcttgagggcccacgtgccagggtctgggtgctggaaatcacagggatacatgctgtgggactctccaaggggctttgctgggtggggtgatacggggatagatgctgtgtcctctccaaggggcattgttgggggtcgtgtttcagggatagatcctgtgtcctctccaaggggcattgctggcgggggggtgttatagggataaatgctgtgtcctctccaaagggcgttgctggggggggggtgttacaaggatagatgctgtgtcctcttcaaggggcatcgctgggggggtgttacagggatagatgctgtgtcctcttcaaggggcattgctggggggggtgttacagggatagatgccgtgtcctctccaaggggcgttgctggggggggtgttagagggacagatcctgtgtcctctccaaggggcatcgctgggggcgggtgttacagggatagatgctgtgtcctctccaaggggcactgctgggggggtgttacagggatagatgctgtgtcctctccaaggggcactgctgggggggtgttagagggacagatcctgtgtcctcttcaaggggcattgctggcgggtggtgttagagggatagacactgtgtcctctccaaggggcatcgctgggggcgggtgttacagggatagacgctgtgtcctctccaaggggcattgctgggggggtgttacagggatagatgctgtgtcctctccaaggggcactgctgggggggtgttacagggatagatgctgtgtcctctccaaggggcactgctgggggggtgttagagggacagatcctgtgtcctcttcaaggggcattgctggcgggtggtgttagagggatagacactgtgtcctctccaaggggcatcgctgggggcgggtgttacagggatagacgctgtgtcctctccaaggggcattgctgggggggtgttacagggatagatgctgtgtcctctccaaggggcattgctggggggcgggtgttacagggttagatgctgtgtcctctccaaggggcattgctggggggggtgttacagggatagatgctgtgtcctctccaaggggcattgctggggggggtgttacagggatagatgctgtgtcctctccaaggggcattgctgggggggtgttacagggatagatgctgtgtcctctccgagggtcattgctgagttaggtgatacagggatatatgctgtgtcctcttcaaggggcattgctgggggggtgttacagggatagatgctgtgtcctctccgaggggcattgctggggggcgggtgttacagggttagatgctgtgtcctctccaaggggcattgctgggggggggggtgttacagggatagatgctgtgtcctctccgagggtcactgctgagttaggtgatacagggatatatgctgtgtcctcttcaaggggcattgctgggggggtgttacagggatagatgctgtgtcctctccaaggggcatttctgtggggaggtattcaaaggtttcctaaaacatcagggaagttcgccagggaaagactcgttggtaagcatgttctagggagagctagtggtagacaggcccaggccacagcaggccttgtagatgggccagggctgcttacctgtgcactaggggtggtacttggccctgccctggcccctgtgtgggcttatcctctgctgagaccattgtggttctctggtgccagaggcacccagaggtctgtgatctgcctgctttgaggcgggaagggttgttccagttctgctttcccaagcggtggctgtgggcaacccttatgatccaggacgcatggtcatcttaacgagcagctggctttacacccagggcgagcagaggtcttaaattatgcccgttgtcctggagtaatttagagcagcctcttttgtattcaggcatcctggtttgcatggtaaggtatgaatatagttgcctttaaacagcacgatgaagtgggcgggttattgttctcatttcaccaaggaggataatgaaccttagcgatctcgagtgactttcccggccccatcccctttgaggggcagggctcgctctgcttccctgtctgggcaccaccctcctctctgcacctcagtccacgccgggatgtcctttctgacctcactgcagtggcacttccccctcaaccgggggtgcccagaacgaatgggtgtatttgggtgaagccagtatgactgtttctacccattttggttcttccccaggccctacccgaatttcccacccactgcttcctgccaaaggacccaaatccgaggatcccgccccaaatctgggaattgtcattctcccaccacagtcagaaaacagcctgtgatcttctctccctgccccatcccagagcctctgacctccttcctttccatgcttctctggctgggaaacttcctttcctcttcccccaccaggctgcaagtgaataagaggcctgggcttagacgatttccccaagtccctgcatcgtgtcgtcaaggggtcctgcccgcttcacacggcgcccctgagacccactgttgaacctggcacagggggtcacaacaagtgtttgctgcatgagtgttttaagtccctggggcggacgcaggtagggtgtttgagagggcttctctttgacccctgcctctgccaggtgtgcccccgagagcctgaagacacgcaccttctcccatgccagcgacacctggatgttcggggtgacactgtgggaaatgttcacctacggccaggagccctggatcggcctcaacggcagtcaggtgagggctgggagacgggcccccatagggctggtggggtgaattccattccctgcttgcagcctggccctgctggaactgcctctcaccaatggactccctcctcccacgccccgtgcctccccccacttcccgtgcctcccaccacgccccgtgtctcctctcacgccccgtatctgtatggcctcagggagagcccagcaaagagacggggagggaaaagctggggcctgccctccttctctagcccttgccacatccacttgttccgaggctccagacctgggaagaagggactggggctctggagagggcccctcccaggcaggcagatcccttctttggaggccaggcatggcagcagccgctgcagctgtggatgggctggagggaaggcgggaagtgaagggctgggcgctctgtttgtcgtcaaactctgcacctcctcaccttcagatcctgcataagatcgacaaggagggggagcggctgccccggcccgaggactgtccccaggacatctacaacgtcatggtccagtgctgggctcacaagccagaggacagacccacgtttgtggccctgcgggacttcctgctggaggtgagggacaggtcagcccaggagagctggggtgttcaagctgaggggctacccaggcgtcagtcccagagttggccacgaccttcctcttcctccaggcccagcccacagacatgcgggcccttcaggactttgaggaaccggacaagctgcacatccagatgaatgatgtcatcaccgtcatcgagggaaggtagggagtgcagggctgggccccgccctgggatcgcttgaagggcacaggtcggagggacctgtggacagatctgtttggcctccaagattcccttggccacatacaggctggcggttgggcctgaaccctgcagtgtgaggggaggacaggcctgcctccgtcttcctagtgcctttccctgcccagcttccctccaccaccctttcccactgggctgcagccctggctgtgtggttgggccaggctgcctttatggaggggtagggagtggcctggcctcggtggcagcagagttctggactcccgtgcttcctcctctgctcctccccgcttctctccctgcttcttcctggcacagggactcagccatccacctgggtgcgtttcagtagctgaagcagcccagcctgccctcttgcagctttccatccttcctgctgagcccaccaccccctcccaggcctgcctccagcctctggtcctctcttcccatctccccttgggaggaccctctctatacctaaccctcctcccacagcctctcgggagtccctgtcttccacctgagcccccgcagttctagcgcctgccctgaggccccaccactgctggccctgccttgtgctggctgatccccagggtgtctgagcaactggctggggcagggcaggtttcaggtacctttgaggcaggggcagtattgaggaccaggaagaagagtgaagtggaggaaatcccctgtgctcgcagctcctgactcaggccaggcaaggatggggctagggctgcttcccagggagcctcttccacctgcactgcagcttttggagtctgcggccttcggtgcaatcctgtgcctcttgggggtgggtggaggagacctggggggctgtgtggagtgtgacctgcaccgctgtggccccgacaccccgagccttcccaggcccggctccctcacccttgggcccagggtctgggaataggaatgacatactgagactgcagggcctgtggttaggggtgttatgctggggaagaatgcagaaggttctagaaagagaggcctggggacaggaggcaaacagtctgcaggtttggagctgaggggccagggatgggattgcaagcgtggcgctccggggagcattctggaaataggaagattaagggtgggggggtcccctggaagtacctggcagggcctccagcccgaagtccagcctcatgaccgtgtccacctccacgagctggaaagccgtgggcctggcccctcttgtgctgctgccggagccccagatctttaccacctgcttcccttgctctcagcaggagcctgtgtgcctgccagtgtccccaggggtgactcagagtggcctgtgtttggggcgtgtgtctctggagctggtgttttaggtcaccgcccgggcaaggcgggcagtgggaggggccgggagcggctgctcctgggagggttgtgggtgtgccccgccccgcccttccgtcgaaggcccccgttggccccagccgctggttccctgtggctgctgctggtggggctctgggggctccttccccctgggccaccagccctggcttggaaccacagcacctgccctccgtgcctggagctgctcaggaggtgggaggtgaggggcaggaggccacaacagccggtgaggcttgggagcgggcctgggtgtcggtggtggcagagcttgactctgcccccttgtttcttcagtccctgaatatctccatgtttgtttggctgcctccgtctccatgtctccaggcggatggctctgtgtgagtctttgggcctgggtgtgcatctgtgggtctgtgtttggagttccctcctagcctggccttctcttcgccgtggcttcccacttgcgaagctgtgtccagtatttgtttcctggtgcggagtctgggaggccacctgccgcagctctgactgagtctaggctcagtccttctcagggtaccaggctgtgggcagaggggagacacctagatgtttcgtgctgtgtctagatttggagacacaaatgatgactggtctttcccaggggctcgtttggaggaaggggtggctggcagcacttttgttccgcatacagagcgggtgttggaatccattgcgggtccttggcctggtctggccctggagcctcggcttcctgtggtgggtgggagccaggcatccgggttatccctccaggcctgggcgcctgggacccctagggagaagagcgggcgggcgttttgaacagaatgtccggcattagttgagccatttctggactaccttcggcccggacgggaacgtggtgctgagatttccagagctggggcagccttaggcagttctcagcaccggcctctgttttccatcttgtctaccccagagatgttgaccagaggcccgggggcagcaggaggtagaaggttcatgcggaggtgttgggcccttttcctgctcccccaggaagtcctcatccgcccctgcttcagtcacggccgggtagcagccctggccctcccatggccacggggactccggcctgttcatggcgggagagagagggcgcggacagggcgggcctggaaggaagggctggcctcagtcccctctggactgctggtgcctcggccacactgagcctcacacgggtgcgtgtgggctgcgagaagtgacacggtcctcttggaagtcccactggagccttgggatgaagctgccttggagtgtgcgtgggcgccatcccgagggggagcttcctgtgcctccgagcgtgcgtgggcgccatcccgagggggagcttcttgtgcctcggagcgtgcgtgggcgccatcccgagggggagtttcttgtgcctcggagcgtgcgtgggcgccatcccgagggggagtttcttgtgcctcggagcgtgcgtgggcgccatcccgaggggagcttcgtgtgcctcggagcgtgcgtgggcgccatcccgaggggagcttcctgtgcctcggagcgtgcgtgggcgccatcccgagggggagtttcttgtgcctcggagcgtgcgtgggcgccatcccgaggggagcttcttgtgcctcggagtgtgcgtgggcgccatcccgaggggagcttcttgtgcctcggagtgtgcgtgggcgccatcccgagggggagcttcctgtgcctccgagcgtgcgtgggcgccatcccgagggggagtttcttgtgcctcggagcgtgcgtgggcgccatcccgaggggagcttcttgtgcctcggagtgtgcgtgggcgccatcccgaggggagcttcttgtgcctcggagcgtgcgtgggcgccatcccgagggggagtttcttgtgcctcggagcgtgcgtgggcgccatcccgaggggagcttcttgtgcctcggagtgtgcgtgggcgccatcccgaggggagcttcctgtgcctcggagcgtgcgtgggcgccatcccgaggggagcttcctgtgcctcggagcgtgcgtgggcgccatcccgagggagagtttcttgtgcctcggagcgtgcgtgggcgccatcccgaggggagcttcttgtgcctcggagtgtgcgtgggcgccatcccgaggggagcttcttgtgcctcggagtgtgcgtgggcgccatcccgagggggagcttcttgtgcctcggagcgtgcgtgggcgccatcccgagggggagtttcttgtgcctcggagtgtgcgtgggcgccatcccgaggggagcttcttgcacacgtcctccgcactcttactctccttcccccaggagcaagcatgttttctcgagtggtgtcaggactcccagcagccatgggggctcttgcctcggccatacctgcactaagggaggtgggcttgatgtctcctttccctctcagaagtgggtcccaaaggaggcttctgtgcctggagctgggcagtgttggcggaagggagaggccagacggagtgacctgccttgggcacgagtcacgctgctctgagcaaggtctcggcctcagcggcattctcacccagttactgagcgcctctgaagaggtgtggagagcagagtccggcgtctggcccgcggcagccaccggggagcccgtgggtgtagcgggagagccgcagcccagccggtgccggggttcctcctctacgggccgccgtgggaggctgtgtgcgtgctggggagccggggctctgctccttcgagtggccctgctatttttcagatgggactcgtctcgtctcggggtactgtcctctctccttccttccctccctgcaggcagggtgggaatcacagggtggctgtgtgtggtggggccaggccagtggccctgtgtatgaggaggctgggcagggggagcacagccccgtctccccgcgccccgcgccccccgcctccccgccgaccgtggtgctctcgggtttgactttggtctctgggatgggctgttccggagtcaccccgctccagccaggcctcgtcaccttacaaggctgtgggtctgggtgcccaggcgtcgccacctcctccgtcctctctccccggcctggctgggtttcagaggagcccttcttcacgctttggccctgggacaggagaagtgggggttggtggggagggcgtgcagtgtggtgccacacgtgtccaccctagcagctctgggctgtcaccgcccccgcgtgcccagactctgcccacggggctgtcaccgcccccgcctgcccagacactgcccacggggctctcaccgcccccgcctgcccagacactgcccacggggctctcaccgcccccgcctgcccagactctgctcacggcatcacgtatgacaagtccagcagcagacgcgggagcctcacaacctgtgagagccttcgggagtcaggagtgtcttgcgggagccctgtgcttcctggcctgcctgcccctgcccctgcccctgcccctgcccaggccccggcttaggccacatcagcagaggtttcgtgtctgaggtcagagggggactggcagccctactgtctggtcactgtgggagagctgagttcccttttggacacaggtagagcccctcctgaggagacggggaggctcccgcaggccttccgggaggtggtggaaagctccggaagcaggtgaagcggtggagggagggactgagttgcccgagtgctcctagactctcccgcgtctgcattcgggaggcaggttgtagctggaggcctggcccccagcctagtgcaaggccctaggtgtcccccggcacccccgcacctctcagaactcctggaacccagccgaggagtgaaatcaagtggccagaagaggactggggccccggccttgccagggaactgaggggtgaggaggaggtgtgggcggggcgctggccccacagacctgaaagctggcgttgggtcccaggtctgctgggatctttctggtaaccgtggacaggtcatgttgcctgctgcagcagcttccagcgtgcctccttatttgcaaaccatagggaaagctgcctgacccacctagagagttgtgggtaaggccgtgtgcaaacaggcctgtacggggcatggtgggtcacgggggctgttggggaggagggccggtggcacacagcctggtcctgaggcctgagctccatcccccttctgccacagtggccagggtgtgaggagggtcccagtgccggggctgccccgccacgcctggcgttcaccgtgccatctctgtcgcgcagggccgagaactactggtggcgtggccagaacacacggacgctgtgtgtggggcccttccctcgcaacgtggtgacctccgtggccggcctgtcggcccaggacatcagccagcccctgcagaacagcttcatccacacagggcatggcgacagtgacccccgccactgctggggcttcccggacaggattgacgagtgagtactgggcggggatggatgctgacctggccccgctcgggactccagggccctcagcacggcacgcgtgggcggaatctgctcttcaccctttcgcccgggcttcagcccccgacccgccactctcccctcctcaccctggccttactctcgggaagctgtggaaccctaggaagcccagcctggtgggggttctccaggggaatgttctccaggggagtgttctccaggggagggttctccaggggagggttctccaggggaatgttctccaggggagggttctccaggggagggttctccaggggagggttctccaggggaatgttctccaggggagggttctccaggggagggttctccggggagcgttctccaggggaatgctgtccctgccattttcaagctttggggggccgatctcctaactctgagacacttcatctgtgaaacaggttcacccccccaataaggggaaggctgtaaatgcactctgaattagcacttgctgctcagatgcaggggtcctgagagaagctttcccactcactgtagatgaaagtagggtcaggagcttctgaggatggactcctgtttggtggaaaggtccccggagccacagctgtaacccctcttggtactcgggccttaggaaaatgaacttgggaggaacccggtgggagctgctgaggaggagagcttctcccatgacccccctgtggccccctgtgaccctgtgaccctgtgacccctgcacacgagcagtggttttccttctcctgctggtggtgccagagtcctggagacgtgaacctgctggctcaggccctggggatgtatgcaggtccacatgggagtgagcctgctttccagaaccagagtgggactggggaccttggggactgcagagggaacgttaggtggcagctccgcctccccaccacacagtactctacggagctcactccatacctgggagaggccctgtctcctatgtaagaggataaggccaccgaggggcatctgggaaggacacgcagaatcagtcacttccgggatgccaccccccaccccccgaagcttcttgcgccaggcctccaagcctctctgctggccgcagggggattccaggcccctggcctctgcagcccttctcctgctgacttctgatactctggtctgccctgagaggcgtggaaagcaggggccttcacccaccgggccccacacaccagaaccccacacagcgggcccccacacaccagaacccacacagcgggcccccacacaccagaaccccacacagcgagtccccccacaccagaacccacacagcgggcccccacacaccagaacccacacagcgggcccacacacactggaaccccaagctcacagggctcagcccatgtgttttgcctaaaaagaacccagcaagggcctgagagttggggtgaaagactgcagacacctccaggagaggctggtgccctctgccccactcctggcatgctgtggccagcccagccccattcctccaggctttaatcagccccagtgactaagtctcagatactgacagttggtgcagggacggagggtggatccggagcaggacaggtggcccagcctctcccgcacctcctggccatgtggcagaagggtgcctcctgcccaccctggctgggcaccatagctgggatgccccgttcttaggccctccatcgtggcctgcgggacaggagtgtctgccctctggccgctgcctggtgtgggctgggggcctggggggttgtggaggaccacctctgcccttgtagggtgtagttggagtccctgaggtcctaggctttccatcctggggtcaggtgtcctttctctgccttctctccaggacaccccccagctgagacgtgcggtcaggttctgtggactgggaggcgggaggcctgtgcttcagacccaagactacacccggtttcctccaggacgaaggggctctgatgagattctgccacccctccacacgcttcccctgctctcttgacccagctctctcccccacagactgtatctgggaaaccccatggacccccccgacctcctgagcgtggaactgagcacctcccggcccccccagcatctaggaggggtgaaaagtaagagcccctctgctccctggtgtccctaactcatcggctactcaggaaggggcactgtcttcacaggccaccctaaggctgctgttctgtttttggggacagtggggtcagggcagcaggcgggacagctgtgtccctggctccggctgggcgtggggtggaagacaggcagctgtatccgccgaggtgggcctcctcgggctgggtctgcagcaggcccgtccgccccggcgtccctcctccctccttccacggccgagctcagatcctggctttcctcacttccccctaatcctgctctcctgtcccaagccaaaaccaccccacggctccggctctgcctggggcctcctccatctcccggtcctctgcctatcatactggaccgccgtgttcctcatcctgccgcctgcggcctcccgtttgctgggggcttgtacattcactcgcccccattcacttctctcccttcgtctctctacactctgccctctcgtccggccgtctccctcctttgtcctctgtcctgctccgtctctctccccctgtccgcatggcctttcttgcaggggagcctccacctcgcccacctcagcctgccttcttcactcagagtaagtggggctgcttccgatgccttggcccccgcccccgccccctctctctcactcctctcctggaaggtacagagcctgggcggctgggccggaggggaggtgggtgggtgtgtgctgtgagcttccgcggctgccctggcctagcatgcctgccccccctcgagcccgccccccggagcctgggcttctgctcacgagtgtggccctggcttccgcctcggcctcactccctcccagacctgtctgagcttctggagcacgagtgtggccctggcttctgccttggcctcgctgcctcccagacctgcaggcgctgtctgggctttgtggccgttggtcaggagtactgtcctctccaaggatagtccttatagcccctgatggcaggaggcggctccgtgcctgcactaatggtgtgccgtgacaggggcggggatgagggctcactaactcgccagggcgcaggagcagggccgccggggtcttgtgctggtggaggcagcgtcaggcaggagccagtgttgcttgctgcagcttagacggagcgaggcggggctcaccggcccacatggggctgccgggcagagcaggttccgccctcctgatggagtggtcggaggtgcgctgagaacctggccgccggtggctgacctcagacctcggggggagttgggagtggagggttgctgggggacacttggctttctctcccacgtgccacctcccctcgtgtcccagaccctgcctgactgccttcctgttgggctctccctttccatcacagaaccaacctatgaccctgtgagcgaggaccaagaccccttgtccagcgacttcaagaggctgggcctgcggaagccaggcctgccccgagggctgtggctggcgaagccctcggcgcgggtgccgggcaccaaggccagccgaggcagcggggctgaggtcacgctcatcgacttcggtgaggagcccgtggtcccggccctacggccctgcgcgccctccctggcgcagctggccatggacgcctgctccctgctggacgagaccccgcctcagagccccacgcgggcactgccccggcccctgcaccccacgcctgtggtggactgggacgcacgcccgctgccccccccgcccgcctatgacgacgtggcccaggatgaggatgactttgagatctgctccatcaacagcaccctcgtgggcgcgggggtccctgccgggcccagccagggccagaccaactacgcctttgtgcctgagcaggcgcggccgccccctcccctggaggacaacctgttcctcccgccccagggtgggggcaagccgcccagctccgcacagaccgcagagatcttccaggcgctacagcaggagtgcatgaggcaactgcaggctccggccggctccccggccccctctcccagcccggggggtgacgacaagccccaggtgcctcctcgggtacccatcccccctcggcccacgcgcccacacgtccagctgtctccagcccccccgggcgaggaggagaccagccagtggcctggacctgcttcccctccccgggtgcctccgcgggagcccctgtcccctcaaggctcgaggacacccagccccctggtaccacctggcagctccccgctgccaccccggctctcaagctcacctgggaagaccatgcccaccacccagagctttgcctcagaccccaagtacgccaccccccaggtgatccaggcccctggcccgcgggctggtccctgcatcctgcccatcgtccgggatggcaagaaggtcagcagcacccactattacttgctgcccgagcgaccatcctacctggagcgctaccagcgcttcctgcgtgaggcccagagccccgaggagcctacccccctgcctgtgcctctgctgctgcccccacccagcaccccagcccccgccgcccccacggccaccgtgcggccgatgccccaggctgccttggaccccaaggccaacttctccaccaacaacagcaacccaggggcccggccaccacccccgagggccactgctcggctgccacagaggggctgccctggcgatgggccagaggcgggccggccagcagacaagatccagatggtgagcacccagcctggctgtgggcgaagcggggcagggcccaaggggcctggagcagtgggccctagtggtgctgacaggggtgggtgtgcccagctgcaggccatggtgcatggggtgaccacagaggagtgccaggcggccctgcagtgccacggctggagcgtgcagagggctgcccagtatctgaaggtaccgccacctcctgctcactctggctctcagggaccctgaagcctggttctgctgcccccagccccacgccccctggctccgactcccctcttccccaccctagtcggtgccctgggcccgcgtgtccatggcgccacccttacccccaggtggagcagctcttcgggctgggtctgcggcccagaggggagtgccacaaagtgctggagatgttcgactggaacctggagcaggccggctgccaccttctgggctcctggggccctgcccaccacaagtgagtgagccccacagtctgccccgctccgtgccccaggagggctgtcccagagcctgccacactgggaggaagcccaacacctcgcaggccgctcccggccagggagacacagctctccagctgcgggagggaggcgctcacagggcccagcaaatcgtttttcctaaatgtgtttatttggacattttagccacttggttttcaaatgagtacaagagggaattggagcctctctggttgaaggaggcttgcttccctagcacctgcagtgaccctgagcggctccaggaatggcactttttaggaccccatgatttgcacacctctttctcacctctgtgtttccatatttctgtttaaagtaacatttaaaatttcagtgttggctgggcaccgtggctcatggctgtaatccccagcactgtgggaggccaaggagggaggatcacctgaggtcaggagttcgagaccagcctggccaacatggcgagaccaggtctctactaaaaatacaaaaattaaccgggtatggtggtgggcacctgtaatcccacctgctggggaggctgaggcaggagaatcgcttcaacctgggaggcggaggttgctgtgagctgagattgcaccactgcactccatcctgggcgacagagggagactgtctccaaaaaaaaaaattttctctaaaaagaaaatatattgtctttcctgtaaaaggtttatattatagtttaacaaaatatatagacatttaaaatatatacatatataaacacactttatatattatgtaaatatatatatgagagcgctgtcaagtcaaaaagaagtgaactgaggtcacatggctggagccagcaccatggcaggaggcactggcgggaggaggggctgacacgggccaggccctggagatacctgctgcccttgtcccagcagcgtggccctgtgcacggtgcggagtttctccacatataaagcgtgtagataatagtgctcaccccgtggaagggactggcgcgatggatgggggacatgtctgtcttattgcgcccagcacgcctggcgccaggatgcaggcactccgtgtcacctgtctgtcccatactgtctcgggtggttcttactgatttgcagctgggatgcaggcactccctgtcacctgtctgtcccatactgtctcgggtcgttcttaactgatttgcacctgggacgcaggcactctgtgtcacctgtctgtcattgtctcgggtggttcttactgatttgcacctgggacgcaggcattcgctgtcacctgtctgtcactgtctcgggtggttcttactgatttgcacctgggatgcaggcactccgtgtcacttgtctgtcccagtctcgggtggttcttactgatttgcacctgggatgcaggcactcggtgtcacctgtctgtcccatcctgtctcgggtcattcttaactgatttgcacccgggacgcaggcactctgtgtcacctgtctgtcactgtctcgggtggttcttactgatttgcacccgggacgcaggcactcgctgtcacctgtctgtcactgtctcgggtggttcttactgatttgcacctgggacgcaggcactcgctgtcacctgtctgtcactgtctcgggtggttcttactgatttgcatctgggacgcaggcactcgctgtcacctgtctgtcactgtctcgggtggttcttactgatttgcatctgggacgcaggcactcgctgtcacctgtctgtcactgtctcgggtggttcttactgatttgcacctgggacgcaggcactccgtgtcacctgtctgtcactgtctcgggtggttcttactgatttgcacccgggacgcaggcactcgctgtcacctgtctgtcgctgtctcgggtggttcttactgatttgcatctgggatgcaggcactccgtgtcacctgtctgtcgctgtctcgggtggttcttactgatttgcacccgggacgcaggcacttgctgtcacctgtctgtcactgtctcgggtgtttcttactgatttgcacctgggacgcaggcactccgtgtcacctgtctgtcactgtctcgggtggttcttactgatttgcacctgggacgcaggcactcgctgtcacctgtctgtcactgtctcgggtggttcttactgatttgcatctgggacgcaggcactcgctgtcacctgtctgtcactgtctcaggtggttcttactgatttgcatctgggatgcaggcactccgtgtcacctgtctgtcactgtctcgggtggttcttactgatttgcatctaggatgcaggcactccgtgtcacctgtctgtcgctgtctggggtggttcttactgatttgcagctgggatgcaggcactccgtgtcacctgtctgtcgctgtctcgggtggttcttactgatttgcatccacataggctttgggctctatcccacctgtcgtcttcggattctctaatacgcaggagtgctcttctgttagtttactcatagtttattaaagtacagagaaaagacatccaggatgataaattttacagtccttgccggggactgccagcttccagtggtgttgcctggcaccagtgtgacccccggtgcctgccccgctgaaccttctgtaaactgtttaactgtgctggtggtttcccattctctaggcgctgagatgcgtctggagagccagagggcctgcctgaaggaatcacctgagcctgtccgtccaccaggagtggggagatgcccccatccagtcctggaggacccgctgctcctgctgctcccggggatggagcaaggccaaggctgcgggaggctgggagccctgccctgcccatccctcctgcaccagcgctgtccctgcacactttggttcagtcccggtgcccctgccaagatgtggaaggggccgggtgaagacaggcttgagggctgccccagcaggctctgggtatgacctgcctctggccctggtcctgggcggggcctgtgggtggagtagtacccccaggccctgccctgggtgacagactgggaggaaaccaggctggacctgggcaggcgggatgtgttggccacagggagaggcggaccggcacccggtgggacctcctaggactgggccttcttccagggggcccctggcagcagctggggtgtcgggcagaatgtgacttgtggccttaccatggacttgaatgggacttggctggcctcaggatcttgtgcctggaaatagcctgaggtggctcaggaagcggagaaagggtgccagaccattctctggcggggaccagggcccaaggccccagggctggaaggagaccaaggggcagccgccctggagggacatcagtgcttcctcttccacccaattcccccacgcggttccatgttttcccaccagcctgttggcgaagttgctgctccggcattcagtacctgcttcttccagagaaataaagttagtttctattttatgtta

SEQ ID NO: 15862 - DNA, 67468 bp, Homo sapiens
gcagctcagctggttccggctggggaagatggcggtggctggggcggtgtccggggagccgctggtgcactggtgcacccagcagttgcggaagactttcggcctggatgtcagcgaggagatcattcagtgagaacagttcgggtccaagcggggaaggagctctgggatgtgcactgcctgagcgaaccgggaagcggggaggactgaaaagttaagagagaaatgtgataaaggggctgcagtctgtagtctgtaggcgtcgaattttggcctccacctttgtagtttagtttctggaatagggtgtccggctccacagtctgccggtcgggcttttttcctgggaagacgcccaatctgtaataattagaaatgcaaggctgtcccaggagccagtttcctttctagagagaaggggcaggtcaaactgtatttcctaactttgaaccccttactcttttatttatttattattattgttgttattattgagacggagtctctgtcgcccaggctggcgtgcggtggcgcgatcttggctcactgcaacctccgccttccgggttcaggtgattcacctgcctgagcctcccaagtagctgggattacaggcacgcaccaccacacccggctaatttttaaaaatttttagtagagtcagtgtttcaccatgttggccaggctagtctccagctcctgatctcaagtgatccgcccgcctcgacctcccaaagtgctgggattacaggcatgagccaccgcacccagatatactctgaacattttagtcggcccaatctgagttgtgtcagtagagccaacagggtcagctgtgtcaataggacctagaatttaagtggaagcagcgtggtagagtacaaatagcttctgactctggagtctcaggttctatattctgttgtcgtttacctgttttagaacccaggacaacttaatttttctctctgtaccctggtttcttcatttataagattaatcattagtagagcttatcatgctttatgactcctatgaaatggagatggtgtacatgacttaatatctactttcaactgattgaagaacatttgttgcgctgctgttacacgccaggtgctggggtaacaaagacaagacagttgggttccccttcgttgatgagtgctgaggttggggaaatgaaggggcttgttggagcacaaaataaaggattctcattaagatttgaaaaactcggaaggtttattggaaaggataactttcacccgagaactaaggaatagacagaggtggcggtccaaagtgttcaggcaggggagaaaactacaaaaatgggacttgatcgaagaactgaaagtgttccttcatttgattccttggtcactgatgttgaaacctaaattgctgttctagggcttttgtaggaagtaagatgagtttctgagtttcggagaaaatagacttttggcaaggagacagttcaagtaggttattttaatggatttttttgaggccctaggagatggctcaagcccttattcccagcactttgggaggtagaggtgggaggattgcttgagactgggagttggagaccaccctgggcaacatagtgagaccctgtctctacagaaataaaaaaagtaaacaacaagataaaggattttttttaacactagaatagacaacaaaacaaaacagcgaaatcttatggtttggctttacccttgcttgaacgcagtcagattaagtatttagtagttttcaaacattttttaaagcagtggaatgctatcaaatgaaataatgaaactttgcaatatataaaacagaaaagtgttttttacgaatataagttcaaaattttcacttttttttttttttttttttgagacagattctgttgcccaggctggagtgcagtggtgcgatctcagctcgctgcaacctccgcctcccacgttcaagcgattctctttcctcagcccgagcagctgggattacaggcgcgcaccaccatgcctggctaatttttgtattcttactagagatggggtttcaccatgttgaccagggtggtctcgaactcctgacctcagatgatccaaccgcctcagcctcccaaagtgctgggattacaggcatgagccaccacgcctggcccaattttcacatatttattgtaaatatgtgtaatatattaaatatcaaatatattaaatattaaatatatcaaatattatattaaatatattaaatattaaatatatcaaatattatattaaatatattaaatatgtgtattatattaaatacagtattaaaaaaaaaagattgaggtggccaggcgcagtggttcatgtgtgtaatctaagcactttgggaggccgaggcagatggatcatttgaggtcaggaatttcagaccagcctggccaacatggcgaaacccccactctactaaaaatacaaaacttagtcgggtgtggtggagcgtgcaggtcatctcagttactcggaaggctgaggcaggagaatcccttgaaccgcggggcagaggttgcagtgagctgataccgcaccactgcactccatcctgggtgacagagtgagacctcgtctcaaaaaaaaaaaggaaaaaagaaagattgaggctatttttgataaattaacaatttgaaatagggtaagaatgatagatgtagtcttctcagtctagaatccagttgtattttgtttggattacacagtatcaagaaaatgcgttctcaggccaggcgtggtggctcacgcctgtaatcctagcactttaggaggccaaggcaggtggaccacctgaggtcaggagttcgagaccagcctggccaacatggtgaaaccccgtctctactaaaaatacaaaaaaaaattagccaggtatggtgacgggcacctgtaatcccagctactcgggaggctgaggcaggagaatcgcttgaacccaggaggcagaggttgcagtgagccaatatctcaccactgcactccagcctgggcgacagagcgagactccgtctcaaaaaaaaaaaaaaattatattccgcctgggaaggaggtcagtgcccgtcggcatgtattacgctaagatactatttgaagcatttgttaggtattcactagtattccacaacaggctattatgccatgatgaaagcatttgctgtgccttgcctggcatttaattgagaattacccaggtgtatgtactacagtaatgtactaacttgaacaattttatatgagtggactgaatttttgaaatagcacagagctattaacttttttttttttcttttttgagacggagtctcactctgtcgcccaggctggagtgcagtggcaggatctcggctcactgcaacctccacctcccaggttcaagcaattctcctgcctcagcctccccagtagcttggactacaggcgcgtgacaccatgcccagctaatttttgtatttttagtggagatgggattccaccaggttggccaggatggtctcggtctcctgacctcgtggtctgcccgcctcagcctcccaaagtgctgggattacaggtgtgagccactgcacccggccttaactttctaattagtgatacatttataagacataaatagctatccacagagttaacaaaataaactttggtccacaatctggatgagttcatattattttgataagatttggtatataacatatttggatgaatgttgttctttattataccttgttaagtagttaaaatgacatttattcaaatggttctgaaactctcttccctggttgtttgaaaaatactccagggttggccaggtgcagtggctcaacctgtaatcccagcactttgggaggctgaggtgggttgatcacttgaggtcaggagttcaagaccagcctgcccaacatggcaaaaccttgtctctactaaaaattcaaaaaattagccgggcgcagtggtgcacgcctgcaatcccagctactcaggaggctgaggcaggagaatttcttgaacctaggagccagaggttgcagtgagccaagatagcaccactgcactccagcctgggtgacagagtgagactctgtctcaaaaaaaaaaaaaaaaaaaaaaaagccaggtgcagcggctcagcctgtaattccagcactttggaaggctgaggcgggcaaatcacttgaggtcaggacttcgagaccagcctggccaacatagtgaaaccccgtctctactaaaaaaaagcaaaaacaaaacaaaacaaaacaaaaattagccgggtgtggttgtgcacgcctgtaatcccagctactcaggaggctgaggtaggagaatcgcttgaacctgggagatggagtttgcagtgagctgagatcgcaccactgcactccagcctgggagactaaatgagactctgtctgaaaaaacaaaaaaaccctccagggttaaatgatcccttgggattccttacagttttgcaagtctttgatagcagttaatcttttggtggggactggtaagtttggggatcaagatgattaaaatgtgtaagtcctgaaaaaccattgtcttttctaatccatagtaattagaagatgcctgtttttggggggtgtgtgtatgtgtgtgtgtatttttagtagagacggtttcaccatgttggccaagctggtctctaactcctgacctcaggtgatccacccgcctcagcctcccaaagtgctgggagccatcatgccccaccgtttttgcttgtttgagacagagtctcattctgttgctcaggctggaatgtagtggtgcaatcatggctctgcagccttcacctctgagactcaaaggatccttccacctcagcctcccaagtagctaggactacaggaacatgcctccatgcctggctaattttaatttttcttctagagacaaggtctccctatgttgcccaggctggtctcaaactcctgggcccaagtgatcctccagcttcagcctcccaaattgttgggattacaggcatgggctcccgaacccagacagaatattctcttagtgaggcccaaaggcacaaatttgtttacctctagagcataattctgcaattccaccattacactgtgaaaagaatgcagtacatacgataccaatcataggacaatttcataatttttaaaaagttaaaggatatagcactatggtaataatttttcttgcattccatatcattgtgtctgaattacagtttctgtgctgttttcagtgtcttgtatgttaattttttttttttttttttttgagaggaagtctcacttgcccaggctggagtgcagtggcacgatctcagctcactgcaagctctgtctcctgggttcacaccattctcctgcctcagcctcccgagtagctgggactacaggcgcctgctaccatacccgcctaatttttttttgttttttttttttagtagagacagggtttcaccgtgttagccaggatggtctcgatctcctgacctggtgatccgcccgcctcggcctcccaaagtgctgggattacaggtgtgagccaccgcgcccggccgcttatgtgttaatttataagtaatttttatcacttctttctcttgtaatgataagatgttcactgtagaaaactaaaaaaatcagaaaaggataaaaaagtaaactaaaattaccataatactacaacccagaaataagcactgtttctttctcttttttcccatatatattataatgtaatacattttaaaaacgtatttattgtaggaaaaaagaaaataaaaataaaactacctttaattccatcactcactagtaatcgttttggtgtataacgttgtttttttcctacacataagtgtatgtatgtatacattcataccagttaggatcgtatcgtatttctagcacctagcatagtacttggctcaaagtaaacactctaatagattaatgaatggtttttactacctagatctctgttaagattactgagaaacagtgtaagttagtcttgtttcaacaacttatatctttgcctcctgaggtacgttttgtcaattgagagtgctgaagagatacgagaatatgttactgatctcctccagggaaatgaaggcaaaaaaggtcaattcatagaagaacttataaccaaatggcaaaagaatgatcaggagttgatttcggatcctttgcagcagtgcttcaaaaaagatggtaagttaatgtaattatgcaaatgttgaaatattggtaagtgggcaggcttaaagaattattattattatttttttttttgccatcttgtgtttcttcacagctaacttaaacagagtcatatgtatacatatttttagttcggttctactcaatccgtaatgaatattgctctagttctttttcaacttagaaaatatcacaaaaaggccgggcgtggtggctcacgcctgtaatcccagcactttgggaggctgaggtgggcggatcacgtggtcaggagatcgagaccatcgtggctaacacggtgaaaccccatctctactaaaaatacaaaaagttagccaggcatggaggcaggcgcctgtagtcccagctactcaggaggctgaggcaggagaatggcgtgaacctgggaggtggagcttgcagtgagctgagatagcaccactgcactccagcctgggcgacagagcgagactccatctcaaaaaaaaaaaaaaaaaaggaaaatatcacaaaaaaatgtgtgtttacagacacaaatgtggcttcagaataatttgaaaaatttatacataaagaaacatttttcagtcgtgcatacctggatgtaagtaaagtgttgattgactatagtatgaatagcatttagagataactgcttaaatagtacaaaagataagcaccaaactaaataatctaagttattatgcaatctacaatatcagaattttgtttgttttgagacatggtctcactttcattgcccaggctggagtgatgtggcttgatcctagctcactgcagcctctgcttcctgggctcagatgattctcccacctcagcctcctgagtagctgggactacaggcgtgtgttaccacacctggctaatttttgtatttttttctagagatagggtctcactctgttgtccagggtgctctcaaactccttggttcaaacggtccacctgtctcggcctctcaaagtgctgggattatgcatgtgagccactaagcctgattttagaatatcagattttaatttaacttcttagtcccagccacttgtttgacttctttttcattgactgcactcttggaaatgatgatttaaatttaattctggtttgacaggaaaagataattaaaaatcttcctgatgatatcttgactctaaatattaagcatcaccttagtttattagctatattagttcaccaggaatcctcttatcaatctgtgtgtgtgtgtatttttttttttctatctttaaagaaattttagatgggcagaaatcaggcgaccatctaaagcggggtaggaagaaagggagaaacagacaggaagttcctgcatttactgaacctgacacgactgcagaggttaaaacaccttttgatttggccaaggtgagtgcttatagattgaagctttttctgactattggagaagaggaagtgactaatacatttcagagagcaaagtgtacaaattggtctagaatggcaatttttcaacaaatgcatgaattttaggtagaaaaagttacatatactcctttctatatggtagattttttgtttggcaacctgattagtattataaagacatctttgcttttttttttttttttccccaagacagagtcttgctctgtttccagtctggagtgcagtggtgcgatctctgctcattgcaacctccgcttcctgggttcaagtgattctcctgcatcagtctcccgaatagctgggactacaggcatgcgccaccatacccagctaattttcttttttttttttttgagacagagtctcgctctgtcgcccaggctggaatgcagtggtgtaatctcagctcaccacaacctctgcctcctgggttcaagcgattctcctgcctcagcctcccaagtagctgggactgcatgcgcacactgccacgcccagctaatttttcgtattttagtagagatggggtttcaccgagttgcccaagctggtcttgagctgctgagctcaggcaatccacccaccttggcctcccaaagtgctaggattacaggcgtgagccaccgcgcccagccctgtttttgaactttaaattaatggagctaaatagtgtgtactcttgtatctagctgcttttttttttttttttttttttttttttgagacggagtcttgctctgtcacccaggctggagtgcagtggcgcaatcttggcccactgcaacctctgcctccctggttcaaacgattctcctgcctcagtctcccaagtagctgtgattacaggcacacatgctaccacacccagctaatttttgtatttttagtagagatggggtttcaccatgttggccaggctggtcttgaactcctgacctcaagcaatctgcctgccttggcttctcaaagtgctgggattacaggcatgagcaactgtgcccagccagtgtctagcttctttcaatttatgagattcatctctactctgggcagctatactttctcattctcattgctacacagaattgtattaagtgaacacatcacaatttatccattctattatttggatagtttccaattccaatgcaacagtgaacattcttgtatgtatttttggtgaacatatttacacatttctgtttagtatatatctaggagttgaattgctgtgtcatagaacatgcatatgttcaacttcagttgatatgagtttgcagtcctgccagcagtgtatgagaggtctaattcttttgtatctttgctaacacttcatattttctctttttcagtttagccattctggttggtatttagtggtattgcattttgttttcgtttttgcattattttgacgactaatgaaattgagcactttttcatatgcctgttagtcattaggatatcttttgttatgaagttcttattaggttttttttgccctttttttgtttgagataggatctcgctctgttgcccagtggcgtcaactcgactaactgcaacctccaccttctgtttttctattgtattatctgtccttttcttagtggtttctgattaagtcaactttatatttatttttcctattttattgatggcccatatttccaaatctgtgaatatcatctgcttttagaggcattcttgtttcttatgatctccaatttagctgtgcttaaagatgtcatataaacagatttaactgctacatttaccctccactagctatagtaatgggctgaaagctactagcagaaaagacaaggtaattatcagctagtttttctagagtataacctttcctcagaaccttgattataactaatttgtatttcttcctttcactgccttctttcttggttcttggatagtatataagttgttactgaacagaacggagcattttctcccttgactttttacattgtcattaattatttgatgttattttgatgtctttgtacgataggcacaagagaacagcaactccgtaaagaagaagacaaagtttgtcaatttatacacaagagagggacaggacaggcttgcagtcctgctccctggtcgtcacccttgtgattgcctgggccagaagcacaagctcatcaataactgtctgatctgtgggcgcattgtctgtgaacaagaaggctcaggcccttgcttattctgtggcactctggtaaattatttcttttctattttattttactgtgctttgtgttaatacgcagagccagtcagatctcaagtaatttctctttttttgtttttttttggttgagacggagtctcactttgtcgcccaggctggagtgcagtggcacgatctcggctcgctgcaggctctgcctcccgggttcatgccattctcctgcctcagcctcccgagcagctggaactacaggtgcctgccaccacgcccagctaatttttttgtatttttattagagacgggattttacagtgttagccaggatggtctcgatctcctgaccttgtgatccgcccacctcggcctctcaaagttctgggattacaggcgtcagccaccgtgcctggctttctctttttcttagtaaatttcttccctaaaatatccagtgaactcgagtgtcagggatatgattagttagaaacccaaggttaggccaggcacagtggcacacgcctgtagtcccaacactttgggaagccaaggtgggttttgggaggctgaggtgggaggatcacctgagcccaggagtttgagaccagcctgggcaatgtaggaagaccctgtctctacaaaaaaaaaaaaaaaaaaaaaaaaaagtttttaattagctgggctgggtatggtggtgcacacctgtggtagcatttacatgaggggctgaaatgggagcttcacttgatcccaggacgtccaggctgcagtgagacagcgagtccttatctcagaagaaagaaagaaccccaggttatatcctagtactgaggccattaatgagaagggtttgagaacatacattgttgagagatccaagggctaggagccactgtgacagaatcctcagatcattatagcttctatttccaggattccaccttgtcatagctctgctttgtctgagagaatgacctcaagaatgcagtgataatgactcacagaaacccttaatgagctatctagaaagctaattttaccaagttgagctggctgtcagaagcaatgacatttggtgttggtaaaggcatccgttttatattacttcattttctcctcttttctgatggggcccttaattttttcttttttccttttttttttttttttttttttttttttgagacggagtctcactctgtcgcccaggctggagagcagtggcacaatctcggctcactgcaacctctgcctcctgggttcaagcaattctcctgtctcagcctccctagtagctgggacaacagggacacaccaccacgcccagctaattttttgtatttttagtagagacagggtttcaccatattggtcaagctggtctcagaactcctgacctcaggtgatccaaccatctcagcctcccaaagtgctgggattacaggtgtgagccaccgtgcctggtgggacccttaattttttcatatgctcagaataagctgatagacaatggatgacctgaaaaatgtagtgtctaccaataaaaatgtccattaaatggcagtaaatctcctcccatatggagctttctctttagagcaagctcttatagctgctggcaggaactctgtgtgtcattgaggcaactgctaggaagtattgtacagtgttttctcctaggtcccttgaagtaatgtaaagcagattggccttgaagtttgtttgtttgtttgttttttgagatggagtctcactctcttgcccagcctggagtgcagtggctcactgcaacttccgcctcctgggttcaagttcaagtgattctcctgccttagcctcttgagtagctgggattacaggtgcccactaccacgcccagctaatttttgtatttttagtagagacagggtttctctatattgaccacgctcaattgaactcctgacctcaggtgatctacctgcctcggcctcccaaagtgctgggattacaggcatgagccactgcgcctggcccttgtttgttttttagacagagtctcaggccaggcatgctggcttatgtctgtaatcccagcactttggaaggctgagttgggaggatgacttgagcccgggaggtggaggttgcagtgagcagagatggtgccaccgcactccagtctgggtgacaaagccacaccctgctcaaaaaaaaaaaaagaaagaaaaaaagaaaaaataacgtactctcaaagataaatatttctcactgttgagaatactagataaaacatatgtgactttaccataaaaagcaacccagttctaatcatgaagcccaaatctgacaagagaagttaattataagaagatgtcttattagaaagaaccagaagccaggtatggtggctgatgcctataatcccattgctttcggaggctgaggagggaagactgcttgagcccaggagttcaggaccagcctgggcaacatggcaaaaccccatatctacaaagaagtcccagctcctaagtagctggaactataggcacacaccaccacgccaggctaatttttgcatttttttgttgaaatggggtttggccatgttgcccaggctggtctcgaattcctgcactcaagcaatctgcccacctcagcctcccaaagtgctgggattacagtcataagccactgtgcccagccttttttttttttttttctaaaccattaagtcattcagggacatgtgcagtgatataagttttttgtttgggtcataaaaaagaaatggaaagagatctggagaaaactcatttgcatttttatattttggtgtgtttggattaaaaaacaccaatagtctcattattttatcatcatctaatgtgtaatttcaggttacttttagatatatcaagaaagcaatataatttaactgttggatcacatgtcttactcttactattttacaggtgtgtactcatgaggaacaagatattttacagcgtgactcaaacaagagccagaaactgctaaagaaactcatgtcaggtagacagcagtcttgtaattggatcactgggatgatgggtaccttgttgcgtctgtggttgtttctcttttctgtatcctggagtgcaagatgcagtttattcactcattctcagtttttttggggggttttttttgttttgttttgttttgttttgatgtggagtctcactcttatcacccaggctggagagcagtgacgcgatcttggcttactgcaacctccgcctcctgggttcaagtgattctcctgcctcaaactccctagtagctgggattgcaggcgtgtgccaccacgcgtagctaatatttacttttttttttttttttgagatggagtctcgctctgtcacccaggctggagtgtagtggcgctgatctcggctcactacaacctctgccttctgggttcaagcaattctcctgcctcagcctgccaagtagctgggactacaggcacatgccaccatgcctggctaatgttttgtattttttagtagagatggggtttcaccatgttagccaggatggtcttgatctcctgacctcatgatctgcccaccttggcctcccaaagtgctgagattacaggcataagccaccacgcccagccaatatttacatttttttagtaggggtggggttttgccatgttggccaggctggtcttgaactcatgacctcaagtgatctgcctgcctcggcctcccaaagcactgggattacagatgtgacccactgtgcctggcctattcactcattctataagcatctattttttagaaaaattattaagactacataacattgaacagcaaaataaataatagtattacattataatctaaataaaattaatatccatgtgaccatacttgtataaataactgaataagttaataaaatggagaaaggacaacttcttataaaagaattccagttaataaagtacaagaaatgaaaatactagaaaatcacaattagaacactacagtagtaactgccacaagcacgatccaccaatggatactgaaattattggttgaaagtttaagaacaagagatttacaatgtcatgaaagacaagaaaagattgaagaaacgtcacagatcagagtagattaaggatatatatgacgactaattgcagtatagatccagtattagatcctagaatagaaaaatgacattaatgggaaaaaaatgttaaaatccaaatagtctgtctatagtattataccaatattaatttcttagttttgataattgtactatggttttgtaagataagatggtaacattaaaggaagctatgtgaaggttatataggaactctacttattttctaattattttgcatgccttttatgcttgaaacacacctgacaaaaatggttaaggacattttttttttttttgagacggagtttcactctttttgcccaggctggagtgcaatggtgtgatctcggctcaccgcagccttcgcctcccaggttcaagcgattcttctgcctcagcctccccagtaggtgggattacaggcatgcgtcaccaccctgactaattttgtatttttagtagagacagggtttctccatgttggtcaggctggtcttgagctcccgacctcaggtgttccacccacctcagcctcccaaagtgctgggattaaggtgtgagccaccgcgcccggccaacatttttttttttttttctgagacggagttttgctcttgttgcccaggctggagtgcaatggcgcgatctcagctcactgcaacctccgccacttgggttcaagtgattctcctgcttcagcctctcaagtagctgggattacaagcgcatgccaccttgtccagctaatttttttgtatttttagtagagatggggttctcccatgttgactaggctggtctcgaactcctgacctcagatgatctgcccacctcaacctcccaaagtgctgagattacaggcgtgagccaccgcacttggtcagttaaggacattatttttatttatttattatttatttagttagttagttttgagatggagtctcgctctgtcgcccaggctggagtgtggtggcgtgatctcggctcgctgcaagctccatctcccaggttcatgccattctcctgcctcagcctcctgagtagttgagactggcgacgcccgccaccatgcccggctaatttttttgtatttttttagtatagacggtgtttcactgtgttagccaagatggtctcgatctcctgaccttgtgatccacctgccttggcctcccaaagtgctgggattacaggcgcgagccaccgcacccctatttttaattttttttagacggagtctcgctctttcgcccgggctggagtgcagtggcgcaatcttggctgactgcaacctctgcctcctgggttcaagcgattctcctgcctcagcctgccacgtagctgggactacaggcgtgcaccactatgcccagttaaattttgtatttttagtagagatggggtttcaccatgttggttggccatggtggtcttgatctcttgacctcgtgttccacccgcctcggcctcccaaagtgctggaattacaggcatgagccaccgcgcccagcagttaaggacactattaaaaagaaaaacaatatactcattactcactacttacgcaaatatttcattttgttcctaccttggttcatagtagtttttgttttatatcgacagatttgttgggattataatgtagtcatctgtgtaaaaacatttgtttttccattttccaactaattcataattagctgccatcttgctatatattcataattgtttttagtagctaaaaatagtcttttaacttggtttattatagtatgattatttcctaattactggatatttgtttccaaattttaaataatattacaaattgtcacctttattaacatagcttttgatttacttccttgtgataaattgctaagaataatgttactatgtcaaataatgtgtctttttttgacacttgagatgtatttgccagattattttgtcaaaatatataaatagccgggcatggtggctcatgcctgtaatcctagcactttgagaggccgagacgggcggatcacctgaggttgggagtttgagaccagcctgaccaatgtggagaaaccccgtctctaccaaaaacacaaaattagccgtgcatggtggcacatgcctgtaatcccagctactcaggagactgaggctgggaattgcttgaaccccggaggcggaggttgcagtgagccgagattgcaccattgcactccagcctgggcaacgagagtgaaactccatctcaaaaaaaaaaaatcatattaatctatagcaatattagcattgtacccagaatcctgttcactcttgagttttgacatttcaaatttgttttagttgtaaaaggctgtaattttattattttttatttttatttttatttatttatttgttttgagacagagtctctgtcacctaggctggagtgcagtggcgtgatcttggctcactgcaacttctgcctctcaggttcaagcaattctcctgcctcagcctcccaagtagctgggattgcgggcgcctgccaccacacccagctaatttttgcatttatagtagagacagggttttgccatgttggccaggcctcctgacctcaggtgatccacccaccttggcctcccaaaatgctgggattacaggcatgaaccaccgcgctcggcctgtaattttattattaatgaggttgcacatgcctctatgtttttttcaattagattttaaggtaatcattctgagaaaaaatagttctgattgtacgtactgtccttgtttgtttgtttgtttttagacggtctctgtcaggctggagtacattggtatgaacacattttactgcagcaattctcctgcctcagcctcccaagtagctggatctacaggcttgtaccaccgtgtctggctaatttttaaattgtttgtacagatgggctctcaccatgttgcccaggctagtcttgaactcctaggctcaagtgatcctcccacctcagcctcccaaagtgctgcaattacaggagtgagccactgcacacagccacctaacccattttggatcttgggtgtatcataatctatggctctcttttctgggatatacaaatttacaatatgctgtcaaagaagaaaacacaaccatggaatcaatgttggctttagagttatactcgagctcagattttgtttctatggtctaatttctttttcttttcttttttttttttttgagatggagtcttgctctgtcgcccaagctggagtgcagtggcacggtctcggctcactgtaagctcagcgtcccaggttcatgccattgtcctgcctcagcctcccaagtagctgggactacaggtgcctgccaccatgcctggctaattttttgtatttttagtggagacagggtttcaccatgttagccaggatggtctcgatctcctgacctcatgatccgcccgcctcagcctcccaaagtgctgggattacaggcgtgagccactgcacccggccactggtctaatttctaactgtgtgaactcagtaaatttatagtcatctctgaacttcagttactttatctgtaaaataaagataatacaaactgtcttacagggttattgcgaaaattaaataacatgtatactaagtgactcagcatttagcaggttctcattaaactgaaactgttcattttttctgccccttttgtgaaattttcttttttcttccattatttagtgtttagttttgataatataaacgtatatttaggctggcatagtggatcatgtctggaatcccagtactttgaggtgctgagttgggaggattgcttgaagccaggactttgaaaccagcctgagcaacatagtgagacccgcctctctacaaaaatttaaaaattcagacacaatggcatgtgcctgttgtctcagctattcaggaagctgaggtggaaggatcgcctgagcctaagagtttgagactgcagtgagctatgatcacactactgcactccagactgggcaacagcattagatcctgtcttgaaaaaacgtatatttaaaggtaatattgagcaaatgtcttcttcactgagaaggcatttttatgtcacattcttaaatactttggtgcccttagtgaaccaaatttttataaaggaagaaaagatccctgccatttattgaaaacctgtcatgtgtcaagcactgcttactgctgtacaggtaaggcctggactgtgtacttgttttctgttgaaatgaaggctccaggccatcaggccagaaccagatcttctgatgttttgttctttgttgcacactggtacaactaatttgtatttagaggctgacaccatttgacttccttattgaatttcaggagtggagaattctggaaaggtggacatctctaccaaggaccttcttcctcatcaagaattgcgaattaagtctggtctggagaaggctatcaagcataaagacaaactgttagagtttgacagaactaggtatgaaagggttagaataacaaatgctaagaaataaactagtccacagattctggccattattttggtacttgataccttctcaaagtggagtgtgaaagagtttatagcaaaagaagagccagatgctctacataggaggcctacatcttgttttttaatccacggttgaataatataggctcctatgaaaagaatcctgtcctgtagcattttttgattcctgacaaatgttagtatatcccctggacagttatgtgagttgacagaattcaccacttgttttacttgtagccattcattcagtcacctgtattagagtacgtgttatttgcaaactgttaggctgggctctggagaatctgtaaggaattgcctctgggagaacacaggttatgccctatcataggagggcatgatttacccttctcctttactttgactaaatttgttttttgattcaataatcggtatattaaaatacaactaaattagctttatactactgcattattattgtttagcccattgacttctgtttaggagatagatttatgataattctgtttttgacttcctccttacttacatttttttttcttttgaaaaaaatacttgttgaaaaccagttagtggtaaaaaatgtttggataggatttatatgctcccttctcaaatgactctgagggtcctcagagagaccctgaatctcttgtaacctgagagtctgttgctgacagtgtaatcttttgatgggacattcctgctacttccaaaccatttgctatgaatacatgagataagatttagaaaactattccttaaataaacccatcacaaggtgtataactcatattcactcttcatcctttcagtatcacatttcaccctactcagtagaacgtattattagaaatagaaatggaagccgggcacggtggctcacacctgtaatcccggcacttggggaggccgaggcaggtggatcacgagatcaggagatccagaccatcctggctaacacagtgaaaccccatctcactaaaaatacaaaaaaattagccaagcgtggtggcaggtgcctgtagtcccaggtactcgggaggctgaggcaggagaatggcatgaacccaggaggcggagcttgcagtgagccaagattgtgccactgcactccagcctgggcaacagagtgagactctgtctcaaaaaaaaaataataataatagaaatagaatgcacttactttttgataaacagaaagtggaaaagggtctctccctattgttgctgttttgctggtgtattcatggataccagtttcattatctaggtttttgtataagaccaatttccaccaggcacagtggctcacgcctgtaatcctagcactttgggaggccaaggcagacggattgcttgagcctgtaagtttgagagcagcctgggcagcatagcaaaaccctgtctgtacaaaaaatacagaaattagccaggagtaatgttacatgcctgtaatcccagctacttgggaggctgaggtgggagtattgattgagactgggaggtggaggttacagtgaggcgagattaatccagtgcactccagcctgggtgtcacagcgagattgtctcaaaaaaaaaaaaaaaattcctccagagtactgttaaaaaagtttctactctaagtctgctttatttttgttttttttttttgatccgccagcctcggcctcccaaagtgctggaattacaggtgtgagccaccgtgcctggcctaagaagacaaatttttttttttttttttttttttttttgagatggagtcttgctctgtcgcctgggctgcagtgcagtggcgccatctcggcttactgcaagctccgccccctggactcacgccattctcccgcctcagcctcctgagtagctgggactacaggcgcccgccactacgcccagctaatttttttgtatttttagtagagacggggtttcaccgtgttagccaggatggtctcgatctcctgaccttgtgatccgtccgcctcagcctcccaaagtgttgggattacaggtgttgagccactgtgcccggctgacaaaatttttttataattctagctgagtatgaaaatttgaagccaatatatgaatctaacttcagtatttcccttatgtctatttatgtcactatttgtaattatggggaaacgtaatcttaactggatttatgacattggagtaatcactcaacttctatgagccccaggtttataatatgtagaattagagagttagaccatcaagattccttccaggttttagtgtctctgtcagtatgatcttagagataggcctaattgtcatattttggaacttggccccagtgcattagtgagagcctgcaaagtggggtataggtaatgacatatagtagtagggtaatagaatgtcttaagagtaaatagttggccaggcacagtggctcacacctgtaatcctagcactttgggaggccaaggtgggtggatcacgaggtcaggagttcaagaccagccaagccaagatggtgaaaccccatccctactaaaaatacaaaaattagccaggcatggtgttgcgcctataatcccagctactcaggtggctgaggcagagaactgcttgaactgaggaggcagtcacaccactgcactccagcctgagcgacagaacgagactctgtctcaaaaaaaaaaaaaaggtaaatagttaagctacagaactgagacttaagcatagaactccagtaagcaaataagcctagcaagaataggctggatcccagttacagagggactaggatatttagtaagctgtcaaacttgaactcagatgcagcaaaaccaggctgaagcccagctttcagaaggtagaggctggactaatatgaaaggtagaaggaaaatgtattatggtgctgtgtcttttcttgcctgaggttgagataagttctaggagctgagcctacactggagataaaacatatgcagagcttgacctgattttggaacatatttgagatattaagttaccttgaaactgttttccaataatcggtccttatttgtcaacagatgacctaattaccatgtgttccctttttctcagtattcgaaggacccaagtcattgatgatgagtcagattactttgccagtgattctaaccaatggttgtccaaacttgagcgggaaaccttgcagaagcgagaggaggagctgagagaacttcgacacgcctctcgactttctaagaaggtcaccattgactttgcaggaaggaagatcctggaagaagaaaattcactagcagagtatcatagcaggtaagtgagcagcactagaaagggtctcaaagaaggaacaggttgaccataaaggattttccctttctagtggatcttttatttttgttgatttaaaaaatgtgtttatttggaacagaaaacatgttaagaatagctaagaaaaaatgtttaaatgagcactcctaccagataattactgatttttgtggtttggtttttttttttttttttttgagatggagtctcgctttgttgcccaggctggagtgcagtggcctgatcttggctcactgcaacctccgcctcccaggttcaagccattctcctgcctcagccccttgagtagctgggattacaggtgcccaccaccatgcccagctaatttttgtatttttagtagagacaggttttcaccatgttggccaggctggtctcaaactactgacctcaagtgatccgcctacctcagcctctgaaagtgctgggattataggcatgagtcaccatgctcagcaaaaaaaagtttttaaaacaatgagatatagtatgggcacagaaatagatcaatgaaacagaatccagaaagagattggtatgtttacattgtgtttgtatgtgtgcatgggtgtgtgtatatatgtatgtgagtttagtaatcaataaagctaacatttttaattgctaaagcaataattaaatatgttattttgggataattgcctgtttagaaaaaaatctaggtaatgtctttatctcagaccattctatgatgctgtaataagtttcactaaagagttaaatataaacaatataaagggatcagaaagaaatacagaattataggagaatataattatagtcttggtgtgataaagctcttcctaagcaagatacaaaatcctgaagtcatgaagatataagatattttaaataaaaaagacagtaccaagttggaagaaaatattttaagtggttttaacagtcaaaggaacaatatccatactatataagtaagaactcttgcaaattaaaagaaaatgaccaaaaactccagcagaaaaatggacaaaaactaaaaacaatttacaagtggggaagtacaaatagccagtaacatttgaaaagatgtttaactagcaatcaggaaatacagattttaaaacaatatatcaattttctttggctcatcaaatttggcttaaattttttttaaaggataatattgcatattgtgtgggtataggaaaatggggatattctgttactgtgaatgggagtattaaaatgatgcagcctacatactgtatgattttaactattcagtagttccagggattagaagagagggaggaataaatagaaggagcacagagaagatttttaaagcagtgaaactactctgtatgtagttataatggtaaatacatgtcattataaatttgtccaaacccataaattgtacaataccaggagtgaacgctaatgtaaactatggcttttgggtgataatgatgtgtcaatgtaggttgatcagttgtaacaaatgtaccactctggtgagggatgctaataatgggggaggctatgtatttgggaggtctcagggaatgtggataacctctgtatattcctctcaattttgctctgaacctaaaactgctctaaaaaataaagcctaaggctgggtgcggtggctcacacctgtaatttcagcactttgggaggccaaggtgggaggatcacttgaggccaggagttcaagaccagcctgggcaacatattgagaccccaccttaaaaaaaagtctattaacataaatacataaacaaaaaagttacaactttttagaagagaatatttaaattgtgcatactgttttttttttttgagacaaagtctcgctctgttgcccaggctggagtgcagtggcgcgatcttggctcactgcaagctccgcctcccagattcacgccattctcctgactcagcctcccaagtagctgggactaccaacgcccgccaccacgcctggctaattttttttgtagttttagtagagacagggtttcaccgtgttagccaggatggtctcaatctcctgacctcgtgatccacccgcctcggcctcccaaagtgctgggatacaggcgtgaaccactgcgcccggcactaaattgtgcatacttttgacttatcagctacacaccacatatcaagataacaatttccttttcccttgtcaaagattttttaaaaaaattgccattttcagacatgaaaaatagtatttcattctaatttttattcacattcctttgctttagttgtatgttagtaagtttgagtgttctgaaaatgtattcatttgcttttttactatttcttttatagagattctagagttctggatatacttatcattttactgtgtcaaatttattcctctctttcagacctcactctccccacgctattttagacttacctcatcatacaaattcttatactttttaaaagcttcaggcctttgtttctgatttttccttggtttggaaattcctcctccattctttgcatttcacatacctacctctcccttgaacctacatgatacaacatgttggatgatggaataataaccactaaatggattgtgcctgtttcatagtaattattacatcccctcatgtatgattcatcatctatacggctttcttaaatctgccacttggattgaaagcctctttaaaaaaaaaaaaaaagcctcttgaaggcaggaacaatgtcttccccaccttttaagctgccttatatatgaggtattcctaacaaacatatattgaattgaattgaaggtcaagtttagcctttcctgttagttgaagcttttcattatgttgtgcctcacaattattattgttatccacaaacgttttgtcaagcatccaacaggagtattgaatagagtagcaagtactgtagagctatagaatgaattaagatagggttccttcagggcttatgatctcttactaactaaccagtaggtttccacaatctttaaatgaaaatcatcacattcttttataggtttagagccagatatccaatgccaacatcataggcatgggataacaggggatgtatccaatgattgtttagatagtgggtactataggaccttagagaaaggattaagcatttttgttctgggccagtagggtacctctttataacttctgagccttcaagcaaagatagaatgcagactagcaagaaggagtggagaaaggactgctgagcagacagaggaataactgtataggttgtattgcgaagatgagctgccatagaatactcttctgtgggtcagggtattcctaggcaacttttttttttctttttgtgacagggccttattgactattgcccaagctggagggcagtggcgccttgaactcctgggctcaagtgatcctcccatctcatcctcccaagtagctagaactacaggtgtgagccaccatgcccagctaatttattttttgtagaaccagggtctctctatgttgcccaagctggtctcaaactcctggcctcaagtgatccgccctctttggcctatgatagtgttggaattacaggcacgagccaccactcctggcctctaggcagcttttctggtcttggcatgtttaatgatcttgttgagcaggtgaatgactgtagcgtgccctatgtattttcttggtattctggaacttttattttatttatttttatttttttttatttttttgagacagtctcactctattgcccaggctggagtgcagtggcacgatctcggctcattgcaacctcctccgcagtttcaagtgattctcctgcctcagcctcccgagtagctgggactacaggcgtgtgctaccatgctcagctaatttttgtatttttagtagagatggggtttcaccatgttggccaggatggtctcgatcccttgaccttgtgatccgccctccttggcctcccaaagtcctggaattacaggagtgagccactgtgcctggccattctgcaatattcattaactcatattccttagggtttttggtgtgagaaggaagttggagtggggagtagggaaggtcatccatagactcctctttatattccaaattttattactattaaagcattttatgttggtggtaagcattctgagcatagaacattaccaattgttgcatccttttggtttattatcacagactagatgagacaatacaggccattgccaatggaaccttgaaccagccactgaccaaattggatagatcttctgaagagcctttgggagttctggtaaatcccaacatgtaccagtcccctccccaggttagtggacctttgctctaactgttaataagaagtttggccccaattttgccttcttttaagtatgtctatttcatagacttcagataccaatcagctctctcaatacacctgtaccaatcagctctctcaacacacctgccaaccttattctctggcccacattttttccatttttattgcagtacttctgacaaattgacttgttttatcttccaagtacttcccaagaaagggttttgttaagtactatagaaatttagacagaaattccatggttcttttgttaatgctctttctcttttttttttttttttttttttgagatggagtctcactctgttgcccaggctggagtgcagtggcatgatctcgggtcactgcaacctccgcctcccaggttcaagctattctcctgcttcagcctcctgagtagctgggactacaggtgcccgctaccacgcccagcgaattttttgtattttttaatagagacagggtttcaccgtgttagccaggatggtctagatctcctgacctcgtgatctacctgcctcaacctcccaaagtgcccagctatcaatgggttttatagggaagctggcattcattaaaagtaaatattcaccaggcgcactttgggaggctgaggtgggcagattgcttgagcctgggagttctagaccagcctgagcaacatggcaaaaccccgtctctactaaaaatacaaaaattagctggccatggtggcgtggtgcctgtagtcccagctacttaggaggctgagtcgggagaatcacctgagcccaggaggcagaggttgcagtgagctatgatcatgccactgcactccagcctgggtgacagagtgagaccctgtctcaaaaaaaaaaaagcaaatatttttgaaaaatatatgtttgggaatggtggagaaaaaaattccaggcagaatgaattgtaggaacaaaggcatgtgtacacaaaaacatgggatatagatataggaatttccaagcacacaaatctggagagggaatttccaggcagaaggtacaacacatacaaaggctcagcagcgtgagagcattgcaggtttggggaatcacaagtaattaactattgttatggactgataagtgtattagtttcctagggctgctgtaacaaagtaccacaaattaggtgacctaaacaacagaaatttattatcccatacctggaggctaaaagcccgaaatcaaggtgttggaaagactacattccctctgaaggctttacaggagaatgcttacttacctctttaagattctggtggctctaggtgtcttttgccttgtagctcattactctaatctctgcctctgtcttcacatggacttcttccccatgtgtgtctctgtcactgtgtgctctctcctcttacaaggatacaagtcattggatttagggcctactataatctaatataacctcatcttaaactgattacacctgtaaagattatttccaaataaggttgtattcacagattccatgaacgtggacattgattttggggggatactactcaacccagtacagtaagcaacacctgatcatgaaagattttttgtcttatgctaatgagtttaggttttgccctaaagtaggcaaagaagggttctggaagaattttaacagaagattggcatggcttccatgcctacgtagagaatggattggagggaagagtaagtaagattagaagctgagaaattgccaaggtagtcattgcaatagcaccatggaaagatgatgccagcccaaattagtattaaagcactagtggagcagtagagagttatttaaagaccaaaagtgggagccgggcctgagatgtagtgatacacatctatagtcccagatacttgggaagctgaggtgggaggatcacttgagaccaggagttggaggctgcagtgagctatgattaagccaccacactccagcctggatgacacagtgagaccccatctctaaaaaaaaataattatcatcataaagactaaaaatgtagatgaagagacctgctggcagattctttaatagtattatcaaaagataatgaggaattaatttaggaaagtggctgtgtaattagagggaacagctgtagtagaaatagaaaaaataatttgggcctcaagattgttcacataccaacattttatgaaattatttatttccagccaggtgtggtggctcacgtctgtaatcctagcattttgggaggctgaggaaggaggatcacttgaagccaggaggtcaagaccagcctgggcaacagagcaagacagtgtctcaaaaaaaattttttttaaagaaattatttatttaccctataatggatcaattctttttcctctttggtcctctgtaaaaacttctatctcctatttagtatgtagtcaattctgccttatgttttgaatagttatttatgtgtctgtcttccactaggctttaagttccttgcaagcaagaaccgtatctttttcatattttatgtctccctagttaatgtgcttttcacagttaagtactcaataaatgtgtatttaatttgtaaaaatgtgtatttttaagatatgccacaattgacaagaatcataaaattgtatggcagaaagatccttagaaatttatttagtccaacttcatccttttccagtttgaaaaactgaaatctttaggggttaaatgcctagggtttcgactaccactagaagttttttcctataagttattttatgttcatttttatttatttttgagacaggatattgttctgtcatccaggctagagtgcagtggtatgatcatagctcactgcagcctccacctcccaggctcgagagatcctcccatctcagcttctcaagtggctcagactacagtagccacgtgccatcataccttactaatttgtatatttttttgtagagaaggagtttcgccttgttgcccaggttggtcttaaacttctgggctcaagcgatcctcctgccttggcctccttaagtgctgggattacagacatcggccatcatgcctggcccttattattatttttaaagacacaggacctcaccatgttgcccaggctggccttgaacttatgggctcaagtgatcctcctgcctcacctcctgagtaactagtgaagctacaggcatgcttcactgtgttcagctttataaattattaattttttaaaaaagataaccccaaatatcatcatgctaattgcctttatttttaaattttaattttggaggacatggtatcgttgctctggaagaaacattaacctttgccattctctgtctgaactgttgccaagactcttcactctcctgtaattacctgtaccttataattctctattctttttatatgatgggagccctgttttagtagtcctccaccctctctttcaggagacaagttcttcatttcagggtaagagaatatttcatgcatccagtagtcagaactgctgcctctgacctgacaacatctgtttggctttgtcatggtgccagcatgtgacactgcccctaagcacatgcagaattgtggaccaaaatgttgaactttcatttagctcacagaattctattgaaaaattatccagaaccaagtatggatcattaagtataaattggaaataattatagctcttttggtgtgatatttgtgctgttgctggaattagtaagcattgtatggagatttcaacattctaattattctttaagatgggccttgttatcatacctgagacttctactgaatgtatactatctctacccttttggccttattgcagacaaagatgggattatttttcatttgttgttgttgttgttgttgttctgagacagagtctctcttgcccaggctggagtgcagtggcacaatcttggctcattgcaacctccacctcctgggttcaaatgattctcctgcctctgcctcatgagtagctgggattataggcacctgccaccacgcccagctaatttttgtagttttagtagagatggggtttcaccatgttagccagactggcctagaactcctgacctcaagtgatccacccgccttggcctctcaaagtgctgggattacaggcgtgagccacgatgcccggcctgggatatatttttctaagaaaaatgttcccaatatgatttcctcattattagcattcgcatcattttgtctacctaccccagattcttgccttataagatagaactgtatgtttgtttttctgtgtagtgggttgaccacacaggtgcagcctcacagaagaaggctttccgttcttcaggatttggactagagttcaactcatttcagcaccagttgcgaatccaggatcaagaatttcaggaaggctttgatggtggctggtgcctctctgtacatcagccctgggcttctctgcttgtcagagggattaaaaggtaagaataaaaatgaatctgggcagtggaagatcttagagtgacataaatttaatttagaaatatgaattggaattagttttcctcaatctagtgatgatttataatactcttcaataaatagaactttgaacaacatattcatgttactgacttggtagcagtatattttaaaattaatttcaaaacatttaaattgacaaatatagtagtagtttttgtactgaatagcttaaacaaactgagcataaaaaggctaagaaagtcataacaaagatagaagactaattttttcatctttggaaggaaatctattgaaaaatcttctcttggctttgctttggaatatactactaagcaaccttaataatttgatcctatttgaaacatagttttgatgcctatttacttattaagataccagcataactgattttattttcctgtccatatatctaactattaatctggctaataatattgagaaactattttattacaaaatgcttttctacaaaagtaggggaaattgagataagtagaggtattatacagctgagttacacctgttactgataataatatttaatagcttactattccgtggtgtcttgtgtttttttcttttcttttcttttctttttttttaaagaccgagtcttgctctgtcaccaggctggagtgcagtggcgtggtctcggctcactgcaacctccgcctcccaggttcacgccattctcctgcctcagcctcccaggtagctgggactacaggcgcccgccaccacacctggttaattttttgtatttttagtagagacggggtttcaccttgttagccaggctggtctcgatctcctgacctcgtgatccgcccgcctcggcctcccaaagtgctgggattacagacgtgaaccaccgcgcctggtgtgtttgtttcttaattcagtttttaaaaatagtgtttttcttggcttttattatccatgtaaatggaaaactgtaaagcacagaaaagtagctagaaaaagaaagattacctataatcccacaccaagaaaccgctgttattagcattttggagtgtttctatctttcttttttttgagacagagtcttgctctgtcacccaggctagagtgcagtggcctgatctcggctcactgcaacctctgcctcccaggttcaagcaattctacagcctcagcctcccgagtagctgggatcacaggcgcccgccaccacacctggttaatttttgtatttttagtagagatgaggtttcaccatgttggccaggctggtcttgaactcctaacatcgtgattcgcccaccttggcctcccaaactgctgggattataggtgtgagccactgtgcctggcttctttctttctttttttttttttttgagacgaagttttgctcttgtttcccaggctggagtgcaatggtgcgttatcagctcactgcaacctccacctcccgggttcaagccattctcctgcctcagcctcctgagtagctgggttcacacgcatgtgccaccacgcctggctatttttgtatttttagtagagacgaggtttctccatgttggtcaggctggtctcaaactcccgaactcaggtgatctgaccacctcagcctcccaaagtgctgggattacaggtgtgagccaatgcgcccggctgtttctatttttcttgtgtaaattgttaaatggtgagagcatgatatatatgtttgtgtttttcttctttcacttatcattacaacatatgtcttttgcttcttatttcttttttttttttgaaatgaagtcttgctctgtcgccctagctggagtgcagtggcgtgatctcagctcactgcaagctccgcctcccaggttcacacctttctcctgcctcagcctcctgagtagctgggactacgggcgcccgccaccatgcccagctaatttgtgtatgtgtgtgtgtttttactagagatggtgtttcaccgtgttagtcaggatggtctcgatctcctgatcttgtgatctgcccgcctcggcctctcaaagtgctgggattataggcgtgagccaccgtgccaggccatttcttatttttttctattagaattttatatgcctggcaatgtcccaactcataacagtaaaaataccttatatttaaatagaattttagttttcaaggcagtagctctatgaaatacacgcatgtgctgcataacgacttttcaatcagcaatggaacacatgtacaacagtggtcccataagattagaataccggccggtcacggtggctcatgcctgtaatcccagcactttaggaggccgaggtgggcggatcacaaggtcatggtgaaaccctgtttctactaaaaatataaaaattagccaggcgtggtggtgtgtgcctgtaatcccagctactcaagaggctgaggcaggagaatttcttgaacccgggaggtggaggttgcagtgagccaagattgcatcattgcactccagcctgggcgacagagtgagactccatctgaaaaaaaaaaaattataatactatatttttacgctaccttttattttctttctttctttcattttttttttttaagacaggatctcgctctgttgcccaggctggagtgcagtggcatgatctcggcttgctgcaacctccaccttccaggttaaagcattctccagcctcagcctctcgagtagctgggattacagacatgcaccaccatgcccggctaatttttgtatttttagaagagatgaggttttgccctgttggccaggctggtctcaaactcctgacctcaagtgatccacccgcctccacttcccaaagtgctgggattacagacatgagccaccatgctcagcctttactgtaccttttctatgtctagatgtatttacatacgcaaatagttaaccactgtgctccagctgcctacagtattctgtacagtaacatgctgtaccagcttgtaacttaagaataagaggctgccgggcacggtggctcacgcctataatcccagcactttgggaggtcaaggtgggtagatcacctgagttcaggagttcaagaccatcctagccaacatggcgaaaccccatctctactaaaaataacaaaaattagcggagcatggtggtgcatgcctataattctagctactcgggaggctgaggcaggataattgcttgaacccaggagacagaggctggagtgagccgagattgcctgggtgatagagtgagactcagtctcaaaaaaaaaaaaaagagcaagaggctataccatagcctaggtgtgtagtaggttatactatctaggtttgtgtaagttcagccaatgaaattgcctaaagacacatttctcaggacatatccccattgttaagcaagatgtgactgtagattaggccagtattattatagtctttgacaaatgaggatactgaagcaggcaaaggtaaaatggattgccctgaaatatgaagctaggtgatgacagagatggaactagacttctggttttcagagtgctctttcccctctactgttcaggcttcagacgtttctctactttacttaaaagcaaatgattatcagcatttaggcataatcatttctactttggtagtttcactattagctgccatttctctattgtgttaaggtgcactacaccttttctcccctcttgaaggtcaggtttccttgctttggctcctaattgtttcatagttcatgtctgtaaacgccattagaacaagtgcatgggaatccgcttctgctccaggatgatcaaaaccttagatgtctgttcttctcattgagttttctgcaatttaggtgtcttgcttttccaaagtagaaaactaaacaacttgccttctgctaagggaatcagagtgtttacatttctctcatcctatttggatctgttattcaaattttctcacagaagcgaaagaatgagcagcatctagtacacagtcactttattttaatcccacagaaataaagtaggtggttttgccacatttgtgggaccattttcccagtaattcttcaggttatttggcctagagggaagatatacattggttcattccccatatcgtgcacctactgtgtgcctggcactcttccaatttatctatattgggaaaccaaggatatgaaaaattcatgaccccattttccattataagaatgggataagagggatatattatcaaggtactttatttaatttggtgggaggggaaagagaaacatctttttgtaatccttggaaagtagcaattaaattctcctgaatacattctgttattctctttagaggttttttcaaactagtccacaagttgtttaataatcctcaaagaaaaccccaaatacaatttaaaaatgcaaatggagccgggcatggtggctcatgcctgtaatcccagcactttgggaggccgaggtgggcagatcacaaggtcaagagatcgagaccatcctaacatggtgaaaccccatctctactaaaaatacagaaattagctgggtgtggtggcacgtgcgtgtagtcccagctactcaagaggctgaggcaggagaatcgcttgaacccaggaggcggaggttgcagtgagccgaggtcgcgccactgctctccagtctggcaacagagcgagactccgtctcaaaaaaaaaaaaaaaaaaaaaaaaaagcaaatgggtgtggttctaattgaagagtaaagataagcgtttttatttacttaaattattttaaataaataaaaagtaacattcttgggagttgtgtgtagatgaggatttttctgtcaggttggagaacaaatcaactaatcttctagggaaaggttagcctttgactcaagggcaaggatttccatatctctaatatgatttatatgccttgaaaatataggatttgtattggagaagcaccaagactggtcagggttccaaatctgagttgtagggatcaggtgaaaagcagtcaagagttgagagagatgacttgtcgctattctgatggaggagaaattagtggacagagttcatcctcaagtgaaaagtattgtgagagaaaagtgtttttgacaaaagatactgctcttgagaaggcatcatctatagacctcttggttcaactggataatttgctataggatttgttatatattatgggatattccaggaaactagaatttatatccttcccactaaatttctatttgtttaagggtggagggcagatcctggtacaccccccacagaggacgactttggatagcagccacagctaaaaaaccctcccctcaagaagtctcagaactccaggctacatatcgtcttcttcgtgggaaaggtaacagccgcatattctcctttcaattttactttatggagagaagtcattgacgttcatcttctttcacttccttctttctttggctttttctttgttaaaagagacttttaatctttgtatatgtttgtttgtttagtggtaaatcattgacagcgttcaaagcattaatctgtcaaaacagtgcaaataaaaatatcaatttccaacacaagaaatcaactagtcttaatttttttatctgagaaaatcatcttctttactctaaaggtaaaatgactagtgtaaactctgagatccttacattgggaagaacaaccacaaataggaattttcattgagagtggcctaaatagacacctactattggatttgtacaaatcaaagttgattgatttaagcaacgtattttgggaatcaccccaagaatactaactttggatccttaaaaagacttctgacctttgggcatcctgtttttcctttgtgttatccagctcatacagttgttttgagggtagaataaaaggacaactacacaaccatctttaaaggtttttaagaaacaaggcttaaagaatcactaggaataaaaagttcatgcttccttaaaagcacttttcttttttatttttttttgagacagagtctcgttctgtaaccagactggagtgcagtggcgccatttctcctcactgcaacttccgccttccaggttcaagtgattctcctgcctcagccttccgagtagctgggaccacaggcgcatgccaccacacccagctaattttttgtatttttagtagagacagggtttcaccatgttggccaggctggtcttgaactcctgacctcaagtgatctgcctgccttggcctccaaaagtgctggggttataggtgtgagctactgagcccggcctaaaagcacacttctattcctattgatatggactggcttgttttaaagacattcattcttatggttttaaccacattttgatgttttttttttcttgtcacctgtaactgccttactttgcttccaaaactcatcactgccaaactccaatctgatccaatggcgtatagtagaatcgatttgtattaggatgaatttgtggggtccttgaactttgatggtatgagggcaaaggaaaaattttctagcttaacatgtggatagtggactaagccagccactcactagatttttttgctaaaatgcaaacagttgtgccaagtaaatttcactgttttccttatgtctacaaatagataatggaaaaagttattaatgtttgttcagaattgaaaacagattcctgagttccaagatcacaaagaaggaaatttattcaatatttttgttattcctgattcagatgtggaatttcctaatgactatccgtcaggttgtcttctgggctgtgtggacctaattgactgcttgtcccagaagcaatttaaggagcaggtgagtaaagaatactttttttttttagagacagggtttcgccatgttggccaggctggtcttgaaagcactttaagaggctgggcctcttaaaagtgctgggattataggcatgagccaccacacccagcctggtgcatataaatatctgtataaaaagctgtttccaggccgggcgctggtggctcaggcctgtaatcccaacactttgggaggccgaggcaggtggatcacaaggtcaggagatcaagaccatcctggctaacacagtgaaaccccatctctactaaaaatacaaaaaattagccgggtgtggtggcacgtgcctgtagtcccagctgctccaaaggctgaggcaggagaatagcttgaacccgggagatggaggttgcattgagctgaggtcctgccactgcactccagcctgggcaaccgagtgagattccttctgggggaaaaaaaaaagctattgccacaatgcagctagcaagtatatagggtcttcatcccttaccaaaaccttgcttcttttgaagaaacccttgattatcccttgaattattttgattggggggtgggaatactaggatctgttattgctaattctggagcttttggtccaggctattgaactcatgataggcaaatgtatttgactctgattgccaggactgtgccatatttgggaggaggtatgtgtatttatgtatgaatgtacatatgtatgaatgtacatatgtatgcatttatatattttaatttttatcactaaagattgaactgacaggtcgggcgcagtggcttacacctgcagtcccagcactttgggaagccaaagcgggtggatcactttaagtcaggagtttgagaccaacctggccaacatggtgaaaccccgcttctactaaaaatacaaaaattagcctggtatggtggcgcatgcctgtaatcccagctactcaggaggctgaggcaggagaattgcttgaacctaggaggcagaggttgcagtgagctgagatcgtgccactgcactccagcctgggcgacagagtgagactctgtctcaaaaaaaaaaaaaaaaaaaagatgggcatggtggctcacgcctgtaatcccagtgctttgggaggccaaggcgggcagatcatgaggtcaggagatcaagactatcctggctaacacggtcaaaccccatctctataaaaatacaaaaaaaattgctgggtgtgatggcacgcgcttatagtcccaactattcgggaggctgaggcaggagaatttcctgaacccagaaggcagaggttgcagtaagccgagatcatgccactgcgctccagcctgggcaacagagcaaggctctgtctcaaaaaaaagaaaaaaaaaagattgaactgatgtaactaaagtacatttttgagcagcagagggagccgaaatactttaacttaattagaaaattcctgaaatgtaagacctttatgtttagacacagaactagcagaaatccaaaacaggaaaagtccatccttgaagcacaaacagtcttacctatcagtatggttttcctgttctttgaacagttgctttagataatagggcttccaccagtgtgctgaagaaaaagagcttcagtttcatttttcccagcaaattctctttttcagacttacttacctttcattactgttattactgtctactgttttcctttactgttcccagccattttaccctctctattctttactctttatttattttttttggaaactgggtctcactctgtcgtccaggctggagtgccaatcttggctcactgcaacctctgcctcctgggcttaagtgatcctcccacctcagcctcccagtagctgggactacaggcaccacaccaccatgcccagctaatttttgtatttttagtagagacaagatttcaccatgttggcgaagctggtcttgaactcctggcctcaagtgatccacctgcctcagcttcccgaagtgctttgattataggtgtgagccactgtggccagcctactgactgattttaactaacacttgttatccctctagatttatgtctttcatttccttgtgagttacctcctctgcctcctctgattatgtgtgtgagtacaatgcatgcattttggtgtgaattttgagttctagcgttttgttcttcccttagtatctgatccagacctaggcaaaaccatagacacatggaggctatcccccacactcttgtgcctgcactatccctctgagctttttgcccatttttttcaatgtctactttcttcctcccccctctttttttttcccccagtctagaagtaatattataaaaataccttacactggtgtaggctttacagttttagagattcacagtcgttaacagcttagtataacatactgcattatgttttcttcctgggatatgtatttgcgttctaaaagagaacccaggagcatctggcaatgtggatgatggtttttggcaagcggccttgctttattttctcatctattgatcaagcaaactaccacctgatacaaggtcaaatgatttcaatctctagatagccaatcttctttgtgccacaaatttgtgtagagaagggtaggaaactataatcctgatctatggaatactatgaaggttacaggaattagaaatctaattaaaacaagtcttgttgatttctgaaggatacctctttttcatgatacttctcctttaacttatattgtatctcatttcctgaggttgctttgaacagcatgtagaagtgcaggaatcctcccatatgtttccagctagaggtgctggcaactctctttatgaatgtctctgatatataacattaaaatataacagaagccactaggcttcatcagacatgggaatcccatacccattttccctatggttggcttttctgtaactttttcccactgtttcttttttcttttttttgagacggagtctcactctgttgcccaggctggaatgcagtggtgcaatcttggctcactgcaacctctgcctctcaggatcaagcgattctcttgcctcaccctcctgagtagctgggattacaggcacataccaccacacctggccatttttttttgtatttttagtagaagcagggtttcaccatgttggtcaggctggtctcgaactcctgacatcaggtgatacacccgcattgacctcccaaagtgctgggattacaggtgtgagccactgtgcctggcctccactgtttcttttctgtgtttaagggtagcatatgaatttatttagaattgatgttagccctatttttatcttatttattgagtaaagagtttatcagttttaaaagttgtagcttttgggttgggcgtggtggctcatgcctataatcccagcactttgggaggccgaggcgggtggatcacttgaggctaggagttcgagaccagcctggccaacatggtgaaaccccgtctctactaaaaaactacaaaaattagccaggcgtggtggcaggagcctgtaatctcagcttctggggaggctgaggcaggagaattgcttgaacctgggaggcagaggttgcagtgagccgagattgtgccactgcactccagcctgagtgacaagagcaaaattctgtctcaaaaaaaataaaataaaaataaaaaaagaaatgtagttgtctaatctattataccagcctcattcttgttttctgaatgaatgagttgagagtttaggaataatggctcttgactagcatttaccaaactattccatggcataggtgttctctgaaacacaaatttgggaaatacctttggattaaacagatctgtttactgtagaacatctcagagcccttaatatgctagtgtggattatgactctctatgaggtggatataacatgcagtgttctcaaaactttgagcataaattaatcccccacccaaacatgcactacctatttacatactacagaactggtatcatggtatttacagtttaggagtgttagtctaagtatgcttgatttttctgtattctcataggtcaactcactgagagagaaccatctaggaagtagtttcctaactgtgacctgtgccttcccttcagtatctccatattcatttatcacccagttgaattgcattttctttgaaaactaatgtggatctagtaatttttacttcaactgaaactaacttcctgtgtgacttggaccacattttgcctttacatgctgttcctttttcttttccccccaaaattcagtaatttacttctgacctcacattcttggcctttctttgataagttaaaatacactaaaccctcactatttttggcatagtgtgatcatttagtcctcttaaaaaaagaaaatcgaaaaggttttgttagtggttgttttaaaatcaagtgcactacactgttaaatggctttaaaaatatgtgctttctcctgagccatgaactagtcttcctttttatcttctaagattagtatggccaacatgactaatttgtgccagaaaaaattcctctagatcctcaaccctcctgagtaatggcagaggatcagcctagagaaggtagaagtgatatagaaaaggctatgggttcaactcagggtaaaaaggtagatgagagccatctcgttaaagcttctcctgtgattcccctggaaggagcccatgctgtttgccagcattttatctgccagcagcagatgtaagctctcaaaaacagcagggaggatgttgactgcaacaatgcatcaaggctgtggtttgtaacctcaatagtaaggcagttaaaactttttttttttaacaaagacattttgattgccaaatccataaccattagcagctgtggtttgaacagttctctagacctaacaagttttcaaacaaaaagttgagttggtggcttttgtttctacgtgtctgtgttgtgtttgtgctatttatatccctgccttcaatagaaaatctgatttgtctgaaatctccaaggtcattgattattctatttcttctgaactgaatccattcctttcctgccagcttactgaccctttagtctatttgatcttacagcttttacaatagccaagaccctatcttcaaggaattatgctgaagcagttatactgctgggtgcctgtttccaataattgacggcagtagacttgtagtcttccaatagggaagagaatattacttcttcctttttctagaaaagtatcttcaggatctaggagaatttgctggaagaaaagtaagcaatttttaaaactttaaaaaaaaaagagtatccaagcaacatagatcttcaggaagattccaagtatcacttcgtttgtggaaatcatcagcttctatcaccaatgaattgtctgtgagtctgagagatgagaaattagaaaatgaaggatttaatagtcagtattcaaaccaggcactggaattcaaaatgcagtccacaaattctcttttaaaatatgtgaaaatgtcctgtctgttgtactgagaaaatctgccaatatatagacctcaaaatattccgataacagccctcacgatgagggctgttatctgagactcaacaagaagaaaaattgttatgttactaacaactagcttaaccctggacaattcattaaaatcacagctcacttgagtgagatatagggaatgtagttttggaattctcttgaagactggaacattgacaggctgggcacggtggctcacgcctgtaatcccagcactttgggaggcggaggctggtggatcatgaggtcaggagttcaagaccagcctggccaacatggtgaaaccctgtctctactaaaaatacaaaaaaaaattagctgggtgtggtagtgggtgcccgtaatcccagctacttgggaggctgaggcaggagaatcacttgaacccgggaggcagaggttgcagtgagcagagattgcaccactgcactccagcctgggcaacagcgtgagactccatctcaaattaaaaaaaaaaacaaaactggaacattgactagagtttctagatcaaaacagactgtctttagggttatttgcagtctgggtattaagtacccacttaaatggtttcagaaaccatttatattatatatatatatatattttttttatccaaagagcattgtgttttcttttttttttttttttttttttttgagacggagtcgtactctgtcgtccagggtggtggagtgcagtggagtgatcttggctcactgcaacctctgcctcctaggttcgagcaattctcctgcctcagcctcctgagtagctgggattgcaggtacgcaccaccacgcccggctaatttttgtatttttagtagagacagggtttcaccatgttggccaggctagtcttgaactcttgacctcgtgatccgcctgcctcggcctcccaaagtgctgggattacaggcatgagccaccatgcctggctgagcattatgttttctgttgtacttatcctgaagagagatgggaaatattaccacttttccatgtatttagtgttttggttttcatctgaaaataaacatgaaattcttaagattttcatatatatttattcattaataaatacttgagccaggcgcagtggtttacgcctgtaatcccaccgctttgggagaccgatgcaggcggatcactcaaggtcaggctcttgagaccagcttgaccagcttggtgaccatctctactaaaaatacaaaaattagctgggcatggtggcgcacccctgtaatcccagctacttgggtcactgaggcaggagaatcacttgatcctgggaggcagaggttacggtgagccgagattgcgccactgcactccagcctgggtgacagagcaagactctgtctgaaaaataaataaataaatacagccgggcgtggtgactcacacctttaatcccagcagcttgggaggccaagatgggcggatcacaaggtcaggagatcaagactatcctggctaacatggtgaaaccccttctctactaaaaatacaaaaaattagctgggcgtcgtggcatgcgcctgtaatcccagctactcgggaggctgaggcaggagaatctcttgaacccgggaggtggaggttgtagtgagccaagattgcgccactgtactccagcctgggcaacagagcaagactccatctcaaaaataaataaaaataaataaataaataaataaataaacacttgagagcctattataaatcaggcactgttctaaacactaagagaaacaaaaggatgaatcaactgtagattctgtcctcagatgtttgaaagacttctaggtagatatgtatataaaccaaatataaaataaaaagtgaacctaactgtcttaaaagaagtaaagactgtctctgagaaaaataaaggagggaaagcttgcttctagctgggaaggatcccaaaagactttatttaaaaagatggttttgaattagctttgaaggatagtaatgaaatctatcactttttgatcagttattatgtgccacattcatcatgctattttctaatccttataataattccaagcagggtgtcatttcccctcctttagggatgaaatatcatccctaaagtgtcaagagagttcaaataacttgtgtaatgtccagggtgaggagttcgagaccagcctggtcaacataatgaaacctcatctctactaaaaatacaaaaaaaattagccaggcgtggtgatgtgcacctgtaatcccagccacttgggaggctgaggcaggagaatcacatgaacccaggaggcagaggctgcagtcagctgagatcgcaccattgcactccagcccaggcaacagtgcgagactccatctcaaaaaataaataaaaaataacttatgtaatgtcagttaatggtagagttatgattttgctgttcaagtgtttctactgagatggtagaaaagcatattacaaggatgaggagtaatgggagcaaaggcacagaggtgaagttatcggcctctatggagaataatggcaaaccagttcattgaaagaagagtgtgagtatagagcaagcttgtccaagctgtggcccgtgggatgcatgtggtccaggacggctttgaatgagaccaaacacaaatttgtaaactttcttaaaacatgagattttttgtgtgtgatttttttttttaaagctcatcagttatcgttagtgtattttatgtgtggcccaggacaattcttccagcgtggcccagagaagccaaaagattgaatacccctggtatagaggaataagcagcaaacaaaaaatgaaatggggagtctctctgaaactaatctgcttctgggactgcccaattaaaaaaaaattaaaaagggctgggcacagtggctcacacctgtaatcccagcactttggaaggccgaggcaggtggatcacctgaggttaggagttcgagaccagccagaccaacatggaaaaaccccgtctctactagaaatataaaattagctgggcgtggtggcgcatgcctgtaatcccagctactcaggaggctgaggcaggagaatcacttcaacccaggaggcagaggctgcagtgagtcgagattgtgccattgcactccagcctgggcaacaagagtgaaactccgtctcaagaaaaaaaaaaaaaaaatgaaaaggtaggtttgttcagatgatagatagttttgaatgataggcattcaaatctatcaaatgatagacatatcagttgtgggatgggaaagagtgttttgaagtttttttgaggcattaacatgatctgaggcttgcttgagggaaaactaatttggcagaaatgtggaagatggagtggagatattctgaagatgggaagaccagtgagaagacagttgtagtccaggatagagatgtttgaaaaatatgttctaggataatgccaatgaaatgaggcaagacaggaacaatgatgcaaggggctttatgtaggtagaatcaattactggatatgatgccttcattttacctttaagtaaaccaaggcttagagaaagtggtctatttgatctagaaagaatatgctgtagtgtcgctatctacttggaatctgttcaggactccttggtttgtcatctagtctaccatgtaaaccaagtggcaacttatcttctaatttaagatattattggccaggcatggtggctcacgcctgtaatcccagcactttgggtggctcaggtgggcaggtcacttgagcccaggagttcgagatgagcctgggcaacctggtgaaaccccgtctctacaaaaaatacaaaaattagctgggcatggtggcatgcacctgtaaacccaactactaaggaggccgaggtgggaggatcccttgagccggggaggcaagggttgcagtgagcagattgcatcagtgcactccagcctgagtgacagagtgagaccccatctcaaaaaaaaaaaaaaaaaaaaaaaagatgccgggtgcagtggctcacgcctgtaatcccagcactttgggaggccatggcgggcagatcacgaggtcaggagttcaagaccagcctggtcaatgtgatgaaaccccatctctgctaaaaaaaatacaaaaaaaatctgccgggcgtggtggcatgtgcctgtaatcccagctactcggaagggtgaggcaggagaatccttggaacctgggtggcggaggttgcagtgagccgagatcgcgccactgcattccaacctgggcgacagagtgagactctgtctcaaaaaaaaaaaaaaaaatattattattgcttaggatattatataatcatacattcattaagtatttattaactatctgtcatgtgccaggcactgtgttaaatactaaggatccagagttttaacaacattattccatcccctctagatctttaagtatactagatgaaactgagacaagaaaacccaaccataataactatcacatgaatagtggaatacactaaggaagggacccaactgttaactttgcatggctggaagtgggatgggagggggagtgtaaaggaagcttcttaaaaaaaaaaaaaaaaaaaaagacaagtcctgcagaagcaatgcttcctggaataccataatggtagattgaaaaaaaaaaaaaacctgaagaaagtaaaatttatattttcttcaataaaccattctacatcatgtcaccatgcccttgtccactaggacagctcctgctcatcctttaaaacatctcaggctgggcggggtggctcacacctgtaatcccagcattttgggaggccgacgcatttggatcacctgaggtcaggagttcgagaccagcctgaccaacatgatgaaaccctgtctctactaaaaatacaaaaattaaccgggtgtggtgacatatgcctgtgttcccagctactcaggaggctgaggcaggagaatcccttgaatccaggaggcggaggttgcaatgagctgagatcgtactattgcactccagcctgggcaacagaacgacactccgtctcaaaagaaaaaaaaaatcagccaggcacattggcttacgcctgtaattccagcactttgggaggccgaggcgggcagatcacgaggtcaggagttcaagaccagcctgggcagcatggtgaaaccctgtctctactaagaatataaaaattagttgggcatggtggcgggcgcctgtaatcccagctactcaggaggctgaggcagagaatcacttgaaccaaggaggcggaggttgcagtgagctgagatcgcgctactgcactgtagcctgggcaacagagcaagactccatcaacaaaaaaaaaatctcagatgttactctctgaagtcttccctaaccccagcccatttcctccctaacaggattaatttccttctttgggttcctactgtgttcatacttctattactgctttttttttttttttttaatattgacatgtagttctttaggtgaccatctatgcctttttttttttttttttttttttttttttaataaggagtctcactctgttgcctggctggagtgcagtggcgcgatctcggctgcaggttgtgtgccaccacacccagctaatttttgtatttttagtagagacggggttgcaccatgttggccaggatggtctccatctcctgacctcatgatctgcctgcctcagcctcccagagtgctgggattacaggcatgagcctccaggcctggcctaggtgaccgtctatgtcttattcacctttatatcagtgtgctaacatagagcctgccatgtagtaggtgcacagtaagtggtcatgacaataaatagagagggagacaatggtagatatatgaaaaatcttggccgggtgtggtggctcacacctgtaatcccagcactttgggaggctgaggtgggtggatcacgaggttgggagttcaagagtagcctggccaacatggtgaaaccctgtgtctactaaagattaaaaaaaaaattagccaggcgcatacctataatcccagctgctactcaggaggctgaggcaggagaatctcttgaacctgggaggcagagttgcagtgagctgagattgcaccattgcactccaacctgggcgacagggtgagactccatctcaaaaaacaaaaaagaaaaaaatgccatatgaaaggatttgaactgtgttctaaagataatcatatgaagtcgtgttactttgttttttttttttgagacagagtctcactctgtcgtgcaggctagggtgcactggtgcgatctcggctcactgcaacctccacctcccaggttcaagcgattctcctgcctcagcctcctgagtagctggtattacaggcgcacgccaccacgtttagctaatttttttgtattttcagtagagatgggttttgccatgttggccaggctggtctggaactactgtcctcaggtgattcacccgcctggggttccctaagtgctgggattaccggcctgagccaccacacccagccaaagtcatgttttacgattgtcctggcagctgtaggaaggatgtactggatggggcaagcctgaaaacagagatgatttaggaaattatggttgtccaggtgagttatgatgaagatctgcagcaatgctgtgtcagttgagttgaagagaaaggatctgatgattggaatgtttaggaggtaaagtttgtaggacttagtaattttactggatatgaagggtgagagaagtctaggatcaacttgggtttcttttttgttctaaaagatatgttatttgataaaggagtattgttgacattaataacaccagattgcttgacaatgaccttaccttgatatgttaagtgaagtcaaagatctctcagagcactgcctcagaagttttcagttgagtcagactagccattgggaaaataaaatctaaaattggcacagcccttaactcaagagaagtcttcagcattctgaggtaatagtctcagagtggactttgttggttgaagaccttaccatgtactgtcattcattcattcatttatttattttgagtttcgctcttgttgcctaggctggagtgcaatggcacgatctcagctcactgcaacctctgcctcccaggttcaaacgattctcctgcctcagcctcccaagtagctgggattacaggcatgcaccatcacatctggctaattttgtatttttagtagagacagggtttctccatgttggtcaggctggtctcgaactcccaacctcaggtgatgcacttgcctcggcctcccaaaattgtctttaattaaaagcaactttcttctggtgttcactagtttaagttggagtggaagcctattatattaaaatgaagaccaaaaataattgtcatgagtgggtgattcccagttaggccttgaagaatcaggccagaaaagttatgaggttaattttagagaaaatatacttgtttgagttcttttatgtggaggttctagcatacgattccacagggcacaggaaaccacagtggaaatgttactgtcgataaaatgagacctggttgtagctgcttcaaccagattgtcttccacaaatggctataagatctgtaagtttgtgtgtgtcttatcacttatttctttcacctggtacatatatggattgtctctgtagcattgagctggaagcccctgtcttagatactaggcatgtgacttgaattgggttactggtatatgggagttcaactatcccactttgggccaagtggtatgatctttattcaaccctagtcaaatattcagtcgtcatctggtcaaagtattatgatcagtaggtcaccctgaagtaagaaaacgtttatcttccagtagagtggggcctggggtggtagttatcctgtgacaccttgaattgctttgaaggaaaatataaatgagaactgtttatcacagagcacagttgcttgcgggatatgcttccttggatctgttcttgcacctctttatcagactcatttccttctctctttctgcatattatcacctcagtcttcttggagttggttttcagctaacgagatttcagaccctgatttcatgttctatctagttcctcaaaattcagaccaagaatgcctacagcaaatatatgttctttgttaatgaattccctattattgttgctttagttattagttcttcaaataacaacttataaatcttttttttttttttttttttttttttttgagatggagtttcactcttgttgcccaggctggagtgcaatggcgtaatcttggctcactgcaacctccacctcccaggttcaggtgatcctcttgcctcagcctcccgagtggctgggattacaggtgcccgccatcatgccggctaattttttgtatttttagtagaaacggggtttcaccatgttggccaggctggttttgaactcctggcctcaagcaatccacctgtctcggcctcccaaagtgctaggattacaggcatgagccaccatgcctggctaacgtataaatcttatatctggagacagatataagatttacagatcatctgggaatttgttgtgaagagtgacatagtttaggagttattgatcatttcagtacaagaatgaataagaatgaaggggaggcttgaagatttggtgaaaatgcccattttccactgaatcagtggtggttgacaaaaactgctaaccaattttttctcttatgaaaatggcaaaagaaatttatatatatatacatatttatttagtcctctaaaaaaaataaaattagacaggtctggtggtgtgcacctgtagtctccagtacctcctgagtggcttgagccctccaggtcaaggctgtagtgagctacgaacacaccactgcactccggcctgggtcacagagtgaaatctcaaaataataattaattaataataaatataaaataaaatgtgacatccagagcttattcacattcttcacctcccttctcttattctttctctgggtaatctgcattttagttttctgactttcagaccagatatcccttacttgtgaggatacaatgtaagtatatagtggcttgttagtatgtaatgtggtctttagtgtccaggccctggttatggggattgtggttgtctttttttttttttggaggtactgaggctctgccaagctaacttcgttttaatgcatttgataatgaaaaataatctcttcttccaatgcataggctttactttattccttgtaggccactttgcttttcacctctgtttcttgtaagccccttgaagttcagtgctagtagtaggaaaagggatattcacctggaactttaatttgagattcatctgggaaagttgatttttatgtttgtctttattgtgaggcatgatgggtccaaggaacctattgttatttaatttgtccaccatttttccagtttttcccactatttaacattttcttactctgttaatacacatcagggtggtttttcttaaacatagagccatattgactacttgccaagacacaagcttagggataacacattaagagtaatatctacttttacttagagttatagttctaagagtgtacaattcccagcatgtgtgtattcaccatgaataaaataacgttaatgcacaagttggtaaattcattttttttttttttatttttgagaccgagtctcgctctgtcacccagtctggatggagtgcagtggtgcgatctcggctcactgcaagctccgcctcccgggttcacgccattctcctgcctcagcctccggcgtagctgggactactggtgcccgccaccacgcctggctaattttttgtatttttagtagagacggggtttcacagttttagccaggatggtctcaatctcctgacctcgtggtccgcccgctttggcctcccaaagtgctgggattacaggtgtgagccactgcgcccggccaattcattgcgtttttattcaacaagtatttattgattgcctgctgtgaactaggcatggtcctagatgctgatgagtaaacaaaacaaaaatccccgtcctcatggagctttcatcctagtgagtcgagaccaagtaaaagttctaaataagtaaattatattgtatcagacgatggtaaaataaggctggagagggccgggcgtggtggctcacgcctgtaatcccagcactttggaaggccgaggcaggtggatcatgaggtcaggagattgagaccatcctggctaacacggtgaaaccccgtctctactaaaaatacaaaaaattagccgggcatagtgccgggcacttgtagtcccagccactcgggaggctgaggcaggagaatggtgtgaacccgggagatggagcttgcagtgagccaagattgccccactgcactccagcctgggcaacagagcgagactccgtctcaaaaaatatatatatataaataaaaaataaggctggagaggtagtttaagagtgccaagtttgtggggaatttggtgctctgattttaaatagggttatcaagaatattcactaaaagttgacacttcaacaaagttctgaaggaagagagggaagaagccatggaaatatctagggtgaaaagcattccaggaagaaggaaaaggcaagtgcaaaaaacctgaggcaggaacaacaaggaagccagtgtggcaagagtggagtgaaagtgaaggagagaagtaagagaaggtatcagagaggaaatggggggccagattgtctatggacttgtaggtcatggtaagcaaggacttagacttttattctgattgagatgaaaacccgttggagagttttaagcagaagaatggcgtgatctgatacaaaaaaaaaaaaaattagttctggcggctgtgttgagaatagaccaagagggaagttaagggcagaaacagaccacttaagaggttattgcagaagcccagggagacattatgatggcttggaccagggaagtagccattgaagtcttaagaaatggtgagatattggatatactttggcttttctttgagacagggtctcactctgttgcccacgctagagtgtgtgccactatgcttggctaatttttttaacgttttattttttgtagagatggggtcttgctatgttgcccaggctgatcccaaactcctgggctcaagcaatcctcctgcctgggcctcccaaagtgctgggattagaagtgtgagccaccgcacctagccagagaaaagaattctatctttggatggcaagagtgaagataaaaaaaaaaaagaattctatcaagttctactacagatagatcaagttctactacagatagatcaattaagatgagaactgagccaggcacggtggctcacgcctgtaatcccagcactttgggaggctgaggcaggtggattacctgaggtcaggagttcaagaccagcctggctaacatggtgaaaccctgtttctactaaaaatacaaaattagctgggcatggttttggacgcctgtaatcccagctactcgggaggctgaggcaggcaggagaattgcttgaacccaggaggcagaggttgcagtgagccgagatcacgccattgcactccagcctgggtaacagggtaagactccatctcaaaaaaaaaaaaaaaagatgagaactgcgaattgaccgtttgatttagcagcatggaagtcaacagtgacctttacaagaatgattttgatggaatgatgagagtgaaagcctacttatagtgaattcaagaaaaaagtaggagaggaattaaaggcagggagtacagataatcttttgatgaattttgttgtaatgggaatctgagaaatgagtagtagctggaggaggatgtgggatctggataagagattttgtttcatgccagacattacagaatgtttgtgtgttaataggattgatccagtagagaggcaaaaactattgacatggaagaaggaggagagattggctgaaatggtttatggtgttggaaaagcagagctgttgattgtcctttgcctcaatggtctctaagccacagggaaggaaaaacaggaaaattaaagagatagtaattatgaatgctgctgctctggtctctgtagaattaggtttggagatcttgatggcagcctctggttttatttgtgccaaagcacctcagcatggatcttgtgcagagcttatttccttctaatacccagcaataacagctgggccctgtttttctttggcttctgaagataaaagggataagaaagaagagggtttacctttgtatctgtagccttacttttctaccgtgaacatttgaccctgcctattaatatgattgtggctgatagttaatattaagtttgttttattggctgggtgcggtggctctctcctataatcccagaactttgggaggttgaggcaggagaatcatttgggtccaggagtttgagatcagcctgggcaacatagagagaccccatctttaaaaaaaaacaaaacaaaaacaaagtacatgtcccacctcttccacactgaaagccatggtgtatgggcagggccagatgctagtaaaaatcccttctgttttctccacagcatcacttatcatgtaggacaagagtggtcaataaagaagtttaactattcatgcttctagttacagagaaatttgaatttccttactttttaaaatgaaacttttagtggcttagactttagaaggcttatcttagcagtcaaataagggtggaaaatacaggtaatttcatactttttacggtagttactaggagaaagtcttctctggtaatgaagtctgacccagaagcctatgagtcatatttgttgaatgtgctaaacataagacatagtaagataggaaataatgaaattccagctcagccattgctaacccccaattgttcttaaattgtgattgtgtagccagcatagtcttactctaggttctgtgtctgtttttacaaaaaaagtaaaagtcctaactattcacacagatttgtttttatgataagagatccaaaggaggtttctaaataattttcagaattgctctaaccagttaccttttcacccgaagtagatctggaaagcatccagcaaaacagcttttgcatgttcatacctttcagaatgaatcatcttccttccctttagctagagaagggctatgtgtactgtttctggcagaatttccacagatgttttatttttcttaagtcttccagtgcttcacttgagttgaacctagggggtacctgatgttccccaaggagatctctgaatctcctgactcttggttgtttgtgataaaagagcattccgttctgattcttctgggaggatttcaggtatccttttttttttttttttttttaatgaagttgttcccactataggaaatcagagatggcaggcaatagactgtataatgctgtactaaggattgtagaaaggtgaaggtttgttcttgcttgttgagcataatcctctttacctgtgaaatggaaagtagtatcatcagaatgttgaggtgaaatctgggacatcttctgttctccttaaattcaaagcttgtcccaactatcctgaactttttatttttatatttcacagtttccagacatcagtcaagagtctgattctccatttgttttcatctgcaaaaatcctcaggaaatggttgtgaagtttcctattaaaggaaatccaaaaatctgtaagtcatgattttttttctttaagactagtcaagtgcagtagtaaggaatggggaaaaaagtagaacaaggagttcaatctataactgactgtgaacaatcagttgaggtaacccactacctttggatcagcctgtaagtcataatctttgatggtctaattttcttttcttttcttttctttttttttgtcttgcatcttacttgtctagatttttataaaatcttcccttttggccgggcacggtggctcatgcctgtaatcccagcactttgggaggctgaggcaggcggatcacaaggtcaagagatcgagaccatcccggccaacatggtgaaacccccccgtctctactaagattaccaaaaaaaaaaaaaaaaaattagctgggtgtggtggcgtgcgcctgtagcacctgtagtgcctgtagcgcctgtagtctcagctgcttggaaggctgaggcaggagaatcgcttgaacctgggaggcggaggttacagtgagctgagattgtgccattacactccagcctggtaacagagcgacactcagtctcaaaaaaaaaaaaaaaaaaaaaaaatttattgtgttctgtgtgtccctagtgttggaggcttaatataattatacttatcaataactttatgttaggttaactacagtaaagcctttccaaagtataccttgatccacaattaccggcatagtaagtcgctctaaacttcaatttcagatcctattacattaaaatgctatttgtcagccaaaagagtgttttgccccactgtactgctcattaaaggaagtagtaaggcagtgcagtggcaacattgtcatttatccatttattcattgttcagtattcaactcaagaataagggctgggcatggtggctcatgcctataatcccagcactttgggaggctgagacgggtggatcatctgaggtcaggagttcgagaccagcctggccaacatggtaaaaccccgtctctactgaaaatacaaaaaattagcagggcatggtggtgggcacctgtaatcccagctactcgggaggctgaggcagaagtatcgcttgaactcgggaggcagaggttgcagtgagccgagatcacgccactgcactccagcctaggcaacaagagcgaaactccatctcaaaaaaaagacttaacattttaagtatttattattgaacatctattttagagacaccacttcccacatttctcttcattattggttcccagagtacagccttggctctcttgcttttcattcctttttaacattttttttttttttttgagacagagtctcactctgtctccgaggctggagtgcagtggcccaatctcggctcactacaacctccacctcctgggttcaagcgattctcctgcctcaccctcccgagtagctgggactacaggcatctgccaccactcctggctaatttttgtattttagtagagatggggtttcaccatattggccaggctggtctcgaactcctgaccttgtgatccgcctgccttggcctcccaaagtgctgggattacaggcgtgagccactgtacctggcctcattttaaaaatttttattagttaattgattgagacagggtctagctgggacccatcttttcttcctctgtcctagagcagcctcttgtatttcaaagcagtctcaaaacgcatatagtgggccgggcgtggtggctcacgcctgtaatcccaacactttgggaggccgaggcaagtggatcacaaggtcaggagatcgagactaccctggctaacacagtgaaaccccatctctactaaaaatacaaaaaattagccaggcatggtagcgggcacctgtagtcccagctactcgggaggctgaggcaggagaatggcgtgaacctgggaggcggagcttacagtgagtcgagattgcaccactgcactccagcctgggcaacagagcgagactccgtctcaaaacaaaacaaaacaaaaacaaaaacaaacaaaaaaaacacacatatagtagtggtgtcctccctgcctaacatccttggaaaagcaacatcagcaactctcccatttgctcatgtcagttaccattttgtgcctctttgtcattgctttcccattgtgtgaattgcatgattctagggcatgcattgtcctcactggtgcgaaactctccctcatccaataccttggggaccaactagccattttataaatctatgccctagagaagtacttctcaaactataatgtaactaaaaatcacctagcaagctgttaaaacacaggttcctcaatcctgctctcaggtgatactgatgctgttggccagctggctgtactttaagtaacactgctttcaatcacaaaatgaaatgcttagagtaggaatttatattaatgtatatttactgcaaaattcaggcaacatcttgattgataagatcctaagattcctacacattcgaagatctgaaccaagttgcccttaactgacacaaattatttacttcagacggtactccagttggtggcccagtagccctggaaatcctttcttttctccactattaaggatttatttatttttgagatagggccttggcctgtcacccagcctggagtgcagttgtgcaattatggctcattgcagcctccacctcctgggataaagtaatcctcccacctcagcccccaaagtagctgggactacaggtatgtgccaccacgcccagataatttttaaatttttggtagagatgaggtctcactatgttgcccagtttggtctcaagtggatcctcctgccttggcctcctaaagcgttaggattacaggtgtgagccaccacacctggccctgtttaggatttagatctccttttaccctccctctgttttggttctagcagtctaccccttcctcctccatttcattctcaccttcctctaggtactggtggcaacactggtggtaggaggaaacggtggtaaatcctctctctcaaacccactgttaattgatctttagtcctacttcccttttcgtagcttcttcccctggcttggttttcatctgctgcctaaagtcctgtgagaaaatgttctgtgtagagtttagctatttctctgaaatgttttactttagtactttctctacaccttcaggacctatagggccttcatttttctccataaggtttcatgatggtgaggggagtgacattcttaggagaaacctttaataacttcctatctttttcgtattgtttctgttagttaatggtagactagacaaggttaaaaattgcacagaaacaataggtagtgaaaattttattttgagatggggtctcactctgttatccaggttggagtgcagtggcacaatctcaattcactgcaacttccatctcccaggctcaagtgatcctcccacctcagcctcctaagtagctgggaccacaggcacgcgcctccatgcttggctaattttttgtatttttgctagaaacggggtcttgccatgttgcccaggctggtcttgaactcctgagctcaggtgatccatccaccttggcctctctaaaaaccttctactctgccagaactctcttgccttaggtcctaggggataacctccagtagtttaagctggaaaagtctttaatcccagttacattggggaaaatacatacctgcctcttaatttgaaatggttatcacactttcccctagatatattattacatgaagtgattaagtttaatagcaataatattaatacttggtcaggcacagtggctcatgtctataatcccagcactttaggaatctgaggcaggaggatcacttgaagccaggagtttgagaccagcctgagtaacatagcgagaccctgtctctacaaaaaaataaaaaaaattattccagtgtggtggcgtgtgcctatagtgccagctacttgggaggctgaggcagaaatattgcttgagcccaggagttcaaggctgcaatgggctatgattgcaatactgcactccagcctgggtgacacagcaagaccctgtctctaaaaaaaaaaaattaattaatagtctgctttacttataacactgtggcttaaatgtttgttttttttgtttgtttttgttttttttttttgtgggatgtcttaggaacctagccaccctttacagattagttctatgataaatatattcgaaattccaaacttttatttttgagacaggggtctcactgtgttgcctagactggccttgaactctgggctcaagagatcttcctgcctgagcctcccaagtagctggaactactatgtagatatacactactatgatgcccggcttcaggttccaaacttcagacttgcaaataaactttcagaatatgacccatttatgtgttgtatcatatatatatatataaaaaatatatggatgtataaatgccttaaattaaaggtgtatactttgatttgtttgtttttggaagtgtaaatttgagtttgcttgaccttaaggtaattgtgtctcctcaaattgagataattcagaaaagagcaatatacaatagggtatcacctggctctgtgtctgctttatataggttgaatactcagataaaggaaattttttaaatttagcaacatgctctataaactcatgcaccttatatcttttgcaaaccatgtgaaaattcctatgagagttatatcaattaatgacaaatattttttccccttttaacttcttgcccatctgctgcacatgcatttgactttcttttaggcactatgattgaggatgtggtttaacactgaaacgattaggtactaaatgtaaaaatattggggaaatacagaaactaagtgttacaccctaccatgaagaggatgtattgtatgtcactatggttcactatccagatcctgatcttagaagcccagggtgggctgggcgcagtggctcacgcctgtaatcccagcactttgggaggccgaggcggatcacaaggtcaggagatggagaccatcctcgctaacacggtgaaaccccgtctctactaaaaatacaaaacattagccagacgtggtggcaggtgcctgtagtcccagctactcgggaggctgaggcaggagaatggcgtgaacccgggaggcggagcttgcagtgagtcgagatggcgccactgcactccagcctgggcgagagtgtgagactccgtctcaaaagaaaaaaaaaaaaaaaaaaaaagaaagaaaggaaaaaaaagaaaaaagaagcccagggtgaactagaactcagagctttgagttcctgcaatctaaggacagtcatgatgactgctgctttccacaagaagccccggtcccttaccatcattgcccacagctggcccaagagttgcctctattggcaatcactctgttagacgttaaggatacaaaatgtccatgattgtaaggagttcacagattgttggcaaatgtctgattttttttaggcagcctagaggatgaaagaacgtctgaattcctgggaatatcctggaaatccttgttcctcttgtatcttgtttctcctattagctttccattttagacatcatcattgaagccagagattagtctgcctacaattgagtgttttattctgatgggttgatcttacctgagctggtctcacttgagggctttcataatcatactggagtttcctgaaacgtaaaataggaatgttctcattcagtaaagctttaagaatgtgaagaaaatgatatgtctttttttcttatgaagaatctgaaataaataataattaaaagacttgcctggggttatatggtaaatgaaaggtgaaattgaaaccataactaagaaacctaactcccaagcctcagcgtaaataatataaccacccttacttcttcaggagactttgaatttatgaagccccccacttttttttttgagatggggtcttgctctgttgcccaggctggcatgcactggtgagatctcagctcactgcaacctctgcctcctgggttcaagcaattctcctgcctcagcctcccgagtagctgggattacaggcgagcaccatcacacccaactaatttttgtatttttagtagagacggggtttcgccatgttggtcaggctggtcttgaactcctgacctcaagtgatttgcttgccttggcctccgaaagtgctgggattacaggcatgagccacacctggcctgaaacactttaatatatattatttcagttataggctgagcatcccaaatctgatctttttttttttttttttttttttggggagtgggtctcactctgtcacccaggctgaagtgtagtggtgtgaactcggctcactgcaacctctgcctccctggctcaagcaattctcccacctcagcctcccaagtagctgggactataggcctgcaccaccatacccggctaattttttattgcttttatttttattaattttttttttttgagttttactcttgttgcccaggctggagtgcaatggtgcgatcttggctcactggaacctccaactcctgggttcaagtgattctcctgcctcagcctcttgagtagctgggattacagacaccctccaccacgcccaactaatttttgtatttttagtagagacgggtttcaccattttgaccaggctggtcttgaacttctgaccttaggtgatctgcctgtctcggcctcccaaagtgcagggattacaggagtgagccactgtgcccggcccaaaaaaaaaaaaaaattttttttttagacaggtctcactctgttgcccatgctggagtgcaatggcatgagatcttggctcactgcaacctccacctcctgggctcatgccatcctcctgtctcagcctcctgagtagctgggactccaggcttgcaccaccatacccagcaaatttttctgggggttgaggggggtttggtttttttgttagagacagtatttcaccatgttggccagactggtctggaacttctgggctcaagcgatctgcctgccttggcctcccaaagtactgggattgcaggcatgagccaccatgccctgccacaaatctgaaaatctgaaatgcaaaatctaaacctttttgagcttcaacatgatgctcaaaggatatgcctcattggagcatttgggattttggatttctggatttgggatacttaaccagtaaatatatataatgcaaatattccaaaatccaaaaaaatctgaaatttaaaacacttctggtcccaagcattttagataaggaatactgaacctgtagttatttgattaaaggactcagtgtatgtgtaatacacgtagctcagtgactggtctatagaatgcacttcatgttagctataatcttcttaataattctgtgtgttagtaagggctttttcctcctttcattttacaggtttatggaagttgttttactcaaatctttctggcacaaggtttcctgttcttttcactgtatcagattgcctcaggaacaaattattccaatttacatttcatttctagggcacaatatcatagagttggaaggaaccttcagtattgtatagtccagtttcctcttagagttgataaaaattgaggacaagagtgactaggtaacatactcaaggttatacagctaggaagtcttaggattaaaactgagtttttcagccaggtgtggtggctcacgcctgtaatcccagcactttgggaggctgaggtggggtgggggattgcttgaggtcaggagttcaagaccaacttggccaacgtggtgaaaccctatctctaccaaaaaataaaaaaattagctgggcgtgatggcacacacctgtagtcccagctacaggggaggctaaggcagaattgcttgaacctgggtggtgggggttgcagtgagccgagattatgccattgcactccagcctgggcgacagagactctgtctcaataaataaagtctttcaacttatgcaatacagacgactggatgtctggagtcctagatggaattctaaattctgtcccagcttgtcctaaaaagctgaatgggactcacctctgggtaccaccacctttacaatctgtactcttacatttgtctgatatctgctatttgtggttacttagtactgtctataatataaaggttttgaaatttgtagtgtctacctttgtttaattcatttggtgagagcatttattgagcgtctaccatttggcagtcactatggtagtgttagggatacaaaggctgacttgccttgtaacagggctctttgccagatggctggcacatgttcaggttttcagccaggcagcataagggataaaagaactcctaaatccctgggaatgccctatgctctaaagccctaattaaaatcaacagcattgtgattattgttaaatgatattcagggtatcacttagtgatggtttctgaggaagcccagaaaaggacataatgttcttctagaagcaggtgtagcctaaaagaaaagagagagagagataaacagacaaagagagatatacagacagactaatgttgggcaagaggagatttaagtaaacagagaaacttgttaggctgaggctaatttttctcacagtcttactgtgccatggtcagtacatgtattcttaacttaattggacaagtgaaaatactgaaatccagagaaattgaatgactcgcctaggtcacacagctagttaataccagagaagggtggactagaacctgggtcttctgatttttagtccagtgctctgttatgcccaattgctgcaacaaatgaaaatgacaacatattgagaggcagtgattatgggcatgggcctgtggtatactcagctgcctttgaaggggaagactccttgttttttttttttgttttcttttttttttttagtgctgagactgaactgaattatgtttctattttcagcataagcatcactattgacttagatgagactttttgtgggagaaagcaaactgccaaactgttctcaggccagacagacaggaattctcttaagattctcctaatgagatggatggttcctaaggctgctaccactgagccaaactctatcctggtagatctgagaagaggtcagagaccacatcagtaatatacctttcattagggtcacctgggatgggaaggttgcttgttttctaagtttaacacttagagagtcatatagcctatgacctttaaccttcttagctggtgataggggccctttgtcagtaaagcattcatgtggattctattccactgttgcaggtcactccccctattaagtctgaggcagcaaaggggtgttgaactgcttttctcactgtgaaggttcatgcattatgctcagccagttaacaggtcacaggaatggatttcccactgtgaaatgcctgcctttattgcatgtgtatattcttaaaaatttgccgtagcatcaaaccccttaaaaatgtgattatttcttttctagtagctacaaaattagaaataattaacttcttagattcttaggacaaatactcattgtatgcatttgtgtatccttgtacagtgttcccattgcttccttattcttacagaatgaaactctgaagtttggaagtgtctgagtcctgaagtaagataattgaatgtgacaggaacacagtaaccagaagacctgggaggctgcaaaagatttgcattgcaaatacaaaaataaataatgagacttatttttctcccttacagggaaattggattccaagatccatcaaggagcaaagaaggggttaatgaagcagaataaagctgtctgacccaggagaaaaggaactatacagcatagtggagttttgtgtactaaaattgctatctactggtcctttggaattgaagtagtagaaacctaaaggcttggcgtcaggcttgaatatctcagaacttaaactcttaccaaaatctgtatatttttcttaaggagtgggattcctactttatgtaatggggtcgaaatctttgaacacattatttataaaaacctgtttaaaaattctaa

SEQ ID NO: 15863 - DNA, 45586 bp, Homo sapiens
ggagctgagagaacttcgacacgcctctcgactttctaagaaggtcaccattgactttgcaggaaggaagatcctggaagaagaaaattcactagcagagtatcatagcaggtaagtgagcagcactagaaagggtctcaaagaaggaacaggttgaccataaaggattttccctttctagtggatcttttatttttgttgatttaaaaaatgtgtttatttggaacagaaaacatgttaagaatagctaagaaaaaatgtttaaatgagcactcctaccagataattactgatttttgtggtttggtttttttttttttttttttgagatggagtctcgctttgttgcccaggctggagtgcagtggcctgatcttggctcactgcaacctccgcctcccaggttcaagccattctcctgcctcagccccttgagtagctgggattacaggtgcccaccaccatgcccagctaatttttgtatttttagtagagacaggttttcaccatgttggccaggctggtctcaaactactgacctcaagtgatccgcctacctcagcctctgaaagtgctgggattataggcatgagtcaccatgctcagcaaaaaaaagtttttaaaacaatgagatatagtatgggcacagaaatagatcaatgaaacagaatccagaaagagattggtatgtttacattgtgtttgtatgtgtgcatgggtgtgtgtatatatgtatgtgagtttagtaatcaataaagctaacatttttaattgctaaagcaataattaaatatgttattttgggataattgcctgtttagaaaaaaatctaggtaatgtctttatctcagaccattctatgatgctgtaataagtttcactaaagagttaaatataaacaatataaagggatcagaaagaaatacagaattataggagaatataattatagtcttggtgtgataaagctcttcctaagcaagatacaaaatcctgaagtcatgaagatataagatattttaaataaaaaagacagtaccaagttggaagaaaatattttaagtggttttaacagtcaaaggaacaatatccatactatataagtaagaactcttgcaaattaaaagaaaatgaccaaaaactccagcagaaaaatggacaaaaactaaaaacaatttacaagtggggaagtacaaatagccagtaacatttgaaaagatgtttaactagcaatcaggaaatacagattttaaaacaatatatcaattttctttggctcatcaaatttggcttaaattttttttaaaggataatattgcatattgtgtgggtataggaaaatggggatattctgttactgtgaatgggagtattaaaatgatgcagcctacatactgtatgattttaactattcagtagttccagggattagaagagagggaggaataaatagaaggagcacagagaagatttttaaagcagtgaaactactctgtatgtagttataatggtaaatacatgtcattataaatttgtccaaacccataaattgtacaataccaggagtgaacgctaatgtaaactatggcttttgggtgataatgatgtgtcaatgtaggttgatcagttgtaacaaatgtaccactctggtgagggatgctaataatgggggaggctatgtatttgggaggtctcagggaatgtggataacctctgtatattcctctcaattttgctctgaacctaaaactgctctaaaaaataaagcctaaggctgggtgcggtggctcacacctgtaatttcagcactttgggaggccaaggtgggaggatcacttgaggccaggagttcaagaccagcctgggcaacatattgagaccccaccttaaaaaaaagtctattaacataaatacataaacaaaaaagttacaactttttagaagagaatatttaaattgtgcatactgttttttttttttgagacaaagtctcgctctgttgcccaggctggagtgcagtggcgcgatcttggctcactgcaagctccgcctcccagattcacgccattctcctgactcagcctcccaagtagctgggactaccaacgcccgccaccacgcctggctaattttttttgtagttttagtagagacagggtttcaccgtgttagccaggatggtctcaatctcctgacctcgtgatccacccgcctcggcctcccaaagtgctgggatacaggcgtgaaccactgcgcccggcactaaattgtgcatacttttgacttatcagctacacaccacatatcaagataacaatttccttttcccttgtcaaagattttttaaaaaaattgccattttcagacatgaaaaatagtatttcattctaatttttattcacattcctttgctttagttgtatgttagtaagtttgagtgttctgaaaatgtattcatttgcttttttactatttcttttatagagattctagagttctggatatacttatcattttactgtgtcaaatttattcctctctttcagacctcactctccccacgctattttagacttacctcatcatacaaattcttatactttttaaaagcttcaggcctttgtttctgatttttccttggtttggaaattcctcctccattctttgcatttcacatacctacctctcccttgaacctacatgatacaacatgttggatgatggaataataaccactaaatggattgtgcctgtttcatagtaattattacatcccctcatgtatgattcatcatctatacggctttcttaaatctgccacttggattgaaagcctctttaaaaaaaaaaaaaaagcctcttgaaggcaggaacaatgtcttccccaccttttaagctgccttatatatgaggtattcctaacaaacatatattgaattgaattgaaggtcaagtttagcctttcctgttagttgaagcttttcattatgttgtgcctcacaattattattgttatccacaaacgttttgtcaagcatccaacaggagtattgaatagagtagcaagtactgtagagctatagaatgaattaagatagggttccttcagggcttatgatctcttactaactaaccagtaggtttccacaatctttaaatgaaaatcatcacattcttttataggtttagagccagatatccaatgccaacatcataggcatgggataacaggggatgtatccaatgattgtttagatagtgggtactataggaccttagagaaaggattaagcatttttgttctgggccagtagggtacctctttataacttctgagccttcaagcaaagatagaatgcagactagcaagaaggagtggagaaaggactgctgagcagacagaggaataactgtataggttgtattgcgaagatgagctgccatagaatactcttctgtgggtcagggtattcctaggcaacttttttttttctttttgtgacagggccttattgactattgcccaagctggagggcagtggcgccttgaactcctgggctcaagtgatcctcccatctcatcctcccaagtagctagaactacaggtgtgagccaccatgcccagctaatttattttttgtagaaccagggtctctctatgttgcccaagctggtctcaaactcctggcctcaagtgatccgccctctttggcctatgatagtgttggaattacaggcacgagccaccactcctggcctctaggcagcttttctggtcttggcatgtttaatgatcttgttgagcaggtgaatgactgtagcgtgccctatgtattttcttggtattctggaacttttattttatttatttttatttttttttatttttttgagacagtctcactctattgcccaggctggagtgcagtggcacgatctcggctcattgcaacctcctccgcagtttcaagtgattctcctgcctcagcctcccgagtagctgggactacaggcgtgtgctaccatgctcagctaatttttgtatttttagtagagatggggtttcaccatgttggccaggatggtctcgatcccttgaccttgtgatccgccctccttggcctcccaaagtcctggaattacaggagtgagccactgtgcctggccattctgcaatattcattaactcatattccttagggtttttggtgtgagaaggaagttggagtggggagtagggaaggtcatccatagactcctctttatattccaaattttattactattaaagcattttatgttggtggtaagcattctgagcatagaacattaccaattgttgcatccttttggtttattatcacagactagatgagacaatacaggccattgccaatggaaccttgaaccagccactgaccaaattggatagatcttctgaagagcctttgggagttctggtaaatcccaacatgtaccagtcccctccccaggttagtggacctttgctctaactgttaataagaagtttggccccaattttgccttcttttaagtatgtctatttcatagacttcagataccaatcagctctctcaatacacctgtaccaatcagctctctcaacacacctgccaaccttattctctggcccacattttttccatttttattgcagtacttctgacaaattgacttgttttatcttccaagtacttcccaagaaagggttttgttaagtactatagaaatttagacagaaattccatggttcttttgttaatgctctttctcttttttttttttttttttttttgagatggagtctcactctgttgcccaggctggagtgcagtggcatgatctcgggtcactgcaacctccgcctcccaggttcaagctattctcctgcttcagcctcctgagtagctgggactacaggtgcccgctaccacgcccagcgaattttttgtattttttaatagagacagggtttcaccgtgttagccaggatggtctagatctcctgacctcgtgatctacctgcctcaacctcccaaagtgcccagctatcaatgggttttatagggaagctggcattcattaaaagtaaatattcaccaggcgcactttgggaggctgaggtgggcagattgcttgagcctgggagttctagaccagcctgagcaacatggcaaaaccccgtctctactaaaaatacaaaaattagctggccatggtggcgtggtgcctgtagtcccagctacttaggaggctgagtcgggagaatcacctgagcccaggaggcagaggttgcagtgagctatgatcatgccactgcactccagcctgggtgacagagtgagaccctgtctcaaaaaaaaaaaagcaaatatttttgaaaaatatatgtttgggaatggtggagaaaaaaattccaggcagaatgaattgtaggaacaaaggcatgtgtacacaaaaacatgggatatagatataggaatttccaagcacacaaatctggagagggaatttccaggcagaaggtacaacacatacaaaggctcagcagcgtgagagcattgcaggtttggggaatcacaagtaattaactattgttatggactgataagtgtattagtttcctagggctgctgtaacaaagtaccacaaattaggtgacctaaacaacagaaatttattatcccatacctggaggctaaaagcccgaaatcaaggtgttggaaagactacattccctctgaaggctttacaggagaatgcttacttacctctttaagattctggtggctctaggtgtcttttgccttgtagctcattactctaatctctgcctctgtcttcacatggacttcttccccatgtgtgtctctgtcactgtgtgctctctcctcttacaaggatacaagtcattggatttagggcctactataatctaatataacctcatcttaaactgattacacctgtaaagattatttccaaataaggttgtattcacagattccatgaacgtggacattgattttggggggatactactcaacccagtacagtaagcaacacctgatcatgaaagattttttgtcttatgctaatgagtttaggttttgccctaaagtaggcaaagaagggttctggaagaattttaacagaagattggcatggcttccatgcctacgtagagaatggattggagggaagagtaagtaagattagaagctgagaaattgccaaggtagtcattgcaatagcaccatggaaagatgatgccagcccaaattagtattaaagcactagtggagcagtagagagttatttaaagaccaaaagtgggagccgggcctgagatgtagtgatacacatctatagtcccagatacttgggaagctgaggtgggaggatcacttgagaccaggagttggaggctgcagtgagctatgattaagccaccacactccagcctggatgacacagtgagaccccatctctaaaaaaaaataattatcatcataaagactaaaaatgtagatgaagagacctgctggcagattctttaatagtattatcaaaagataatgaggaattaatttaggaaagtggctgtgtaattagagggaacagctgtagtagaaatagaaaaaataatttgggcctcaagattgttcacataccaacattttatgaaattatttatttccagccaggtgtggtggctcacgtctgtaatcctagcattttgggaggctgaggaaggaggatcacttgaagccaggaggtcaagaccagcctgggcaacagagcaagacagtgtctcaaaaaaaattttttttaaagaaattatttatttaccctataatggatcaattctttttcctctttggtcctctgtaaaaacttctatctcctatttagtatgtagtcaattctgccttatgttttgaatagttatttatgtgtctgtcttccactaggctttaagttccttgcaagcaagaaccgtatctttttcatattttatgtctccctagttaatgtgcttttcacagttaagtactcaataaatgtgtatttaatttgtaaaaatgtgtatttttaagatatgccacaattgacaagaatcataaaattgtatggcagaaagatccttagaaatttatttagtccaacttcatccttttccagtttgaaaaactgaaatctttaggggttaaatgcctagggtttcgactaccactagaagttttttcctataagttattttatgttcatttttatttatttttgagacaggatattgttctgtcatccaggctagagtgcagtggtatgatcatagctcactgcagcctccacctcccaggctcgagagatcctcccatctcagcttctcaagtggctcagactacagtagccacgtgccatcataccttactaatttgtatatttttttgtagagaaggagtttcgccttgttgcccaggttggtcttaaacttctgggctcaagcgatcctcctgccttggcctccttaagtgctgggattacagacatcggccatcatgcctggcccttattattatttttaaagacacaggacctcaccatgttgcccaggctggccttgaacttatgggctcaagtgatcctcctgcctcacctcctgagtaactagtgaagctacaggcatgcttcactgtgttcagctttataaattattaattttttaaaaaagataaccccaaatatcatcatgctaattgcctttatttttaaattttaattttggaggacatggtatcgttgctctggaagaaacattaacctttgccattctctgtctgaactgttgccaagactcttcactctcctgtaattacctgtaccttataattctctattctttttatatgatgggagccctgttttagtagtcctccaccctctctttcaggagacaagttcttcatttcagggtaagagaatatttcatgcatccagtagtcagaactgctgcctctgacctgacaacatctgtttggctttgtcatggtgccagcatgtgacactgcccctaagcacatgcagaattgtggaccaaaatgttgaactttcatttagctcacagaattctattgaaaaattatccagaaccaagtatggatcattaagtataaattggaaataattatagctcttttggtgtgatatttgtgctgttgctggaattagtaagcattgtatggagatttcaacattctaattattctttaagatgggccttgttatcatacctgagacttctactgaatgtatactatctctacccttttggccttattgcagacaaagatgggattatttttcatttgttgttgttgttgttgttgttctgagacagagtctctcttgcccaggctggagtgcagtggcacaatcttggctcattgcaacctccacctcctgggttcaaatgattctcctgcctctgcctcatgagtagctgggattataggcacctgccaccacgcccagctaatttttgtagttttagtagagatggggtttcaccatgttagccagactggcctagaactcctgacctcaagtgatccacccgccttggcctctcaaagtgctgggattacaggcgtgagccacgatgcccggcctgggatatatttttctaagaaaaatgttcccaatatgatttcctcattattagcattcgcatcattttgtctacctaccccagattcttgccttataagatagaactgtatgtttgtttttctgtgtagtgggttgaccacacaggtgcagcctcacagaagaaggctttccgttcttcaggatttggactagagttcaactcatttcagcaccagttgcgaatccaggatcaagaatttcaggaaggctttgatggtggctggtgcctctctgtacatcagccctgggcttctctgcttgtcagagggattaaaaggtaagaataaaaatgaatctgggcagtggaagatcttagagtgacataaatttaatttagaaatatgaattggaattagttttcctcaatctagtgatgatttataatactcttcaataaatagaactttgaacaacatattcatgttactgacttggtagcagtatattttaaaattaatttcaaaacatttaaattgacaaatatagtagtagtttttgtactgaatagcttaaacaaactgagcataaaaaggctaagaaagtcataacaaagatagaagactaattttttcatctttggaaggaaatctattgaaaaatcttctcttggctttgctttggaatatactactaagcaaccttaataatttgatcctatttgaaacatagttttgatgcctatttacttattaagataccagcataactgattttattttcctgtccatatatctaactattaatctggctaataatattgagaaactattttattacaaaatgcttttctacaaaagtaggggaaattgagataagtagaggtattatacagctgagttacacctgttactgataataatatttaatagcttactattccgtggtgtcttgtgtttttttcttttcttttcttttctttttttttaaagaccgagtcttgctctgtcaccaggctggagtgcagtggcgtggtctcggctcactgcaacctccgcctcccaggttcacgccattctcctgcctcagcctcccaggtagctgggactacaggcgcccgccaccacacctggttaattttttgtatttttagtagagacggggtttcaccttgttagccaggctggtctcgatctcctgacctcgtgatccgcccgcctcggcctcccaaagtgctgggattacagacgtgaaccaccgcgcctggtgtgtttgtttcttaattcagtttttaaaaatagtgtttttcttggcttttattatccatgtaaatggaaaactgtaaagcacagaaaagtagctagaaaaagaaagattacctataatcccacaccaagaaaccgctgttattagcattttggagtgtttctatctttcttttttttgagacagagtcttgctctgtcacccaggctagagtgcagtggcctgatctcggctcactgcaacctctgcctcccaggttcaagcaattctacagcctcagcctcccgagtagctgggatcacaggcgcccgccaccacacctggttaatttttgtatttttagtagagatgaggtttcaccatgttggccaggctggtcttgaactcctaacatcgtgattcgcccaccttggcctcccaaactgctgggattataggtgtgagccactgtgcctggcttctttctttctttttttttttttttgagacgaagttttgctcttgtttcccaggctggagtgcaatggtgcgttatcagctcactgcaacctccacctcccgggttcaagccattctcctgcctcagcctcctgagtagctgggttcacacgcatgtgccaccacgcctggctatttttgtatttttagtagagacgaggtttctccatgttggtcaggctggtctcaaactcccgaactcaggtgatctgaccacctcagcctcccaaagtgctgggattacaggtgtgagccaatgcgcccggctgtttctatttttcttgtgtaaattgttaaatggtgagagcatgatatatatgtttgtgtttttcttctttcacttatcattacaacatatgtcttttgcttcttatttcttttttttttttgaaatgaagtcttgctctgtcgccctagctggagtgcagtggcgtgatctcagctcactgcaagctccgcctcccaggttcacacctttctcctgcctcagcctcctgagtagctgggactacgggcgcccgccaccatgcccagctaatttgtgtatgtgtgtgtgtttttactagagatggtgtttcaccgtgttagtcaggatggtctcgatctcctgatcttgtgatctgcccgcctcggcctctcaaagtgctgggattataggcgtgagccaccgtgccaggccatttcttatttttttctattagaattttatatgcctggcaatgtcccaactcataacagtaaaaataccttatatttaaatagaattttagttttcaaggcagtagctctatgaaatacacgcatgtgctgcataacgacttttcaatcagcaatggaacacatgtacaacagtggtcccataagattagaataccggccggtcacggtggctcatgcctgtaatcccagcactttaggaggccgaggtgggcggatcacaaggtcatggtgaaaccctgtttctactaaaaatataaaaattagccaggcgtggtggtgtgtgcctgtaatcccagctactcaagaggctgaggcaggagaatttcttgaacccgggaggtggaggttgcagtgagccaagattgcatcattgcactccagcctgggcgacagagtgagactccatctgaaaaaaaaaaaattataatactatatttttacgctaccttttattttctttctttctttcattttttttttttaagacaggatctcgctctgttgcccaggctggagtgcagtggcatgatctcggcttgctgcaacctccaccttccaggttaaagcattctccagcctcagcctctcgagtagctgggattacagacatgcaccaccatgcccggctaatttttgtatttttagaagagatgaggttttgccctgttggccaggctggtctcaaactcctgacctcaagtgatccacccgcctccacttcccaaagtgctgggattacagacatgagccaccatgctcagcctttactgtaccttttctatgtctagatgtatttacatacgcaaatagttaaccactgtgctccagctgcctacagtattctgtacagtaacatgctgtaccagcttgtaacttaagaataagaggctgccgggcacggtggctcacgcctataatcccagcactttgggaggtcaaggtgggtagatcacctgagttcaggagttcaagaccatcctagccaacatggcgaaaccccatctctactaaaaataacaaaaattagcggagcatggtggtgcatgcctataattctagctactcgggaggctgaggcaggataattgcttgaacccaggagacagaggctggagtgagccgagattgcctgggtgatagagtgagactcagtctcaaaaaaaaaaaaaagagcaagaggctataccatagcctaggtgtgtagtaggttatactatctaggtttgtgtaagttcagccaatgaaattgcctaaagacacatttctcaggacatatccccattgttaagcaagatgtgactgtagattaggccagtattattatagtctttgacaaatgaggatactgaagcaggcaaaggtaaaatggattgccctgaaatatgaagctaggtgatgacagagatggaactagacttctggttttcagagtgctctttcccctctactgttcaggcttcagacgtttctctactttacttaaaagcaaatgattatcagcatttaggcataatcatttctactttggtagtttcactattagctgccatttctctattgtgttaaggtgcactacaccttttctcccctcttgaaggtcaggtttccttgctttggctcctaattgtttcatagttcatgtctgtaaacgccattagaacaagtgcatgggaatccgcttctgctccaggatgatcaaaaccttagatgtctgttcttctcattgagttttctgcaatttaggtgtcttgcttttccaaagtagaaaactaaacaacttgccttctgctaagggaatcagagtgtttacatttctctcatcctatttggatctgttattcaaattttctcacagaagcgaaagaatgagcagcatctagtacacagtcactttattttaatcccacagaaataaagtaggtggttttgccacatttgtgggaccattttcccagtaattcttcaggttatttggcctagagggaagatatacattggttcattccccatatcgtgcacctactgtgtgcctggcactcttccaatttatctatattgggaaaccaaggatatgaaaaattcatgaccccattttccattataagaatgggataagagggatatattatcaaggtactttatttaatttggtgggaggggaaagagaaacatctttttgtaatccttggaaagtagcaattaaattctcctgaatacattctgttattctctttagaggttttttcaaactagtccacaagttgtttaataatcctcaaagaaaaccccaaatacaatttaaaaatgcaaatggagccgggcatggtggctcatgcctgtaatcccagcactttgggaggccgaggtgggcagatcacaaggtcaagagatcgagaccatcctaacatggtgaaaccccatctctactaaaaatacagaaattagctgggtgtggtggcacgtgcgtgtagtcccagctactcaagaggctgaggcaggagaatcgcttgaacccaggaggcggaggttgcagtgagccgaggtcgcgccactgctctccagtctggcaacagagcgagactccgtctcaaaaaaaaaaaaaaaaaaaaaaaaaagcaaatgggtgtggttctaattgaagagtaaagataagcgtttttatttacttaaattattttaaataaataaaaagtaacattcttgggagttgtgtgtagatgaggatttttctgtcaggttggagaacaaatcaactaatcttctagggaaaggttagcctttgactcaagggcaaggatttccatatctctaatatgatttatatgccttgaaaatataggatttgtattggagaagcaccaagactggtcagggttccaaatctgagttgtagggatcaggtgaaaagcagtcaagagttgagagagatgacttgtcgctattctgatggaggagaaattagtggacagagttcatcctcaagtgaaaagtattgtgagagaaaagtgtttttgacaaaagatactgctcttgagaaggcatcatctatagacctcttggttcaactggataatttgctataggatttgttatatattatgggatattccaggaaactagaatttatatccttcccactaaatttctatttgtttaagggtggagggcagatcctggtacaccccccacagaggacgactttggatagcagccacagctaaaaaaccctcccctcaagaagtctcagaactccaggctacatatcgtcttcttcgtgggaaaggtaacagccgcatattctcctttcaattttactttatggagagaagtcattgacgttcatcttctttcacttccttctttctttggctttttctttgttaaaagagacttttaatctttgtatatgtttgtttgtttagtggtaaatcattgacagcgttcaaagcattaatctgtcaaaacagtgcaaataaaaatatcaatttccaacacaagaaatcaactagtcttaatttttttatctgagaaaatcatcttctttactctaaaggtaaaatgactagtgtaaactctgagatccttacattgggaagaacaaccacaaataggaattttcattgagagtggcctaaatagacacctactattggatttgtacaaatcaaagttgattgatttaagcaacgtattttgggaatcaccccaagaatactaactttggatccttaaaaagacttctgacctttgggcatcctgtttttcctttgtgttatccagctcatacagttgttttgagggtagaataaaaggacaactacacaaccatctttaaaggtttttaagaaacaaggcttaaagaatcactaggaataaaaagttcatgcttccttaaaagcacttttcttttttatttttttttgagacagagtctcgttctgtaaccagactggagtgcagtggcgccatttctcctcactgcaacttccgccttccaggttcaagtgattctcctgcctcagccttccgagtagctgggaccacaggcgcatgccaccacacccagctaattttttgtatttttagtagagacagggtttcaccatgttggccaggctggtcttgaactcctgacctcaagtgatctgcctgccttggcctccaaaagtgctggggttataggtgtgagctactgagcccggcctaaaagcacacttctattcctattgatatggactggcttgttttaaagacattcattcttatggttttaaccacattttgatgttttttttttcttgtcacctgtaactgccttactttgcttccaaaactcatcactgccaaactccaatctgatccaatggcgtatagtagaatcgatttgtattaggatgaatttgtggggtccttgaactttgatggtatgagggcaaaggaaaaattttctagcttaacatgtggatagtggactaagccagccactcactagatttttttgctaaaatgcaaacagttgtgccaagtaaatttcactgttttccttatgtctacaaatagataatggaaaaagttattaatgtttgttcagaattgaaaacagattcctgagttccaagatcacaaagaaggaaatttattcaatatttttgttattcctgattcagatgtggaatttcctaatgactatccgtcaggttgtcttctgggctgtgtggacctaattgactgcttgtcccagaagcaatttaaggagcaggtgagtaaagaatactttttttttttagagacagggtttcgccatgttggccaggctggtcttgaaagcactttaagaggctgggcctcttaaaagtgctgggattataggcatgagccaccacacccagcctggtgcatataaatatctgtataaaaagctgtttccaggccgggcgctggtggctcaggcctgtaatcccaacactttgggaggccgaggcaggtggatcacaaggtcaggagatcaagaccatcctggctaacacagtgaaaccccatctctactaaaaatacaaaaaattagccgggtgtggtggcacgtgcctgtagtcccagctgctccaaaggctgaggcaggagaatagcttgaacccgggagatggaggttgcattgagctgaggtcctgccactgcactccagcctgggcaaccgagtgagattccttctgggggaaaaaaaaaagctattgccacaatgcagctagcaagtatatagggtcttcatcccttaccaaaaccttgcttcttttgaagaaacccttgattatcccttgaattattttgattggggggtgggaatactaggatctgttattgctaattctggagcttttggtccaggctattgaactcatgataggcaaatgtatttgactctgattgccaggactgtgccatatttgggaggaggtatgtgtatttatgtatgaatgtacatatgtatgaatgtacatatgtatgcatttatatattttaatttttatcactaaagattgaactgacaggtcgggcgcagtggcttacacctgcagtcccagcactttgggaagccaaagcgggtggatcactttaagtcaggagtttgagaccaacctggccaacatggtgaaaccccgcttctactaaaaatacaaaaattagcctggtatggtggcgcatgcctgtaatcccagctactcaggaggctgaggcaggagaattgcttgaacctaggaggcagaggttgcagtgagctgagatcgtgccactgcactccagcctgggcgacagagtgagactctgtctcaaaaaaaaaaaaaaaaaaaagatgggcatggtggctcacgcctgtaatcccagtgctttgggaggccaaggcgggcagatcatgaggtcaggagatcaagactatcctggctaacacggtcaaaccccatctctataaaaatacaaaaaaaattgctgggtgtgatggcacgcgcttatagtcccaactattcgggaggctgaggcaggagaatttcctgaacccagaaggcagaggttgcagtaagccgagatcatgccactgcgctccagcctgggcaacagagcaaggctctgtctcaaaaaaaagaaaaaaaaaagattgaactgatgtaactaaagtacatttttgagcagcagagggagccgaaatactttaacttaattagaaaattcctgaaatgtaagacctttatgtttagacacagaactagcagaaatccaaaacaggaaaagtccatccttgaagcacaaacagtcttacctatcagtatggttttcctgttctttgaacagttgctttagataatagggcttccaccagtgtgctgaagaaaaagagcttcagtttcatttttcccagcaaattctctttttcagacttacttacctttcattactgttattactgtctactgttttcctttactgttcccagccattttaccctctctattctttactctttatttattttttttggaaactgggtctcactctgtcgtccaggctggagtgccaatcttggctcactgcaacctctgcctcctgggcttaagtgatcctcccacctcagcctcccagtagctgggactacaggcaccacaccaccatgcccagctaatttttgtatttttagtagagacaagatttcaccatgttggcgaagctggtcttgaactcctggcctcaagtgatccacctgcctcagcttcccgaagtgctttgattataggtgtgagccactgtggccagcctactgactgattttaactaacacttgttatccctctagatttatgtctttcatttccttgtgagttacctcctctgcctcctctgattatgtgtgtgagtacaatgcatgcattttggtgtgaattttgagttctagcgttttgttcttcccttagtatctgatccagacctaggcaaaaccatagacacatggaggctatcccccacactcttgtgcctgcactatccctctgagctttttgcccatttttttcaatgtctactttcttcctcccccctctttttttttcccccagtctagaagtaatattataaaaataccttacactggtgtaggctttacagttttagagattcacagtcgttaacagcttagtataacatactgcattatgttttcttcctgggatatgtatttgcgttctaaaagagaacccaggagcatctggcaatgtggatgatggtttttggcaagcggccttgctttattttctcatctattgatcaagcaaactaccacctgatacaaggtcaaatgatttcaatctctagatagccaatcttctttgtgccacaaatttgtgtagagaagggtaggaaactataatcctgatctatggaatactatgaaggttacaggaattagaaatctaattaaaacaagtcttgttgatttctgaaggatacctctttttcatgatacttctcctttaacttatattgtatctcatttcctgaggttgctttgaacagcatgtagaagtgcaggaatcctcccatatgtttccagctagaggtgctggcaactctctttatgaatgtctctgatatataacattaaaatataacagaagccactaggcttcatcagacatgggaatcccatacccattttccctatggttggcttttctgtaactttttcccactgtttcttttttcttttttttgagacggagtctcactctgttgcccaggctggaatgcagtggtgcaatcttggctcactgcaacctctgcctctcaggatcaagcgattctcttgcctcaccctcctgagtagctgggattacaggcacataccaccacacctggccatttttttttgtatttttagtagaagcagggtttcaccatgttggtcaggctggtctcgaactcctgacatcaggtgatacacccgcattgacctcccaaagtgctgggattacaggtgtgagccactgtgcctggcctccactgtttcttttctgtgtttaagggtagcatatgaatttatttagaattgatgttagccctatttttatcttatttattgagtaaagagtttatcagttttaaaagttgtagcttttgggttgggcgtggtggctcatgcctataatcccagcactttgggaggccgaggcgggtggatcacttgaggctaggagttcgagaccagcctggccaacatggtgaaaccccgtctctactaaaaaactacaaaaattagccaggcgtggtggcaggagcctgtaatctcagcttctggggaggctgaggcaggagaattgcttgaacctgggaggcagaggttgcagtgagccgagattgtgccactgcactccagcctgagtgacaagagcaaaattctgtctcaaaaaaaataaaataaaaataaaaaaagaaatgtagttgtctaatctattataccagcctcattcttgttttctgaatgaatgagttgagagtttaggaataatggctcttgactagcatttaccaaactattccatggcataggtgttctctgaaacacaaatttgggaaatacctttggattaaacagatctgtttactgtagaacatctcagagcccttaatatgctagtgtggattatgactctctatgaggtggatataacatgcagtgttctcaaaactttgagcataaattaatcccccacccaaacatgcactacctatttacatactacagaactggtatcatggtatttacagtttaggagtgttagtctaagtatgcttgatttttctgtattctcataggtcaactcactgagagagaaccatctaggaagtagtttcctaactgtgacctgtgccttcccttcagtatctccatattcatttatcacccagttgaattgcattttctttgaaaactaatgtggatctagtaatttttacttcaactgaaactaacttcctgtgtgacttggaccacattttgcctttacatgctgttcctttttcttttccccccaaaattcagtaatttacttctgacctcacattcttggcctttctttgataagttaaaatacactaaaccctcactatttttggcatagtgtgatcatttagtcctcttaaaaaaagaaaatcgaaaaggttttgttagtggttgttttaaaatcaagtgcactacactgttaaatggctttaaaaatatgtgctttctcctgagccatgaactagtcttcctttttatcttctaagattagtatggccaacatgactaatttgtgccagaaaaaattcctctagatcctcaaccctcctgagtaatggcagaggatcagcctagagaaggtagaagtgatatagaaaaggctatgggttcaactcagggtaaaaaggtagatgagagccatctcgttaaagcttctcctgtgattcccctggaaggagcccatgctgtttgccagcattttatctgccagcagcagatgtaagctctcaaaaacagcagggaggatgttgactgcaacaatgcatcaaggctgtggtttgtaacctcaatagtaaggcagttaaaactttttttttttaacaaagacattttgattgccaaatccataaccattagcagctgtggtttgaacagttctctagacctaacaagttttcaaacaaaaagttgagttggtggcttttgtttctacgtgtctgtgttgtgtttgtgctatttatatccctgccttcaatagaaaatctgatttgtctgaaatctccaaggtcattgattattctatttcttctgaactgaatccattcctttcctgccagcttactgaccctttagtctatttgatcttacagcttttacaatagccaagaccctatcttcaaggaattatgctgaagcagttatactgctgggtgcctgtttccaataattgacggcagtagacttgtagtcttccaatagggaagagaatattacttcttcctttttctagaaaagtatcttcaggatctaggagaatttgctggaagaaaagtaagcaatttttaaaactttaaaaaaaaaagagtatccaagcaacatagatcttcaggaagattccaagtatcacttcgtttgtggaaatcatcagcttctatcaccaatgaattgtctgtgagtctgagagatgagaaattagaaaatgaaggatttaatagtcagtattcaaaccaggcactggaattcaaaatgcagtccacaaattctcttttaaaatatgtgaaaatgtcctgtctgttgtactgagaaaatctgccaatatatagacctcaaaatattccgataacagccctcacgatgagggctgttatctgagactcaacaagaagaaaaattgttatgttactaacaactagcttaaccctggacaattcattaaaatcacagctcacttgagtgagatatagggaatgtagttttggaattctcttgaagactggaacattgacaggctgggcacggtggctcacgcctgtaatcccagcactttgggaggcggaggctggtggatcatgaggtcaggagttcaagaccagcctggccaacatggtgaaaccctgtctctactaaaaatacaaaaaaaaattagctgggtgtggtagtgggtgcccgtaatcccagctacttgggaggctgaggcaggagaatcacttgaacccgggaggcagaggttgcagtgagcagagattgcaccactgcactccagcctgggcaacagcgtgagactccatctcaaattaaaaaaaaaaacaaaactggaacattgactagagtttctagatcaaaacagactgtctttagggttatttgcagtctgggtattaagtacccacttaaatggtttcagaaaccatttatattatatatatatatatattttttttatccaaagagcattgtgttttcttttttttttttttttttttttttgagacggagtcgtactctgtcgtccagggtggtggagtgcagtggagtgatcttggctcactgcaacctctgcctcctaggttcgagcaattctcctgcctcagcctcctgagtagctgggattgcaggtacgcaccaccacgcccggctaatttttgtatttttagtagagacagggtttcaccatgttggccaggctagtcttgaactcttgacctcgtgatccgcctgcctcggcctcccaaagtgctgggattacaggcatgagccaccatgcctggctgagcattatgttttctgttgtacttatcctgaagagagatgggaaatattaccacttttccatgtatttagtgttttggttttcatctgaaaataaacatgaaattcttaagattttcatatatatttattcattaataaatacttgagccaggcgcagtggtttacgcctgtaatcccaccgctttgggagaccgatgcaggcggatcactcaaggtcaggctcttgagaccagcttgaccagcttggtgaccatctctactaaaaatacaaaaattagctgggcatggtggcgcacccctgtaatcccagctacttgggtcactgaggcaggagaatcacttgatcctgggaggcagaggttacggtgagccgagattgcgccactgcactccagcctgggtgacagagcaagactctgtctgaaaaataaataaataaatacagccgggcgtggtgactcacacctttaatcccagcagcttgggaggccaagatgggcggatcacaaggtcaggagatcaagactatcctggctaacatggtgaaaccccttctctactaaaaatacaaaaaattagctgggcgtcgtggcatgcgcctgtaatcccagctactcgggaggctgaggcaggagaatctcttgaacccgggaggtggaggttgtagtgagccaagattgcgccactgtactccagcctgggcaacagagcaagactccatctcaaaaataaataaaaataaataaataaataaataaataaacacttgagagcctattataaatcaggcactgttctaaacactaagagaaacaaaaggatgaatcaactgtagattctgtcctcagatgtttgaaagacttctaggtagatatgtatataaaccaaatataaaataaaaagtgaacctaactgtcttaaaagaagtaaagactgtctctgagaaaaataaaggagggaaagcttgcttctagctgggaaggatcccaaaagactttatttaaaaagatggttttgaattagctttgaaggatagtaatgaaatctatcactttttgatcagttattatgtgccacattcatcatgctattttctaatccttataataattccaagcagggtgtcatttcccctcctttagggatgaaatatcatccctaaagtgtcaagagagttcaaataacttgtgtaatgtccagggtgaggagttcgagaccagcctggtcaacataatgaaacctcatctctactaaaaatacaaaaaaaattagccaggcgtggtgatgtgcacctgtaatcccagccacttgggaggctgaggcaggagaatcacatgaacccaggaggcagaggctgcagtcagctgagatcgcaccattgcactccagcccaggcaacagtgcgagactccatctcaaaaaataaataaaaaataacttatgtaatgtcagttaatggtagagttatgattttgctgttcaagtgtttctactgagatggtagaaaagcatattacaaggatgaggagtaatgggagcaaaggcacagaggtgaagttatcggcctctatggagaataatggcaaaccagttcattgaaagaagagtgtgagtatagagcaagcttgtccaagctgtggcccgtgggatgcatgtggtccaggacggctttgaatgagaccaaacacaaatttgtaaactttcttaaaacatgagattttttgtgtgtgatttttttttttaaagctcatcagttatcgttagtgtattttatgtgtggcccaggacaattcttccagcgtggcccagagaagccaaaagattgaatacccctggtatagaggaataagcagcaaacaaaaaatgaaatggggagtctctctgaaactaatctgcttctgggactgcccaattaaaaaaaaattaaaaagggctgggcacagtggctcacacctgtaatcccagcactttggaaggccgaggcaggtggatcacctgaggttaggagttcgagaccagccagaccaacatggaaaaaccccgtctctactagaaatataaaattagctgggcgtggtggcgcatgcctgtaatcccagctactcaggaggctgaggcaggagaatcacttcaacccaggaggcagaggctgcagtgagtcgagattgtgccattgcactccagcctgggcaacaagagtgaaactccgtctcaagaaaaaaaaaaaaaaaatgaaaaggtaggtttgttcagatgatagatagttttgaatgataggcattcaaatctatcaaatgatagacatatcagttgtgggatgggaaagagtgttttgaagtttttttgaggcattaacatgatctgaggcttgcttgagggaaaactaatttggcagaaatgtggaagatggagtggagatattctgaagatgggaagaccagtgagaagacagttgtagtccaggatagagatgtttgaaaaatatgttctaggataatgccaatgaaatgaggcaagacaggaacaatgatgcaaggggctttatgtaggtagaatcaattactggatatgatgccttcattttacctttaagtaaaccaaggcttagagaaagtggtctatttgatctagaaagaatatgctgtagtgtcgctatctacttggaatctgttcaggactccttggtttgtcatctagtctaccatgtaaaccaagtggcaacttatcttctaatttaagatattattggccaggcatggtggctcacgcctgtaatcccagcactttgggtggctcaggtgggcaggtcacttgagcccaggagttcgagatgagcctgggcaacctggtgaaaccccgtctctacaaaaaatacaaaaattagctgggcatggtggcatgcacctgtaaacccaactactaaggaggccgaggtgggaggatcccttgagccggggaggcaagggttgcagtgagcagattgcatcagtgcactccagcctgagtgacagagtgagaccccatctcaaaaaaaaaaaaaaaaaaaaaaaagatgccgggtgcagtggctcacgcctgtaatcccagcactttgggaggccatggcgggcagatcacgaggtcaggagttcaagaccagcctggtcaatgtgatgaaaccccatctctgctaaaaaaaatacaaaaaaaatctgccgggcgtggtggcatgtgcctgtaatcccagctactcggaagggtgaggcaggagaatccttggaacctgggtggcggaggttgcagtgagccgagatcgcgccactgcattccaacctgggcgacagagtgagactctgtctcaaaaaaaaaaaaaaaaatattattattgcttaggatattatataatcatacattcattaagtatttattaactatctgtcatgtgccaggcactgtgttaaatactaaggatccagagttttaacaacattattccatcccctctagatctttaagtatactagatgaaactgagacaagaaaacccaaccataataactatcacatgaatagtggaatacactaaggaagggacccaactgttaactttgcatggctggaagtgggatgggagggggagtgtaaaggaagcttcttaaaaaaaaaaaaaaaaaaaaagacaagtcctgcagaagcaatgcttcctggaataccataatggtagattgaaaaaaaaaaaaaacctgaagaaagtaaaatttatattttcttcaataaaccattctacatcatgtcaccatgcccttgtccactaggacagctcctgctcatcctttaaaacatctcaggctgggcggggtggctcacacctgtaatcccagcattttgggaggccgacgcatttggatcacctgaggtcaggagttcgagaccagcctgaccaacatgatgaaaccctgtctctactaaaaatacaaaaattaaccgggtgtggtgacatatgcctgtgttcccagctactcaggaggctgaggcaggagaatcccttgaatccaggaggcggaggttgcaatgagctgagatcgtactattgcactccagcctgggcaacagaacgacactccgtctcaaaagaaaaaaaaaatcagccaggcacattggcttacgcctgtaattccagcactttgggaggccgaggcgggcagatcacgaggtcaggagttcaagaccagcctgggcagcatggtgaaaccctgtctctactaagaatataaaaattagttgggcatggtggcgggcgcctgtaatcccagctactcaggaggctgaggcagagaatcacttgaaccaaggaggcggaggttgcagtgagctgagatcgcgctactgcactgtagcctgggcaacagagcaagactccatcaacaaaaaaaaaatctcagatgttactctctgaagtcttccctaaccccagcccatttcctccctaacaggattaatttccttctttgggttcctactgtgttcatacttctattactgctttttttttttttttttaatattgacatgtagttctttaggtgaccatctatgcctttttttttttttttttttttttttttttaataaggagtctcactctgttgcctggctggagtgcagtggcgcgatctcggctgcaggttgtgtgccaccacacccagctaatttttgtatttttagtagagacggggttgcaccatgttggccaggatggtctccatctcctgacctcatgatctgcctgcctcagcctcccagagtgctgggattacaggcatgagcctccaggcctggcctaggtgaccgtctatgtcttattcacctttatatcagtgtgctaacatagagcctgccatgtagtaggtgcacagtaagtggtcatgacaataaatagagagggagacaatggtagatatatgaaaaatcttggccgggtgtggtggctcacacctgtaatcccagcactttgggaggctgaggtgggtggatcacgaggttgggagttcaagagtagcctggccaacatggtgaaaccctgtgtctactaaagattaaaaaaaaaattagccaggcgcatacctataatcccagctgctactcaggaggctgaggcaggagaatctcttgaacctgggaggcagagttgcagtgagctgagattgcaccattgcactccaacctgggcgacagggtgagactccatctcaaaaaacaaaaaagaaaaaaatgccatatgaaaggatttgaactgtgttctaaagataatcatatgaagtcgtgttactttgttttttttttttgagacagagtctcactctgtcgtgcaggctagggtgcactggtgcgatctcggctcactgcaacctccacctcccaggttcaagcgattctcctgcctcagcctcctgagtagctggtattacaggcgcacgccaccacgtttagctaatttttttgtattttcagtagagatgggttttgccatgttggccaggctggtctggaactactgtcctcaggtgattcacccgcctggggttccctaagtgctgggattaccggcctgagccaccacacccagccaaagtcatgttttacgattgtcctggcagctgtaggaaggatgtactggatggggcaagcctgaaaacagagatgatttaggaaattatggttgtccaggtgagttatgatgaagatctgcagcaatgctgtgtcagttgagttgaagagaaaggatctgatgattggaatgtttaggaggtaaagtttgtaggacttagtaattttactggatatgaagggtgagagaagtctaggatcaacttgggtttcttttttgttctaaaagatatgttatttgataaaggagtattgttgacattaataacaccagattgcttgacaatgaccttaccttgatatgttaagtgaagtcaaagatctctcagagcactgcctcagaagttttcagttgagtcagactagccattgggaaaataaaatctaaaattggcacagcccttaactcaagagaagtcttcagcattctgaggtaatagtctcagagtggactttgttggttgaagaccttaccatgtactgtcattcattcattcatttatttattttgagtttcgctcttgttgcctaggctggagtgcaatggcacgatctcagctcactgcaacctctgcctcccaggttcaaacgattctcctgcctcagcctcccaagtagctgggattacaggcatgcaccatcacatctggctaattttgtatttttagtagagacagggtttctccatgttggtcaggctggtctcgaactcccaacctcaggtgatgcacttgcctcggcctcccaaaattgtctttaattaaaagcaactttcttctggtgttcactagtttaagttggagtggaagcctattatattaaaatgaagaccaaaaataattgtcatgagtgggtgattcccagttaggccttgaagaatcaggccagaaaagttatgaggttaattttagagaaaatatacttgtttgagttcttttatgtggaggttctagcatacgattccacagggcacaggaaaccacagtggaaatgttactgtcgataaaatgagacctggttgtagctgcttcaaccagattgtcttccacaaatggctataagatctgtaagtttgtgtgtgtcttatcacttatttctttcacctggtacatatatggattgtctctgtagcattgagctggaagcccctgtcttagatactaggcatgtgacttgaattgggttactggtatatgggagttcaactatcccactttgggccaagtggtatgatctttattcaaccctagtcaaatattcagtcgtcatctggtcaaagtattatgatcagtaggtcaccctgaagtaagaaaacgtttatcttccagtagagtggggcctggggtggtagttatcctgtgacaccttgaattgctttgaaggaaaatataaatgagaactgtttatcacagagcacagttgcttgcgggatatgcttccttggatctgttcttgcacctctttatcagactcatttccttctctctttctgcatattatcacctcagtcttcttggagttggttttcagctaacgagatttcagaccctgatttcatgttctatctagttcctcaaaattcagaccaagaatgcctacagcaaatatatgttctttgttaatgaattccctattattgttgctttagttattagttcttcaaataacaacttataaatcttttttttttttttttttttttttttttgagatggagtttcactcttgttgcccaggctggagtgcaatggcgtaatcttggctcactgcaacctccacctcccaggttcaggtgatcctcttgcctcagcctcccgagtggctgggattacaggtgcccgccatcatgccggctaattttttgtatttttagtagaaacggggtttcaccatgttggccaggctggttttgaactcctggcctcaagcaatccacctgtctcggcctcccaaagtgctaggattacaggcatgagccaccatgcctggctaacgtataaatcttatatctggagacagatataagatttacagatcatctgggaatttgttgtgaagagtgacatagtttaggagttattgatcatttcagtacaagaatgaataagaatgaaggggaggcttgaagatttggtgaaaatgcccattttccactgaatcagtggtggttgacaaaaactgctaaccaattttttctcttatgaaaatggcaaaagaaatttatatatatatacatatttatttagtcctctaaaaaaaataaaattagacaggtctggtggtgtgcacctgtagtctccagtacctcctgagtggcttgagccctccaggtcaaggctgtagtgagctacgaacacaccactgcactccggcctgggtcacagagtgaaatctcaaaataataattaattaataataaatataaaataaaatgtgacatccagagcttattcacattcttcacctcccttctcttattctttctctgggtaatctgcattttagttttctgactttcagaccagatatcccttacttgtgaggatacaatgtaagtatatagtggcttgttagtatgtaatgtggtctttagtgtccaggccctggttatggggattgtggttgtctttttttttttttggaggtactgaggctctgccaagctaacttcgttttaatgcatttgataatgaaaaataatctcttcttccaatgcataggctttactttattccttgtaggccactttgcttttcacctctgtttcttgtaagccccttgaagttcagtgctagtagtaggaaaagggatattcacctggaactttaatttgagattcatctgggaaagttgatttttatgtttgtctttattgtgaggcatgatgggtccaaggaacctattgttatttaatttgtccaccatttttccagtttttcccactatttaacattttcttactctgttaatacacatcagggtggtttttcttaaacatagagccatattgactacttgccaagacacaagcttagggataacacattaagagtaatatctacttttacttagagttatagttctaagagtgtacaattcccagcatgtgtgtattcaccatgaataaaataacgttaatgcacaagttggtaaattcattttttttttttttatttttgagaccgagtctcgctctgtcacccagtctggatggagtgcagtggtgcgatctcggctcactgcaagctccgcctcccgggttcacgccattctcctgcctcagcctccggcgtagctgggactactggtgcccgccaccacgcctggctaattttttgtatttttagtagagacggggtttcacagttttagccaggatggtctcaatctcctgacctcgtggtccgcccgctttggcctcccaaagtgctgggattacaggtgtgagccactgcgcccggccaattcattgcgtttttattcaacaagtatttattgattgcctgctgtgaactaggcatggtcctagatgctgatgagtaaacaaaacaaaaatccccgtcctcatggagctttcatcctagtgagtcgagaccaagtaaaagttctaaataagtaaattatattgtatcagacgatggtaaaataaggctggagagggccgggcgtggtggctcacgcctgtaatcccagcactttggaaggccgaggcaggtggatcatgaggtcaggagattgagaccatcctggctaacacggtgaaaccccgtctctactaaaaatacaaaaaattagccgggcatagtgccgggcacttgtagtcccagccactcgggaggctgaggcaggagaatggtgtgaacccgggagatggagcttgcagtgagccaagattgccccactgcactccagcctgggcaacagagcgagactccgtctcaaaaaatatatatatataaataaaaaataaggctggagaggtagtttaagagtgccaagtttgtggggaatttggtgctctgattttaaatagggttatcaagaatattcactaaaagttgacacttcaacaaagttctgaaggaagagagggaagaagccatggaaatatctagggtgaaaagcattccaggaagaaggaaaaggcaagtgcaaaaaacctgaggcaggaacaacaaggaagccagtgtggcaagagtggagtgaaagtgaaggagagaagtaagagaaggtatcagagaggaaatggggggccagattgtctatggacttgtaggtcatggtaagcaaggacttagacttttattctgattgagatgaaaacccgttggagagttttaagcagaagaatggcgtgatctgatacaaaaaaaaaaaaaattagttctggcggctgtgttgagaatagaccaagagggaagttaagggcagaaacagaccacttaagaggttattgcagaagcccagggagacattatgatggcttggaccagggaagtagccattgaagtcttaagaaatggtgagatattggatatactttggcttttctttgagacagggtctcactctgttgcccacgctagagtgtgtgccactatgcttggctaatttttttaacgttttattttttgtagagatggggtcttgctatgttgcccaggctgatcccaaactcctgggctcaagcaatcctcctgcctgggcctcccaaagtgctgggattagaagtgtgagccaccgcacctagccagagaaaagaattctatctttggatggcaagagtgaagataaaaaaaaaaaagaattctatcaagttctactacagatagatcaagttctactacagatagatcaattaagatgagaactgagccaggcacggtggctcacgcctgtaatcccagcactttgggaggctgaggcaggtggattacctgaggtcaggagttcaagaccagcctggctaacatggtgaaaccctgtttctactaaaaatacaaaattagctgggcatggttttggacgcctgtaatcccagctactcgggaggctgaggcaggcaggagaattgcttgaacccaggaggcagaggttgcagtgagccgagatcacgccattgcactccagcctgggtaacagggtaagactccatctcaaaaaaaaaaaaaaaagatgagaactgcgaattgaccgtttgatttagcagcatggaagtcaacagtgacctttacaagaatgattttgatggaatgatgagagtgaaagcctacttatagtgaattcaagaaaaaagtaggagaggaattaaaggcagggagtacagataatcttttgatgaattttgttgtaatgggaatctgagaaatgagtagtagctggaggaggatgtgggatctggataagagattttgtttcatgccagacattacagaatgtttgtgtgttaataggattgatccagtagagaggcaaaaactattgacatggaagaaggaggagagattggctgaaatggtttatggtgttggaaaagcagagctgttgattgtcctttgcctcaatggtctctaagccacagggaaggaaaaacaggaaaattaaagagatagtaattatgaatgctgctgctctggtctctgtagaattaggtttggagatcttgatggcagcctctggttttatttgtgccaaagcacctcagcatggatcttgtgcagagcttatttccttctaatacccagcaataacagctgggccctgtttttctttggcttctgaagataaaagggataagaaagaagagggtttacctttgtatctgtagccttacttttctaccgtgaacatttgaccctgcctattaatatgattgtggctgatagttaatattaagtttgttttattggctgggtgcggtggctctctcctataatcccagaactttgggaggttgaggcaggagaatcatttgggtccaggagtttgagatcagcctgggcaacatagagagaccccatctttaaaaaaaaacaaaacaaaaacaaagtacatgtcccacctcttccacactgaaagccatggtgtatgggcagggccagatgctagtaaaaatcccttctgttttctccacagcatcacttatcatgtaggacaagagtggtcaataaagaagtttaactattcatgcttctagttacagagaaatttgaatttccttactttttaaaatgaaacttttagtggcttagactttagaaggcttatcttagcagtcaaataagggtggaaaatacaggtaatttcatactttttacggtagttactaggagaaagtcttctctggtaatgaagtctgacccagaagcctatgagtcatatttgttgaatgtgctaaacataagacatagtaagataggaaataatgaaattccagctcagccattgctaacccccaattgttcttaaattgtgattgtgtagccagcatagtcttactctaggttctgtgtctgtttttacaaaaaaagtaaaagtcctaactattcacacagatttgtttttatgataagagatccaaaggaggtttctaaataattttcagaattgctctaaccagttaccttttcacccgaagtagatctggaaagcatccagcaaaacagcttttgcatgttcatacctttcagaatgaatcatcttccttccctttagctagagaagggctatgtgtactgtttctggcagaatttccacagatgttttatttttcttaagtcttccagtgcttcacttgagttgaacctagggggtacctgatgttccccaaggagatctctgaatctcctgactcttggttgtttgtgataaaagagcattccgttctgattcttctgggaggatttcaggtatccttttttttttttttttttttaatgaagttgttcccactataggaaatcagagatggcaggcaatagactgtataatgctgtactaaggattgtagaaaggtgaaggtttgttcttgcttgttgagcataatcctctttacctgtgaaatggaaagtagtatcatcagaatgttgaggtgaaatctgggacatcttctgttctccttaaattcaaagcttgtcccaactatcctgaactttttatttttatatttcacagtttccagacatcagtcaagagtctgattctccatttgttttcatctgcaaaaatcctcaggaaatggttgtgaagtttcctattaaaggaaatccaaaaatctgtaagtcatgattttttttctttaagactagtcaagtgcagtagtaaggaatggggaaaaaagtagaacaaggagttcaatctataactgactgtgaacaatcagttgaggtaacccactacctttggatcagcctgtaagtcataatctttgatggtctaattttcttttcttttcttttctttttttttgtcttgcatcttacttgtctagatttttataaaatcttcccttttggccgggcacggtggctcatgcctgtaatcccagcactttgggaggctgaggcaggcggatcacaaggtcaagagatcgagaccatcccggccaacatggtgaaacccccccgtctctactaagattaccaaaaaaaaaaaaaaaaaattagctgggtgtggtggcgtgcgcctgtagcacctgtagtgcctgtagcgcctgtagtctcagctgcttggaaggctgaggcaggagaatcgcttgaacctgggaggcggaggttacagtgagctgagattgtgccattacactccagcctggtaacagagcgacactcagtctcaaaaaaaaaaaaaaaaaaaaaaaatttattgtgttctgtgtgtccctagtgttggaggcttaatataattatacttatcaataactttatgttaggttaactacagtaaagcctttccaaagtataccttgatccacaattaccggcatagtaagtcgctctaaacttcaatttcagatcctattacattaaaatgctatttgtcagccaaaagagtgttttgccccactgtactgctcattaaaggaagtagtaaggcagtgcagtggcaacattgtcatttatccatttattcattgttcagtattcaactcaagaataagggctgggcatggtggctcatgcctataatcccagcactttgggaggctgagacgggtggatcatctgaggtcaggagttcgagaccagcctggccaacatggtaaaaccccgtctctactgaaaatacaaaaaattagcagggcatggtggtgggcacctgtaatcccagctactcgggaggctgaggcagaagtatcgcttgaactcgggaggcagaggttgcagtgagccgagatcacgccactgcactccagcctaggcaacaagagcgaaactccatctcaaaaaaaagacttaacattttaagtatttattattgaacatctattttagagacaccacttcccacatttctcttcattattggttcccagagtacagccttggctctcttgcttttcattcctttttaacattttttttttttttttgagacagagtctcactctgtctccgaggctggagtgcagtggcccaatctcggctcactacaacctccacctcctgggttcaagcgattctcctgcctcaccctcccgagtagctgggactacaggcatctgccaccactcctggctaatttttgtattttagtagagatggggtttcaccatattggccaggctggtctcgaactcctgaccttgtgatccgcctgccttggcctcccaaagtgctgggattacaggcgtgagccactgtacctggcctcattttaaaaatttttattagttaattgattgagacagggtctagctgggacccatcttttcttcctctgtcctagagcagcctcttgtatttcaaagcagtctcaaaacgcatatagtgggccgggcgtggtggctcacgcctgtaatcccaacactttgggaggccgaggcaagtggatcacaaggtcaggagatcgagactaccctggctaacacagtgaaaccccatctctactaaaaatacaaaaaattagccaggcatggtagcgggcacctgtagtcccagctactcgggaggctgaggcaggagaatggcgtgaacctgggaggcggagcttacagtgagtcgagattgcaccactgcactccagcctgggcaacagagcgagactccgtctcaaaacaaaacaaaacaaaaacaaaaacaaacaaaaaaaacacacatatagtagtggtgtcctccctgcctaacatccttggaaaagcaacatcagcaactctcccatttgctcatgtcagttaccattttgtgcctctttgtcattgctttcccattgtgtgaattgcatgattctagggcatgcattgtcctcactggtgcgaaactctccctcatccaataccttggggaccaactagccattttataaatctatgccctagagaagtacttctcaaactataatgtaactaaaaatcacctagcaagctgttaaaacacaggttcctcaatcctgctctcaggtgatactgatgctgttggccagctggctgtactttaagtaacactgctttcaatcacaaaatgaaatgcttagagtaggaatttatattaatgtatatttactgcaaaattcaggcaacatcttgattgataagatcctaagattcctacacattcgaagatctgaaccaagttgcccttaactgacacaaattatttacttcagacggtactccagttggtggcccagtagccctggaaatcctttcttttctccactattaaggatttatttatttttgagatagggccttggcctgtcacccagcctggagtgcagttgtgcaattatggctcattgcagcctccacctcctgggataaagtaatcctcccacctcagcccccaaagtagctgggactacaggtatgtgccaccacgcccagataatttttaaatttttggtagagatgaggtctcactatgttgcccagtttggtctcaagtggatcctcctgccttggcctcctaaagcgttaggattacaggtgtgagccaccacacctggccctgtttaggatttagatctccttttaccctccctctgttttggttctagcagtctaccccttcctcctccatttcattctcaccttcctctaggtactggtggcaacactggtggtaggaggaaacggtggtaaatcctctctctcaaacccactgttaattgatctttagtcctacttcccttttcgtagcttcttcccctggcttggttttcatctgctgcctaaagtcctgtgagaaaatgttctgtgtagagtttagctatttctctgaaatgttttactttagtactttctctacaccttcaggacctatagggccttcatttttctccataaggtttcatgatggtgaggggagtgacattcttaggagaaacctttaataacttcctatctttttcgtattgtttctgttagttaatggtagactagacaaggttaaaaattgcacagaaacaataggtagtgaaaattttattttgagatggggtctcactctgttatccaggttggagtgcagtggcacaatctcaattcactgcaacttccatctcccaggctcaagtgatcctcccacctcagcctcctaagtagctgggaccacaggcacgcgcctccatgcttggctaattttttgtatttttgctagaaacggggtcttgccatgttgcccaggctggtcttgaactcctgagctcaggtgatccatccaccttggcctctctaaaaaccttctactctgccagaactctcttgccttaggtcctaggggataacctccagtagtttaagctggaaaagtctttaatcccagttacattggggaaaatacatacctgcctcttaatttgaaatggttatcacactttcccctagatatattattacatgaagtgattaagtttaatagcaataatattaatacttggtcaggcacagtggctcatgtctataatcccagcactttaggaatctgaggcaggaggatcacttgaagccaggagtttgagaccagcctgagtaacatagcgagaccctgtctctacaaaaaaataaaaaaaattattccagtgtggtggcgtgtgcctatagtgccagctacttgggaggctgaggcagaaatattgcttgagcccaggagttcaaggctgcaatgggctatgattgcaatactgcactccagcctgggtgacacagcaagaccctgtctctaaaaaaaaaaaattaattaatagtctgctttacttataacactgtggcttaaatgtttgttttttttgtttgtttttgttttttttttttgtgggatgtcttaggaacctagccaccctttacagattagttctatgataaatatattcgaaattccaaacttttatttttgagacaggggtctcactgtgttgcctagactggccttgaactctgggctcaagagatcttcctgcctgagcctcccaagtagctggaactactatgtagatatacactactatgatgcccggcttcaggttccaaacttcagacttgcaaataaactttcagaatatgacccatttatgtgttgtatcatatatatatatataaaaaatatatggatgtataaatgccttaaattaaaggtgtatactttgatttgtttgtttttggaagtgtaaatttgagtttgcttgaccttaaggtaattgtgtctcctcaaattgagataattcagaaaagagcaatatacaatagggtatcacctggctctgtgtctgctttatataggttgaatactcagataaaggaaattttttaaatttagcaacatgctctataaactcatgcaccttatatcttttgcaaaccatgtgaaaattcctatgagagttatatcaattaatgacaaatattttttccccttttaacttcttgcccatctgctgcacatgcatttgactttcttttaggcactatgattgaggatgtggtttaacactgaaacgattaggtactaaatgtaaaaatattggggaaatacagaaactaagtgttacaccctaccatgaagaggatgtattgtatgtcactatggttcactatccagatcctgatcttagaagcccagggtgggctgggcgcagtggctcacgcctgtaatcccagcactttgggaggccgaggcggatcacaaggtcaggagatggagaccatcctcgctaacacggtgaaaccccgtctctactaaaaatacaaaacattagccagacgtggtggcaggtgcctgtagtcccagctactcgggaggctgaggcaggagaatggcgtgaacccgggaggcggagcttgcagtgagtcgagatggcgccactgcactccagcctgggcgagagtgtgagactccgtctcaaaagaaaaaaaaaaaaaaaaaaaaagaaagaaaggaaaaaaaagaaaaaagaagcccagggtgaactagaactcagagctttgagttcctgcaatctaaggacagtcatgatgactgctgctttccacaagaagccccggtcccttaccatcattgcccacagctggcccaagagttgcctctattggcaatcactctgttagacgttaaggatacaaaatgtccatgattgtaaggagttcacagattgttggcaaatgtctgattttttttaggcagcctagaggatgaaagaacgtctgaattcctgggaatatcctggaaatccttgttcctcttgtatcttgtttctcctattagctttccattttagacatcatcattgaagccagagattagtctgcctacaattgagtgttttattctgatgggttgatcttacctgagctggtctcacttgagggctttcataatcatactggagtttcctgaaacgtaaaataggaatgttctcattcagtaaagctttaagaatgtgaagaaaatgatatgtctttttttcttatgaagaatctgaaataaataataattaaaagacttgcctggggttatatggtaaatgaaaggtgaaattgaaaccataactaagaaacctaactcccaagcctcagcgtaaataatataaccacccttacttcttcaggagactttgaatttatgaagccccccacttttttttttgagatggggtcttgctctgttgcccaggctggcatgcactggtgagatctcagctcactgcaacctctgcctcctgggttcaagcaattctcctgcctcagcctcccgagtagctgggattacaggcgagcaccatcacacccaactaatttttgtatttttagtagagacggggtttcgccatgttggtcaggctggtcttgaactcctgacctcaagtgatttgcttgccttggcctccgaaagtgctgggattacaggcatgagccacacctggcctgaaacactttaatatatattatttcagttataggctgagcatcccaaatctgatctttttttttttttttttttttttggggagtgggtctcactctgtcacccaggctgaagtgtagtggtgtgaactcggctcactgcaacctctgcctccctggctcaagcaattctcccacctcagcctcccaagtagctgggactataggcctgcaccaccatacccggctaattttttattgcttttatttttattaattttttttttttgagttttactcttgttgcccaggctggagtgcaatggtgcgatcttggctcactggaacctccaactcctgggttcaagtgattctcctgcctcagcctcttgagtagctgggattacagacaccctccaccacgcccaactaatttttgtatttttagtagagacgggtttcaccattttgaccaggctggtcttgaacttctgaccttaggtgatctgcctgtctcggcctcccaaagtgcagggattacaggagtgagccactgtgcccggcccaaaaaaaaaaaaaaattttttttttagacaggtctcactctgttgcccatgctggagtgcaatggcatgagatcttggctcactgcaacctccacctcctgggctcatgccatcctcctgtctcagcctcctgagtagctgggactccaggcttgcaccaccatacccagcaaatttttctgggggttgaggggggtttggtttttttgttagagacagtatttcaccatgttggccagactggtctggaacttctgggctcaagcgatctgcctgccttggcctcccaaagtactgggattgcaggcatgagccaccatgccctgccacaaatctgaaaatctgaaatgcaaaatctaaacctttttgagcttcaacatgatgctcaaaggatatgcctcattggagcatttgggattttggatttctggatttgggatacttaaccagtaaatatatataatgcaaatattccaaaatccaaaaaaatctgaaatttaaaacacttctggtcccaagcattttagataaggaatactgaacctgtagttatttgattaaaggactcagtgtatgtgtaatacacgtagctcagtgactggtctatagaatgcacttcatgttagctataatcttcttaataattctgtgtgttagtaagggctttttcctcctttcattttacaggtttatggaagttgttttactcaaatctttctggcacaaggtttcctgttcttttcactgtatcagattgcctcaggaacaaattattccaatttacatttcatttctagggcacaatatcatagagttggaaggaaccttcagtattgtatagtccagtttcctcttagagttgataaaaattgaggacaagagtgactaggtaacatactcaaggttatacagctaggaagtcttaggattaaaactgagtttttcagccaggtgtggtggctcacgcctgtaatcccagcactttgggaggctgaggtggggtgggggattgcttgaggtcaggagttcaagaccaacttggccaacgtggtgaaaccctatctctaccaaaaaataaaaaaattagctgggcgtgatggcacacacctgtagtcccagctacaggggaggctaaggcagaattgcttgaacctgggtggtgggggttgcagtgagccgagattatgccattgcactccagcctgggcgacagagactctgtctcaataaataaagtctttcaacttatgcaatacagacgactggatgtctggagtcctagatggaattctaaattctgtcccagcttgtcctaaaaagctgaatgggactcacctctgggtaccaccacctttacaatctgtactcttacatttgtctgatatctgctatttgtggttacttagtactgtctataatataaaggttttgaaatttgtagtgtctacctttgtttaattcatttggtgagagcatttattgagcgtctaccatttggcagtcactatggtagtgttagggatacaaaggctgacttgccttgtaacagggctctttgccagatggctggcacatgttcaggttttcagccaggcagcataagggataaaagaactcctaaatccctgggaatgccctatgctctaaagccctaattaaaatcaacagcattgtgattattgttaaatgatattcagggtatcacttagtgatggtttctgaggaagcccagaaaaggacataatgttcttctagaagcaggtgtagcctaaaagaaaagagagagagagataaacagacaaagagagatatacagacagactaatgttgggcaagaggagatttaagtaaacagagaaacttgttaggctgaggctaatttttctcacagtcttactgtgccatggtcagtacatgtattcttaacttaattggacaagtgaaaatactgaaatccagagaaattgaatgactcgcctaggtcacacagctagttaataccagagaagggtggactagaacctgggtcttctgatttttagtccagtgctctgttatgcccaattgctgcaacaaatgaaaatgacaacatattgagaggcagtgattatgggcatgggcctgtggtatactcagctgcctttgaaggggaagactccttgttttttttttttgttttcttttttttttttagtgctgagactgaactgaattatgtttctattttcagcataagcatcactattgacttagatgagactttttgtgggagaaagcaaactgccaaactgttctcaggccagacagacaggaattctcttaagattctcctaatgagatggatggttcctaaggctgctaccactgagccaaactctatcctggtagatctgagaagaggtcagagaccacatcagtaatatacctttcattagggtcacctgggatgggaaggttgcttgttttctaagtttaacacttagagagtcatatagcctatgacctttaaccttcttagctggtgataggggccctttgtcagtaaagcattcatgtggattctattccactgttgcaggtcactccccctattaagtctgaggcagcaaaggggtgttgaactgcttttctcactgtgaaggttcatgcattatgctcagccagttaacaggtcacaggaatggatttcccactgtgaaatgcctgcctttattgcatgtgtatattcttaaaaatttgccgtagcatcaaaccccttaaaaatgtgattatttcttttctagtagctacaaaattagaaataattaacttcttagattcttaggacaaatactcattgtatgcatttgtgtatccttgtacagtgttcccattgcttccttattcttacagaatgaaactctgaagtttggaagtgtctgagtcctgaagtaagataattgaatgtgacaggaacacagtaaccagaagacctgggaggctgcaaaagatttgcattgcaaatacaaaaataaataatgagacttatttttctcccttacagggaaattggattccaagatccatcaaggagcaaagaaggggttaatgaagcagaataaagctgtctgacccaggagaaaaggaactatacagcatagtggagttttgtgtactaaaattgctatctactggtcctttggaattgaagtagtagaaacctaaaggcttggcgtcaggcttgaatatctcagaacttaaactcttaccaaaatctgtatatttttcttaaggagtgggattcctactttatgtaatggggtcgaaatctttgaacacattatttataaaaacctgtttaaaaattctaa

SEQ ID NO: 15864 - DNA, 36472 bp, Homo sapiens
ggaagatggcggtggctggggcggtgtccggggagccgctggtgcactggtgcacccagcagttgcggaagactttcggcctggatgtcagcgaggagatcattcagtgagaacagttcgggtccaagcggggaaggagctctgggatgtgcactgcctgagcgaaccgggaagcggggaggactgaaaagttaagagagaaatgtgataaaggggctgcagtctgtagtctgtaggcgtcgaattttggcctccacctttgtagtttagtttctggaatagggtgtccggctccacagtctgccggtcgggcttttttcctgggaagacgcccaatctgtaataattagaaatgcaaggctgtcccaggagccagtttcctttctagagagaaggggcaggtcaaactgtatttcctaactttgaaccccttactcttttatttatttattattattgttgttattattgagacggagtctctgtcgcccaggctggcgtgcggtggcgcgatcttggctcactgcaacctccgccttccgggttcaggtgattcacctgcctgagcctcccaagtagctgggattacaggcacgcaccaccacacccggctaatttttaaaaatttttagtagagtcagtgtttcaccatgttggccaggctagtctccagctcctgatctcaagtgatccgcccgcctcgacctcccaaagtgctgggattacaggcatgagccaccgcacccagatatactctgaacattttagtcggcccaatctgagttgtgtcagtagagccaacagggtcagctgtgtcaataggacctagaatttaagtggaagcagcgtggtagagtacaaatagcttctgactctggagtctcaggttctatattctgttgtcgtttacctgttttagaacccaggacaacttaatttttctctctgtaccctggtttcttcatttataagattaatcattagtagagcttatcatgctttatgactcctatgaaatggagatggtgtacatgacttaatatctactttcaactgattgaagaacatttgttgcgctgctgttacacgccaggtgctggggtaacaaagacaagacagttgggttccccttcgttgatgagtgctgaggttggggaaatgaaggggcttgttggagcacaaaataaaggattctcattaagatttgaaaaactcggaaggtttattggaaaggataactttcacccgagaactaaggaatagacagaggtggcggtccaaagtgttcaggcaggggagaaaactacaaaaatgggacttgatcgaagaactgaaagtgttccttcatttgattccttggtcactgatgttgaaacctaaattgctgttctagggcttttgtaggaagtaagatgagtttctgagtttcggagaaaatagacttttggcaaggagacagttcaagtaggttattttaatggatttttttgaggccctaggagatggctcaagcccttattcccagcactttgggaggtagaggtgggaggattgcttgagactgggagttggagaccaccctgggcaacatagtgagaccctgtctctacagaaataaaaaaagtaaacaacaagataaaggattttttttaacactagaatagacaacaaaacaaaacagcgaaatcttatggtttggctttacccttgcttgaacgcagtcagattaagtatttagtagttttcaaacattttttaaagcagtggaatgctatcaaatgaaataatgaaactttgcaatatataaaacagaaaagtgttttttacgaatataagttcaaaattttcacttttttttttttttttttttgagacagattctgttgcccaggctggagtgcagtggtgcgatctcagctcgctgcaacctccgcctcccacgttcaagcgattctctttcctcagcccgagcagctgggattacaggcgcgcaccaccatgcctggctaatttttgtattcttactagagatggggtttcaccatgttgaccagggtggtctcgaactcctgacctcagatgatccaaccgcctcagcctcccaaagtgctgggattacaggcatgagccaccacgcctggcccaattttcacatatttattgtaaatatgtgtaatatattaaatatcaaatatattaaatattaaatatatcaaatattatattaaatatattaaatattaaatatatcaaatattatattaaatatattaaatatgtgtattatattaaatacagtattaaaaaaaaaagattgaggtggccaggcgcagtggttcatgtgtgtaatctaagcactttgggaggccgaggcagatggatcatttgaggtcaggaatttcagaccagcctggccaacatggcgaaacccccactctactaaaaatacaaaacttagtcgggtgtggtggagcgtgcaggtcatctcagttactcggaaggctgaggcaggagaatcccttgaaccgcggggcagaggttgcagtgagctgataccgcaccactgcactccatcctgggtgacagagtgagacctcgtctcaaaaaaaaaaaggaaaaaagaaagattgaggctatttttgataaattaacaatttgaaatagggtaagaatgatagatgtagtcttctcagtctagaatccagttgtattttgtttggattacacagtatcaagaaaatgcgttctcaggccaggcgtggtggctcacgcctgtaatcctagcactttaggaggccaaggcaggtggaccacctgaggtcaggagttcgagaccagcctggccaacatggtgaaaccccgtctctactaaaaatacaaaaaaaaattagccaggtatggtgacgggcacctgtaatcccagctactcgggaggctgaggcaggagaatcgcttgaacccaggaggcagaggttgcagtgagccaatatctcaccactgcactccagcctgggcgacagagcgagactccgtctcaaaaaaaaaaaaaaattatattccgcctgggaaggaggtcagtgcccgtcggcatgtattacgctaagatactatttgaagcatttgttaggtattcactagtattccacaacaggctattatgccatgatgaaagcatttgctgtgccttgcctggcatttaattgagaattacccaggtgtatgtactacagtaatgtactaacttgaacaattttatatgagtggactgaatttttgaaatagcacagagctattaacttttttttttttcttttttgagacggagtctcactctgtcgcccaggctggagtgcagtggcaggatctcggctcactgcaacctccacctcccaggttcaagcaattctcctgcctcagcctccccagtagcttggactacaggcgcgtgacaccatgcccagctaatttttgtatttttagtggagatgggattccaccaggttggccaggatggtctcggtctcctgacctcgtggtctgcccgcctcagcctcccaaagtgctgggattacaggtgtgagccactgcacccggccttaactttctaattagtgatacatttataagacataaatagctatccacagagttaacaaaataaactttggtccacaatctggatgagttcatattattttgataagatttggtatataacatatttggatgaatgttgttctttattataccttgttaagtagttaaaatgacatttattcaaatggttctgaaactctcttccctggttgtttgaaaaatactccagggttggccaggtgcagtggctcaacctgtaatcccagcactttgggaggctgaggtgggttgatcacttgaggtcaggagttcaagaccagcctgcccaacatggcaaaaccttgtctctactaaaaattcaaaaaattagccgggcgcagtggtgcacgcctgcaatcccagctactcaggaggctgaggcaggagaatttcttgaacctaggagccagaggttgcagtgagccaagatagcaccactgcactccagcctgggtgacagagtgagactctgtctcaaaaaaaaaaaaaaaaaaaaaaaagccaggtgcagcggctcagcctgtaattccagcactttggaaggctgaggcgggcaaatcacttgaggtcaggacttcgagaccagcctggccaacatagtgaaaccccgtctctactaaaaaaaagcaaaaacaaaacaaaacaaaacaaaaattagccgggtgtggttgtgcacgcctgtaatcccagctactcaggaggctgaggtaggagaatcgcttgaacctgggagatggagtttgcagtgagctgagatcgcaccactgcactccagcctgggagactaaatgagactctgtctgaaaaaacaaaaaaaccctccagggttaaatgatcccttgggattccttacagttttgcaagtctttgatagcagttaatcttttggtggggactggtaagtttggggatcaagatgattaaaatgtgtaagtcctgaaaaaccattgtcttttctaatccatagtaattagaagatgcctgtttttggggggtgtgtgtatgtgtgtgtgtatttttagtagagacggtttcaccatgttggccaagctggtctctaactcctgacctcaggtgatccacccgcctcagcctcccaaagtgctgggagccatcatgccccaccgtttttgcttgtttgagacagagtctcattctgttgctcaggctggaatgtagtggtgcaatcatggctctgcagccttcacctctgagactcaaaggatccttccacctcagcctcccaagtagctaggactacaggaacatgcctccatgcctggctaattttaatttttcttctagagacaaggtctccctatgttgcccaggctggtctcaaactcctgggcccaagtgatcctccagcttcagcctcccaaattgttgggattacaggcatgggctcccgaacccagacagaatattctcttagtgaggcccaaaggcacaaatttgtttacctctagagcataattctgcaattccaccattacactgtgaaaagaatgcagtacatacgataccaatcataggacaatttcataatttttaaaaagttaaaggatatagcactatggtaataatttttcttgcattccatatcattgtgtctgaattacagtttctgtgctgttttcagtgtcttgtatgttaattttttttttttttttttttgagaggaagtctcacttgcccaggctggagtgcagtggcacgatctcagctcactgcaagctctgtctcctgggttcacaccattctcctgcctcagcctcccgagtagctgggactacaggcgcctgctaccatacccgcctaatttttttttgttttttttttttagtagagacagggtttcaccgtgttagccaggatggtctcgatctcctgacctggtgatccgcccgcctcggcctcccaaagtgctgggattacaggtgtgagccaccgcgcccggccgcttatgtgttaatttataagtaatttttatcacttctttctcttgtaatgataagatgttcactgtagaaaactaaaaaaatcagaaaaggataaaaaagtaaactaaaattaccataatactacaacccagaaataagcactgtttctttctcttttttcccatatatattataatgtaatacattttaaaaacgtatttattgtaggaaaaaagaaaataaaaataaaactacctttaattccatcactcactagtaatcgttttggtgtataacgttgtttttttcctacacataagtgtatgtatgtatacattcataccagttaggatcgtatcgtatttctagcacctagcatagtacttggctcaaagtaaacactctaatagattaatgaatggtttttactacctagatctctgttaagattactgagaaacagtgtaagttagtcttgtttcaacaacttatatctttgcctcctgaggtacgttttgtcaattgagagtgctgaagagatacgagaatatgttactgatctcctccagggaaatgaaggcaaaaaaggtcaattcatagaagaacttataaccaaatggcaaaagaatgatcaggagttgatttcggatcctttgcagcagtgcttcaaaaaagatggtaagttaatgtaattatgcaaatgttgaaatattggtaagtgggcaggcttaaagaattattattattatttttttttttgccatcttgtgtttcttcacagctaacttaaacagagtcatatgtatacatatttttagttcggttctactcaatccgtaatgaatattgctctagttctttttcaacttagaaaatatcacaaaaaggccgggcgtggtggctcacgcctgtaatcccagcactttgggaggctgaggtgggcggatcacgtggtcaggagatcgagaccatcgtggctaacacggtgaaaccccatctctactaaaaatacaaaaagttagccaggcatggaggcaggcgcctgtagtcccagctactcaggaggctgaggcaggagaatggcgtgaacctgggaggtggagcttgcagtgagctgagatagcaccactgcactccagcctgggcgacagagcgagactccatctcaaaaaaaaaaaaaaaaaaggaaaatatcacaaaaaaatgtgtgtttacagacacaaatgtggcttcagaataatttgaaaaatttatacataaagaaacatttttcagtcgtgcatacctggatgtaagtaaagtgttgattgactatagtatgaatagcatttagagataactgcttaaatagtacaaaagataagcaccaaactaaataatctaagttattatgcaatctacaatatcagaattttgtttgttttgagacatggtctcactttcattgcccaggctggagtgatgtggcttgatcctagctcactgcagcctctgcttcctgggctcagatgattctcccacctcagcctcctgagtagctgggactacaggcgtgtgttaccacacctggctaatttttgtatttttttctagagatagggtctcactctgttgtccagggtgctctcaaactccttggttcaaacggtccacctgtctcggcctctcaaagtgctgggattatgcatgtgagccactaagcctgattttagaatatcagattttaatttaacttcttagtcccagccacttgtttgacttctttttcattgactgcactcttggaaatgatgatttaaatttaattctggtttgacaggaaaagataattaaaaatcttcctgatgatatcttgactctaaatattaagcatcaccttagtttattagctatattagttcaccaggaatcctcttatcaatctgtgtgtgtgtgtatttttttttttctatctttaaagaaattttagatgggcagaaatcaggcgaccatctaaagcggggtaggaagaaagggagaaacagacaggaagttcctgcatttactgaacctgacacgactgcagaggttaaaacaccttttgatttggccaaggtgagtgcttatagattgaagctttttctgactattggagaagaggaagtgactaatacatttcagagagcaaagtgtacaaattggtctagaatggcaatttttcaacaaatgcatgaattttaggtagaaaaagttacatatactcctttctatatggtagattttttgtttggcaacctgattagtattataaagacatctttgcttttttttttttttttccccaagacagagtcttgctctgtttccagtctggagtgcagtggtgcgatctctgctcattgcaacctccgcttcctgggttcaagtgattctcctgcatcagtctcccgaatagctgggactacaggcatgcgccaccatacccagctaattttcttttttttttttttgagacagagtctcgctctgtcgcccaggctggaatgcagtggtgtaatctcagctcaccacaacctctgcctcctgggttcaagcgattctcctgcctcagcctcccaagtagctgggactgcatgcgcacactgccacgcccagctaatttttcgtattttagtagagatggggtttcaccgagttgcccaagctggtcttgagctgctgagctcaggcaatccacccaccttggcctcccaaagtgctaggattacaggcgtgagccaccgcgcccagccctgtttttgaactttaaattaatggagctaaatagtgtgtactcttgtatctagctgcttttttttttttttttttttttttttttgagacggagtcttgctctgtcacccaggctggagtgcagtggcgcaatcttggcccactgcaacctctgcctccctggttcaaacgattctcctgcctcagtctcccaagtagctgtgattacaggcacacatgctaccacacccagctaatttttgtatttttagtagagatggggtttcaccatgttggccaggctggtcttgaactcctgacctcaagcaatctgcctgccttggcttctcaaagtgctgggattacaggcatgagcaactgtgcccagccagtgtctagcttctttcaatttatgagattcatctctactctgggcagctatactttctcattctcattgctacacagaattgtattaagtgaacacatcacaatttatccattctattatttggatagtttccaattccaatgcaacagtgaacattcttgtatgtatttttggtgaacatatttacacatttctgtttagtatatatctaggagttgaattgctgtgtcatagaacatgcatatgttcaacttcagttgatatgagtttgcagtcctgccagcagtgtatgagaggtctaattcttttgtatctttgctaacacttcatattttctctttttcagtttagccattctggttggtatttagtggtattgcattttgttttcgtttttgcattattttgacgactaatgaaattgagcactttttcatatgcctgttagtcattaggatatcttttgttatgaagttcttattaggttttttttgccctttttttgtttgagataggatctcgctctgttgcccagtggcgtcaactcgactaactgcaacctccaccttctgtttttctattgtattatctgtccttttcttagtggtttctgattaagtcaactttatatttatttttcctattttattgatggcccatatttccaaatctgtgaatatcatctgcttttagaggcattcttgtttcttatgatctccaatttagctgtgcttaaagatgtcatataaacagatttaactgctacatttaccctccactagctatagtaatgggctgaaagctactagcagaaaagacaaggtaattatcagctagtttttctagagtataacctttcctcagaaccttgattataactaatttgtatttcttcctttcactgccttctttcttggttcttggatagtatataagttgttactgaacagaacggagcattttctcccttgactttttacattgtcattaattatttgatgttattttgatgtctttgtacgataggcacaagagaacagcaactccgtaaagaagaagacaaagtttgtcaatttatacacaagagagggacaggacaggcttgcagtcctgctccctggtcgtcacccttgtgattgcctgggccagaagcacaagctcatcaataactgtctgatctgtgggcgcattgtctgtgaacaagaaggctcaggcccttgcttattctgtggcactctggtaaattatttcttttctattttattttactgtgctttgtgttaatacgcagagccagtcagatctcaagtaatttctctttttttgtttttttttggttgagacggagtctcactttgtcgcccaggctggagtgcagtggcacgatctcggctcgctgcaggctctgcctcccgggttcatgccattctcctgcctcagcctcccgagcagctggaactacaggtgcctgccaccacgcccagctaatttttttgtatttttattagagacgggattttacagtgttagccaggatggtctcgatctcctgaccttgtgatccgcccacctcggcctctcaaagttctgggattacaggcgtcagccaccgtgcctggctttctctttttcttagtaaatttcttccctaaaatatccagtgaactcgagtgtcagggatatgattagttagaaacccaaggttaggccaggcacagtggcacacgcctgtagtcccaacactttgggaagccaaggtgggttttgggaggctgaggtgggaggatcacctgagcccaggagtttgagaccagcctgggcaatgtaggaagaccctgtctctacaaaaaaaaaaaaaaaaaaaaaaaaaagtttttaattagctgggctgggtatggtggtgcacacctgtggtagcatttacatgaggggctgaaatgggagcttcacttgatcccaggacgtccaggctgcagtgagacagcgagtccttatctcagaagaaagaaagaaccccaggttatatcctagtactgaggccattaatgagaagggtttgagaacatacattgttgagagatccaagggctaggagccactgtgacagaatcctcagatcattatagcttctatttccaggattccaccttgtcatagctctgctttgtctgagagaatgacctcaagaatgcagtgataatgactcacagaaacccttaatgagctatctagaaagctaattttaccaagttgagctggctgtcagaagcaatgacatttggtgttggtaaaggcatccgttttatattacttcattttctcctcttttctgatggggcccttaattttttcttttttccttttttttttttttttttttttttttttgagacggagtctcactctgtcgcccaggctggagagcagtggcacaatctcggctcactgcaacctctgcctcctgggttcaagcaattctcctgtctcagcctccctagtagctgggacaacagggacacaccaccacgcccagctaattttttgtatttttagtagagacagggtttcaccatattggtcaagctggtctcagaactcctgacctcaggtgatccaaccatctcagcctcccaaagtgctgggattacaggtgtgagccaccgtgcctggtgggacccttaattttttcatatgctcagaataagctgatagacaatggatgacctgaaaaatgtagtgtctaccaataaaaatgtccattaaatggcagtaaatctcctcccatatggagctttctctttagagcaagctcttatagctgctggcaggaactctgtgtgtcattgaggcaactgctaggaagtattgtacagtgttttctcctaggtcccttgaagtaatgtaaagcagattggccttgaagtttgtttgtttgtttgttttttgagatggagtctcactctcttgcccagcctggagtgcagtggctcactgcaacttccgcctcctgggttcaagttcaagtgattctcctgccttagcctcttgagtagctgggattacaggtgcccactaccacgcccagctaatttttgtatttttagtagagacagggtttctctatattgaccacgctcaattgaactcctgacctcaggtgatctacctgcctcggcctcccaaagtgctgggattacaggcatgagccactgcgcctggcccttgtttgttttttagacagagtctcaggccaggcatgctggcttatgtctgtaatcccagcactttggaaggctgagttgggaggatgacttgagcccgggaggtggaggttgcagtgagcagagatggtgccaccgcactccagtctgggtgacaaagccacaccctgctcaaaaaaaaaaaaagaaagaaaaaaagaaaaaataacgtactctcaaagataaatatttctcactgttgagaatactagataaaacatatgtgactttaccataaaaagcaacccagttctaatcatgaagcccaaatctgacaagagaagttaattataagaagatgtcttattagaaagaaccagaagccaggtatggtggctgatgcctataatcccattgctttcggaggctgaggagggaagactgcttgagcccaggagttcaggaccagcctgggcaacatggcaaaaccccatatctacaaagaagtcccagctcctaagtagctggaactataggcacacaccaccacgccaggctaatttttgcatttttttgttgaaatggggtttggccatgttgcccaggctggtctcgaattcctgcactcaagcaatctgcccacctcagcctcccaaagtgctgggattacagtcataagccactgtgcccagccttttttttttttttttctaaaccattaagtcattcagggacatgtgcagtgatataagttttttgtttgggtcataaaaaagaaatggaaagagatctggagaaaactcatttgcatttttatattttggtgtgtttggattaaaaaacaccaatagtctcattattttatcatcatctaatgtgtaatttcaggttacttttagatatatcaagaaagcaatataatttaactgttggatcacatgtcttactcttactattttacaggtgtgtactcatgaggaacaagatattttacagcgtgactcaaacaagagccagaaactgctaaagaaactcatgtcaggtagacagcagtcttgtaattggatcactgggatgatgggtaccttgttgcgtctgtggttgtttctcttttctgtatcctggagtgcaagatgcagtttattcactcattctcagtttttttggggggttttttttgttttgttttgttttgttttgatgtggagtctcactcttatcacccaggctggagagcagtgacgcgatcttggcttactgcaacctccgcctcctgggttcaagtgattctcctgcctcaaactccctagtagctgggattgcaggcgtgtgccaccacgcgtagctaatatttacttttttttttttttttgagatggagtctcgctctgtcacccaggctggagtgtagtggcgctgatctcggctcactacaacctctgccttctgggttcaagcaattctcctgcctcagcctgccaagtagctgggactacaggcacatgccaccatgcctggctaatgttttgtattttttagtagagatggggtttcaccatgttagccaggatggtcttgatctcctgacctcatgatctgcccaccttggcctcccaaagtgctgagattacaggcataagccaccacgcccagccaatatttacatttttttagtaggggtggggttttgccatgttggccaggctggtcttgaactcatgacctcaagtgatctgcctgcctcggcctcccaaagcactgggattacagatgtgacccactgtgcctggcctattcactcattctataagcatctattttttagaaaaattattaagactacataacattgaacagcaaaataaataatagtattacattataatctaaataaaattaatatccatgtgaccatacttgtataaataactgaataagttaataaaatggagaaaggacaacttcttataaaagaattccagttaataaagtacaagaaatgaaaatactagaaaatcacaattagaacactacagtagtaactgccacaagcacgatccaccaatggatactgaaattattggttgaaagtttaagaacaagagatttacaatgtcatgaaagacaagaaaagattgaagaaacgtcacagatcagagtagattaaggatatatatgacgactaattgcagtatagatccagtattagatcctagaatagaaaaatgacattaatgggaaaaaaatgttaaaatccaaatagtctgtctatagtattataccaatattaatttcttagttttgataattgtactatggttttgtaagataagatggtaacattaaaggaagctatgtgaaggttatataggaactctacttattttctaattattttgcatgccttttatgcttgaaacacacctgacaaaaatggttaaggacattttttttttttttgagacggagtttcactctttttgcccaggctggagtgcaatggtgtgatctcggctcaccgcagccttcgcctcccaggttcaagcgattcttctgcctcagcctccccagtaggtgggattacaggcatgcgtcaccaccctgactaattttgtatttttagtagagacagggtttctccatgttggtcaggctggtcttgagctcccgacctcaggtgttccacccacctcagcctcccaaagtgctgggattaaggtgtgagccaccgcgcccggccaacatttttttttttttttctgagacggagttttgctcttgttgcccaggctggagtgcaatggcgcgatctcagctcactgcaacctccgccacttgggttcaagtgattctcctgcttcagcctctcaagtagctgggattacaagcgcatgccaccttgtccagctaatttttttgtatttttagtagagatggggttctcccatgttgactaggctggtctcgaactcctgacctcagatgatctgcccacctcaacctcccaaagtgctgagattacaggcgtgagccaccgcacttggtcagttaaggacattatttttatttatttattatttatttagttagttagttttgagatggagtctcgctctgtcgcccaggctggagtgtggtggcgtgatctcggctcgctgcaagctccatctcccaggttcatgccattctcctgcctcagcctcctgagtagttgagactggcgacgcccgccaccatgcccggctaatttttttgtatttttttagtatagacggtgtttcactgtgttagccaagatggtctcgatctcctgaccttgtgatccacctgccttggcctcccaaagtgctgggattacaggcgcgagccaccgcacccctatttttaattttttttagacggagtctcgctctttcgcccgggctggagtgcagtggcgcaatcttggctgactgcaacctctgcctcctgggttcaagcgattctcctgcctcagcctgccacgtagctgggactacaggcgtgcaccactatgcccagttaaattttgtatttttagtagagatggggtttcaccatgttggttggccatggtggtcttgatctcttgacctcgtgttccacccgcctcggcctcccaaagtgctggaattacaggcatgagccaccgcgcccagcagttaaggacactattaaaaagaaaaacaatatactcattactcactacttacgcaaatatttcattttgttcctaccttggttcatagtagtttttgttttatatcgacagatttgttgggattataatgtagtcatctgtgtaaaaacatttgtttttccattttccaactaattcataattagctgccatcttgctatatattcataattgtttttagtagctaaaaatagtcttttaacttggtttattatagtatgattatttcctaattactggatatttgtttccaaattttaaataatattacaaattgtcacctttattaacatagcttttgatttacttccttgtgataaattgctaagaataatgttactatgtcaaataatgtgtctttttttgacacttgagatgtatttgccagattattttgtcaaaatatataaatagccgggcatggtggctcatgcctgtaatcctagcactttgagaggccgagacgggcggatcacctgaggttgggagtttgagaccagcctgaccaatgtggagaaaccccgtctctaccaaaaacacaaaattagccgtgcatggtggcacatgcctgtaatcccagctactcaggagactgaggctgggaattgcttgaaccccggaggcggaggttgcagtgagccgagattgcaccattgcactccagcctgggcaacgagagtgaaactccatctcaaaaaaaaaaaatcatattaatctatagcaatattagcattgtacccagaatcctgttcactcttgagttttgacatttcaaatttgttttagttgtaaaaggctgtaattttattattttttatttttatttttatttatttatttgttttgagacagagtctctgtcacctaggctggagtgcagtggcgtgatcttggctcactgcaacttctgcctctcaggttcaagcaattctcctgcctcagcctcccaagtagctgggattgcgggcgcctgccaccacacccagctaatttttgcatttatagtagagacagggttttgccatgttggccaggcctcctgacctcaggtgatccacccaccttggcctcccaaaatgctgggattacaggcatgaaccaccgcgctcggcctgtaattttattattaatgaggttgcacatgcctctatgtttttttcaattagattttaaggtaatcattctgagaaaaaatagttctgattgtacgtactgtccttgtttgtttgtttgtttttagacggtctctgtcaggctggagtacattggtatgaacacattttactgcagcaattctcctgcctcagcctcccaagtagctggatctacaggcttgtaccaccgtgtctggctaatttttaaattgtttgtacagatgggctctcaccatgttgcccaggctagtcttgaactcctaggctcaagtgatcctcccacctcagcctcccaaagtgctgcaattacaggagtgagccactgcacacagccacctaacccattttggatcttgggtgtatcataatctatggctctcttttctgggatatacaaatttacaatatgctgtcaaagaagaaaacacaaccatggaatcaatgttggctttagagttatactcgagctcagattttgtttctatggtctaatttctttttcttttcttttttttttttttgagatggagtcttgctctgtcgcccaagctggagtgcagtggcacggtctcggctcactgtaagctcagcgtcccaggttcatgccattgtcctgcctcagcctcccaagtagctgggactacaggtgcctgccaccatgcctggctaattttttgtatttttagtggagacagggtttcaccatgttagccaggatggtctcgatctcctgacctcatgatccgcccgcctcagcctcccaaagtgctgggattacaggcgtgagccactgcacccggccactggtctaatttctaactgtgtgaactcagtaaatttatagtcatctctgaacttcagttactttatctgtaaaataaagataatacaaactgtcttacagggttattgcgaaaattaaataacatgtatactaagtgactcagcatttagcaggttctcattaaactgaaactgttcattttttctgccccttttgtgaaattttcttttttcttccattatttagtgtttagttttgataatataaacgtatatttaggctggcatagtggatcatgtctggaatcccagtactttgaggtgctgagttgggaggattgcttgaagccaggactttgaaaccagcctgagcaacatagtgagacccgcctctctacaaaaatttaaaaattcagacacaatggcatgtgcctgttgtctcagctattcaggaagctgaggtggaaggatcgcctgagcctaagagtttgagactgcagtgagctatgatcacactactgcactccagactgggcaacagcattagatcctgtcttgaaaaaacgtatatttaaaggtaatattgagcaaatgtcttcttcactgagaaggcatttttatgtcacattcttaaatactttggtgcccttagtgaaccaaatttttataaaggaagaaaagatccctgccatttattgaaaacctgtcatgtgtcaagcactgcttactgctgtacaggtaaggcctggactgtgtacttgttttctgttgaaatgaaggctccaggccatcaggccagaaccagatcttctgatgttttgttctttgttgcacactggtacaactaatttgtatttagaggctgacaccatttgacttccttattgaatttcaggagtggagaattctggaaaggtggacatctctaccaaggaccttcttcctcatcaagaattgcgaattaagtctggtctggagaaggctatcaagcataaagacaaactgttagagtttgacagaactaggtatgaaagggttagaataacaaatgctaagaaataaactagtccacagattctggccattattttggtacttgataccttctcaaagtggagtgtgaaagagtttatagcaaaagaagagccagatgctctacataggaggcctacatcttgttttttaatccacggttgaataatataggctcctatgaaaagaatcctgtcctgtagcattttttgattcctgacaaatgttagtatatcccctggacagttatgtgagttgacagaattcaccacttgttttacttgtagccattcattcagtcacctgtattagagtacgtgttatttgcaaactgttaggctgggctctggagaatctgtaaggaattgcctctgggagaacacaggttatgccctatcataggagggcatgatttacccttctcctttactttgactaaatttgttttttgattcaataatcggtatattaaaatacaactaaattagctttatactactgcattattattgtttagcccattgacttctgtttaggagatagatttatgataattctgtttttgacttcctccttacttacatttttttttcttttgaaaaaaatacttgttgaaaaccagttagtggtaaaaaatgtttggataggatttatatgctcccttctcaaatgactctgagggtcctcagagagaccctgaatctcttgtaacctgagagtctgttgctgacagtgtaatcttttgatgggacattcctgctacttccaaaccatttgctatgaatacatgagataagatttagaaaactattccttaaataaacccatcacaaggtgtataactcatattcactcttcatcctttcagtatcacatttcaccctactcagtagaacgtattattagaaatagaaatggaagccgggcacggtggctcacacctgtaatcccggcacttggggaggccgaggcaggtggatcacgagatcaggagatccagaccatcctggctaacacagtgaaaccccatctcactaaaaatacaaaaaaattagccaagcgtggtggcaggtgcctgtagtcccaggtactcgggaggctgaggcaggagaatggcatgaacccaggaggcggagcttgcagtgagccaagattgtgccactgcactccagcctgggcaacagagtgagactctgtctcaaaaaaaaaataataataatagaaatagaatgcacttactttttgataaacagaaagtggaaaagggtctctccctattgttgctgttttgctggtgtattcatggataccagtttcattatctaggtttttgtataagaccaatttccaccaggcacagtggctcacgcctgtaatcctagcactttgggaggccaaggcagacggattgcttgagcctgtaagtttgagagcagcctgggcagcatagcaaaaccctgtctgtacaaaaaatacagaaattagccaggagtaatgttacatgcctgtaatcccagctacttgggaggctgaggtgggagtattgattgagactgggaggtggaggttacagtgaggcgagattaatccagtgcactccagcctgggtgtcacagcgagattgtctcaaaaaaaaaaaaaaaattcctccagagtactgttaaaaaagtttctactctaagtctgctttatttttgttttttttttttgatccgccagcctcggcctcccaaagtgctggaattacaggtgtgagccaccgtgcctggcctaagaagacaaatttttttttttttttttttttttttttgagatggagtcttgctctgtcgcctgggctgcagtgcagtggcgccatctcggcttactgcaagctccgccccctggactcacgccattctcccgcctcagcctcctgagtagctgggactacaggcgcccgccactacgcccagctaatttttttgtatttttagtagagacggggtttcaccgtgttagccaggatggtctcgatctcctgaccttgtgatccgtccgcctcagcctcccaaagtgttgggattacaggtgttgagccactgtgcccggctgacaaaatttttttataattctagctgagtatgaaaatttgaagccaatatatgaatctaacttcagtatttcccttatgtctatttatgtcactatttgtaattatggggaaacgtaatcttaactggatttatgacattggagtaatcactcaacttctatgagccccaggtttataatatgtagaattagagagttagaccatcaagattccttccaggttttagtgtctctgtcagtatgatcttagagataggcctaattgtcatattttggaacttggccccagtgcattagtgagagcctgcaaagtggggtataggtaatgacatatagtagtagggtaatagaatgtcttaagagtaaatagttggccaggcacagtggctcacacctgtaatcctagcactttgggaggccaaggtgggtggatcacgaggtcaggagttcaagaccagccaagccaagatggtgaaaccccatccctactaaaaatacaaaaattagccaggcatggtgttgcgcctataatcccagctactcaggtggctgaggcagagaactgcttgaactgaggaggcagtcacaccactgcactccagcctgagcgacagaacgagactctgtctcaaaaaaaaaaaaaaggtaaatagttaagctacagaactgagacttaagcatagaactccagtaagcaaataagcctagcaagaataggctggatcccagttacagagggactaggatatttagtaagctgtcaaacttgaactcagatgcagcaaaaccaggctgaagcccagctttcagaaggtagaggctggactaatatgaaaggtagaaggaaaatgtattatggtgctgtgtcttttcttgcctgaggttgagataagttctaggagctgagcctacactggagataaaacatatgcagagcttgacctgattttggaacatatttgagatattaagttaccttgaaactgttttccaataatcggtccttatttgtcaacagatgacctaattaccatgtgttccctttttctcagtattcgaaggacccaagtcattgatgatgagtcagattactttgccagtgattctaaccaatggttgtccaaacttgagcgggaaaccttgcagaagcgagaggaggagctgagagaacttcgacacgcctctcgactttctaagaaggtcaccattgactttgcaggaaggaagatcctggaagaagaaaattcactagcagagtatcatagcaggtaagtgagcagcactagaaagggtctcaaagaaggaacaggttgaccataaaggattttccctttctagtggatcttttatttttgttgatttaaaaaatgtgtttatttggaacagaaaacatgttaagaatagctaagaaaaaatgtttaaatgagcactcctaccagataattactgatttttgtggtttggtttttttttttttttttttgagatggagtctcgctttgttgcccaggctggagtgcagtggcctgatcttggctcactgcaacctccgcctcccaggttcaagccattctcctgcctcagccccttgagtagctgggattacaggtgcccaccaccatgcccagctaatttttgtatttttagtagagacaggttttcaccatgttggccaggctggtctcaaactactgacctcaagtgatccgcctacctcagcctctgaaagtgctgggattataggcatgagtcaccatgctcagcaaaaaaaagtttttaaaacaatgagatatagtatgggcacagaaatagatcaatgaaacagaatccagaaagagattggtatgtttacattgtgtttgtatgtgtgcatgggtgtgtgtatatatgtatgtgagtttagtaatcaataaagctaacatttttaattgctaaagcaataattaaatatgttattttgggataattgcctgtttagaaaaaaatctaggtaatgtctttatctcagaccattctatgatgctgtaataagtttcactaaagagttaaatataaacaatataaagggatcagaaagaaatacagaattataggagaatataattatagtcttggtgtgataaagctcttcctaagcaagatacaaaatcctgaagtcatgaagatataagatattttaaataaaaaagacagtaccaagttggaagaaaatattttaagtggttttaacagtcaaaggaacaatatccatactatataagtaagaactcttgcaaattaaaagaaaatgaccaaaaactccagcagaaaaatggacaaaaactaaaaacaatttacaagtggggaagtacaaatagccagtaacatttgaaaagatgtttaactagcaatcaggaaatacagattttaaaacaatatatcaattttctttggctcatcaaatttggcttaaattttttttaaaggataatattgcatattgtgtgggtataggaaaatggggatattctgttactgtgaatgggagtattaaaatgatgcagcctacatactgtatgattttaactattcagtagttccagggattagaagagagggaggaataaatagaaggagcacagagaagatttttaaagcagtgaaactactctgtatgtagttataatggtaaatacatgtcattataaatttgtccaaacccataaattgtacaataccaggagtgaacgctaatgtaaactatggcttttgggtgataatgatgtgtcaatgtaggttgatcagttgtaacaaatgtaccactctggtgagggatgctaataatgggggaggctatgtatttgggaggtctcagggaatgtggataacctctgtatattcctctcaattttgctctgaacctaaaactgctctaaaaaataaagcctaaggctgggtgcggtggctcacacctgtaatttcagcactttgggaggccaaggtgggaggatcacttgaggccaggagttcaagaccagcctgggcaacatattgagaccccaccttaaaaaaaagtctattaacataaatacataaacaaaaaagttacaactttttagaagagaatatttaaattgtgcatactgttttttttttttgagacaaagtctcgctctgttgcccaggctggagtgcagtggcgcgatcttggctcactgcaagctccgcctcccagattcacgccattctcctgactcagcctcccaagtagctgggactaccaacgcccgccaccacgcctggctaattttttttgtagttttagtagagacagggtttcaccgtgttagccaggatggtctcaatctcctgacctcgtgatccacccgcctcggcctcccaaagtgctgggatacaggcgtgaaccactgcgcccggcactaaattgtgcatacttttgacttatcagctacacaccacatatcaagataacaatttccttttcccttgtcaaagattttttaaaaaaattgccattttcagacatgaaaaatagtatttcattctaatttttattcacattcctttgctttagttgtatgttagtaagtttgagtgttctgaaaatgtattcatttgcttttttactatttcttttatagagattctagagttctggatatacttatcattttactgtgtcaaatttattcctctctttcagacctcactctccccacgctattttagacttacctcatcatacaaattcttatactttttaaaagcttcaggcctttgtttctgatttttccttggtttggaaattcctcctccattctttgcatttcacatacctacctctcccttgaacctacatgatacaacatgttggatgatggaataataaccactaaatggattgtgcctgtttcatagtaattattacatcccctcatgtatgattcatcatctatacggctttcttaaatctgccacttggattgaaagcctctttaaaaaaaaaaaaaaagcctcttgaaggcaggaacaatgtcttccccaccttttaagctgccttatatatgaggtattcctaacaaacatatattgaattgaattgaaggtcaagtttagcctttcctgttagttgaagcttttcattatgttgtgcctcacaattattattgttatccacaaacgttttgtcaagcatccaacaggagtattgaatagagtagcaagtactgtagagctatagaatgaattaagatagggttccttcagggcttatgatctcttactaactaaccagtaggtttccacaatctttaaatgaaaatcatcacattcttttataggtttagagccagatatccaatgccaacatcataggcatgggataacaggggatgtatccaatgattgtttagatagtgggtactataggaccttagagaaaggattaagcatttttgttctgggccagtagggtacctctttataacttctgagccttcaagcaaagatagaatgcagactagcaagaaggagtggagaaaggactgctgagcagacagaggaataactgtataggttgtattgcgaagatgagctgccatagaatactcttctgtgggtcagggtattcctaggcaacttttttttttctttttgtgacagggccttattgactattgcccaagctggagggcagtggcgccttgaactcctgggctcaagtgatcctcccatctcatcctcccaagtagctagaactacaggtgtgagccaccatgcccagctaatttattttttgtagaaccagggtctctctatgttgcccaagctggtctcaaactcctggcctcaagtgatccgccctctttggcctatgatagtgttggaattacaggcacgagccaccactcctggcctctaggcagcttttctggtcttggcatgtttaatgatcttgttgagcaggtgaatgactgtagcgtgccctatgtattttcttggtattctggaacttttattttatttatttttatttttttttatttttttgagacagtctcactctattgcccaggctggagtgcagtggcacgatctcggctcattgcaacctcctccgcagtttcaagtgattctcctgcctcagcctcccgagtagctgggactacaggcgtgtgctaccatgctcagctaatttttgtatttttagtagagatggggtttcaccatgttggccaggatggtctcgatcccttgaccttgtgatccgccctccttggcctcccaaagtcctggaattacaggagtgagccactgtgcctggccattctgcaatattcattaactcatattccttagggtttttggtgtgagaaggaagttggagtggggagtagggaaggtcatccatagactcctctttatattccaaattttattactattaaagcattttatgttggtggtaagcattctgagcatagaacattaccaattgttgcatccttttggtttattatcacagactagatgagacaatacaggccattgccaatggaaccttgaaccagccactgaccaaattggatagatcttctgaagagcctttgggagttctggtaaatcccaacatgtaccagtcccctccccaggttagtggacctttgctctaactgttaataagaagtttggccccaattttgccttcttttaagtatgtctatttcatagacttcagataccaatcagctctctcaatacacctgtaccaatcagctctctcaacacacctgccaaccttattctctggcccacattttttccatttttattgcagtacttctgacaaattgacttgttttatcttccaagtacttcccaagaaagggttttgttaagtactatagaaatttagacagaaattccatggttcttttgttaatgctctttctcttttttttttttttttttttttgagatggagtctcactctgttgcccaggctggagtgcagtggcatgatctcgggtcactgcaacctccgcctcccaggttcaagctattctcctgcttcagcctcctgagtagctgggactacaggtgcccgctaccacgcccagcgaattttttgtattttttaatagagacagggtttcaccgtgttagccaggatggtctagatctcctgacctcgtgatctacctgcctcaacctcccaaagtgcccagctatcaatgggttttatagggaagctggcattcattaaaagtaaatattcaccaggcgcactttgggaggctgaggtgggcagattgcttgagcctgggagttctagaccagcctgagcaacatggcaaaaccccgtctctactaaaaatacaaaaattagctggccatggtggcgtggtgcctgtagtcccagctacttaggaggctgagtcgggagaatcacctgagcccaggaggcagaggttgcagtgagctatgatcatgccactgcactccagcctgggtgacagagtgagaccctgtctcaaaaaaaaaaaagcaaatatttttgaaaaatatatgtttgggaatggtggagaaaaaaattccaggcagaatgaattgtaggaacaaaggcatgtgtacacaaaaacatgggatatagatataggaatttccaagcacacaaatctggagagggaatttccaggcagaaggtacaacacatacaaaggctcagcagcgtgagagcattgcaggtttggggaatcacaagtaattaactattgttatggactgataagtgtattagtttcctagggctgctgtaacaaagtaccacaaattaggtgacctaaacaacagaaatttattatcccatacctggaggctaaaagcccgaaatcaaggtgttggaaagactacattccctctgaaggctttacaggagaatgcttacttacctctttaagattctggtggctctaggtgtcttttgccttgtagctcattactctaatctctgcctctgtcttcacatggacttcttccccatgtgtgtctctgtcactgtgtgctctctcctcttacaaggatacaagtcattggatttagggcctactataatctaatataacctcatcttaaactgattacacctgtaaagattatttccaaataaggttgtattcacagattccatgaacgtggacattgattttggggggatactactcaacccagtacagtaagcaacacctgatcatgaaagattttttgtcttatgctaatgagtttaggttttgccctaaagtaggcaaagaagggttctggaagaattttaacagaagattggcatggcttccatgcctacgtagagaatggattggagggaagagtaagtaagattagaagctgagaaattgccaaggtagtcattgcaatagcaccatggaaagatgatgccagcccaaattagtattaaagcactagtggagcagtagagagttatttaaagaccaaaagtgggagccgggcctgagatgtagtgatacacatctatagtcccagatacttgggaagctgaggtgggaggatcacttgagaccaggagttggaggctgcagtgagctatgattaagccaccacactccagcctggatgacacagtgagaccccatctctaaaaaaaaataattatcatcataaagactaaaaatgtagatgaagagacctgctggcagattctttaatagtattatcaaaagataatgaggaattaatttaggaaagtggctgtgtaattagagggaacagctgtagtagaaatagaaaaaataatttgggcctcaagattgttcacataccaacattttatgaaattatttatttccagccaggtgtggtggctcacgtctgtaatcctagcattttgggaggctgaggaaggaggatcacttgaagccaggaggtcaagaccagcctgggcaacagagcaagacagtgtctcaaaaaaaattttttttaaagaaattatttatttaccctataatggatcaattctttttcctctttggtcctctgtaaaaacttctatctcctatttagtatgtagtcaattctgccttatgttttgaatagttatttatgtgtctgtcttccactaggctttaagttccttgcaagcaagaaccgtatctttttcatattttatgtctccctagttaatgtgcttttcacagttaagtactcaataaatgtgtatttaatttgtaaaaatgtgtatttttaagatatgccacaattgacaagaatcataaaattgtatggcagaaagatccttagaaatttatttagtccaacttcatccttttccagtttgaaaaactgaaatctttaggggttaaatgcctagggtttcgactaccactagaagttttttcctataagttattttatgttcatttttatttatttttgagacaggatattgttctgtcatccaggctagagtgcagtggtatgatcatagctcactgcagcctccacctcccaggctcgagagatcctcccatctcagcttctcaagtggctcagactacagtagccacgtgccatcataccttactaatttgtatatttttttgtagagaaggagtttcgccttgttgcccaggttggtcttaaacttctgggctcaagcgatcctcctgccttggcctccttaagtgctgggattacagacatcggccatcatgcctggcccttattattatttttaaagacacaggacctcaccatgttgcccaggctggccttgaacttatgggctcaagtgatcctcctgcctcacctcctgagtaactagtgaagctacaggcatgcttcactgtgttcagctttataaattattaattttttaaaaaagataaccccaaatatcatcatgctaattgcctttatttttaaattttaattttggaggacatggtatcgttgctctggaagaaacattaacctttgccattctctgtctgaactgttgccaagactcttcactctcctgtaattacctgtaccttataattctctattctttttatatgatgggagccctgttttagtagtcctccaccctctctttcaggagacaagttcttcatttcagggtaagagaatatttcatgcatccagtagtcagaactgctgcctctgacctgacaacatctgtttggctttgtcatggtgccagcatgtgacactgcccctaagcacatgcagaattgtggaccaaaatgttgaactttcatttagctcacagaattctattgaaaaattatccagaaccaagtatggatcattaagtataaattggaaataattatagctcttttggtgtgatatttgtgctgttgctggaattagtaagcattgtatggagatttcaacattctaattattctttaagatgggccttgttatcatacctgagacttctactgaatgtatactatctctacccttttggccttattgcagacaaagatgggattatttttcatttgttgttgttgttgttgttgttctgagacagagtctctcttgcccaggctggagtgcagtggcacaatcttggctcattgcaacctccacctcctgggttcaaatgattctcctgcctctgcctcatgagtagctgggattataggcacctgccaccacgcccagctaatttttgtagttttagtagagatggggtttcaccatgttagccagactggcctagaactcctgacctcaagtgatccacccgccttggcctctcaaagtgctgggattacaggcgtgagccacgatgcccggcctgggatatatttttctaagaaaaatgttcccaatatgatttcctcattattagcattcgcatcattttgtctacctaccccagattcttgccttataagatagaactgtatgtttgtttttctgtgtagtgggttgaccacacaggtgcagcctcacagaagaaggctttccgttcttcaggatttggactagagttcaactcatttcagcaccagttgcgaatccaggatcaagaatttcaggaaggctttgatggtggctggtgcctctctgtacatcagccctgggcttctctgcttgtcagagggattaaaaggtaagaataaaaatgaatctgggcagtggaagatcttagagtgacataaatttaatttagaaatatgaattggaattagttttcctcaatctagtgatgatttataatactcttcaataaatagaactttgaacaacatattcatgttactgacttggtagcagtatattttaaaattaatttcaaaacatttaaattgacaaatatagtagtagtttttgtactgaatagcttaaacaaactgagcataaaaaggctaagaaagtcataacaaagatagaagactaattttttcatctttggaaggaaatctattgaaaaatcttctcttggctttgctttggaatatactactaagcaaccttaataatttgatcctatttgaaacatagttttgatgcctatttacttattaagataccagcataactgattttattttcctgtccatatatctaactattaatctggctaataatattgagaaactattttattacaaaatgcttttctacaaaagtaggggaaattgagataagtagaggtattatacagctgagttacacctgttactgataataatatttaatagcttactattccgtggtgtcttgtgtttttttcttttcttttcttttctttttttttaaagaccgagtcttgctctgtcaccaggctggagtgcagtggcgtggtctcggctcactgcaacctccgcctcccaggttcacgccattctcctgcctcagcctcccaggtagctgggactacaggcgcccgccaccacacctggttaattttttgtatttttagtagagacggggtttcaccttgttagccaggctggtctcgatctcctgacctcgtgatccgcccgcctcggcctcccaaagtgctgggattacagacgtgaaccaccgcgcctggtgtgtttgtttcttaattcagtttttaaaaatagtgtttttcttggcttttattatccatgtaaatggaaaactgtaaagcacagaaaagtagctagaaaaagaaagattacctataatcccacaccaagaaaccgctgttattagcattttggagtgtttctatctttcttttttttgagacagagtcttgctctgtcacccaggctagagtgcagtggcctgatctcggctcactgcaacctctgcctcccaggttcaagcaattctacagcctcagcctcccgagtagctgggatcacaggcgcccgccaccacacctggttaatttttgtatttttagtagagatgaggtttcaccatgttggccaggctggtcttgaactcctaacatcgtgattcgcccaccttggcctcccaaactgctgggattataggtgtgagccactgtgcctggcttctttctttctttttttttttttttgagacgaagttttgctcttgtttcccaggctggagtgcaatggtgcgttatcagctcactgcaacctccacctcccgggttcaagccattctcctgcctcagcctcctgagtagctgggttcacacgcatgtgccaccacgcctggctatttttgtatttttagtagagacgaggtttctccatgttggtcaggctggtctcaaactcccgaactcaggtgatctgaccacctcagcctcccaaagtgctgggattacaggtgtgagccaatgcgcccggctgtttctatttttcttgtgtaaattgttaaatggtgagagcatgatatatatgtttgtgtttttcttctttcacttatcattacaacatatgtcttttgcttcttatttcttttttttttttgaaatgaagtcttgctctgtcgccctagctggagtgcagtggcgtgatctcagctcactgcaagctccgcctcccaggttcacacctttctcctgcctcagcctcctgagtagctgggactacgggcgcccgccaccatgcccagctaatttgtgtatgtgtgtgtgtttttactagagatggtgtttcaccgtgttagtcaggatggtctcgatctcctgatcttgtgatctgcccgcctcggcctctcaaagtgctgggattataggcgtgagccaccgtgccaggccatttcttatttttttctattagaattttatatgcctggcaatgtcccaactcataacagtaaaaataccttatatttaaatagaattttagttttcaaggcagtagctctatgaaatacacgcatgtgctgcataacgacttttcaatcagcaatggaacacatgtacaacagtggtcccataagattagaataccggccggtcacggtggctcatgcctgtaatcccagcactttaggaggccgaggtgggcggatcacaaggtcatggtgaaaccctgtttctactaaaaatataaaaattagccaggcgtggtggtgtgtgcctgtaatcccagctactcaagaggctgaggcaggagaatttcttgaacccgggaggtggaggttgcagtgagccaagattgcatcattgcactccagcctgggcgacagagtgagactccatctgaaaaaaaaaaaattataatactatatttttacgctaccttttattttctttctttctttcattttttttttttaagacaggatctcgctctgttgcccaggctggagtgcagtggcatgatctcggcttgctgcaacctccaccttccaggttaaagcattctccagcctcagcctctcgagtagctgggattacagacatgcaccaccatgcccggctaatttttgtatttttagaagagatgaggttttgccctgttggccaggctggtctcaaactcctgacctcaagtgatccacccgcctccacttcccaaagtgctgggattacagacatgagccaccatgctcagcctttactgtaccttttctatgtctagatgtatttacatacgcaaatagttaaccactgtgctccagctgcctacagtattctgtacagtaacatgctgtaccagcttgtaacttaagaataagaggctgccgggcacggtggctcacgcctataatcccagcactttgggaggtcaaggtgggtagatcacctgagttcaggagttcaagaccatcctagccaacatggcgaaaccccatctctactaaaaataacaaaaattagcggagcatggtggtgcatgcctataattctagctactcgggaggctgaggcaggataattgcttgaacccaggagacagaggctggagtgagccgagattgcctgggtgatagagtgagactcagtctcaaaaaaaaaaaaaagagcaagaggctataccatagcctaggtgtgtagtaggttatactatctaggtttgtgtaagttcagccaatgaaattgcctaaagacacatttctcaggacatatccccattgttaagcaagatgtgactgtagattaggccagtattattatagtctttgacaaatgaggatactgaagcaggcaaaggtaaaatggattgccctgaaatatgaagctaggtgatgacagagatggaactagacttctggttttcagagtgctctttcccctctactgttcaggcttcagacgtttctctactttacttaaaagcaaatgattatcagcatttaggcataatcatttctactttggtagtttcactattagctgccatttctctattgtgttaaggtgcactacaccttttctcccctcttgaaggtcaggtttccttgctttggctcctaattgtttcatagttcatgtctgtaaacgccattagaacaagtgcatgggaatccgcttctgctccaggatgatcaaaaccttagatgtctgttcttctcattgagttttctgcaatttaggtgtcttgcttttccaaagtagaaaactaaacaacttgccttctgctaagggaatcagagtgtttacatttctctcatcctatttggatctgttattcaaattttctcacagaagcgaaagaatgagcagcatctagtacacagtcactttattttaatcccacagaaataaagtaggtggttttgccacatttgtgggaccattttcccagtaattcttcaggttatttggcctagagggaagatatacattggttcattccccatatcgtgcacctactgtgtgcctggcactcttccaatttatctatattgggaaaccaaggatatgaaaaattcatgaccccattttccattataagaatgggataagagggatatattatcaaggtactttatttaatttggtgggaggggaaagagaaacatctttttgtaatccttggaaagtagcaattaaattctcctgaatacattctgttattctctttagaggttttttcaaactagtccacaagttgtttaataatcctcaaagaaaaccccaaatacaatttaaaaatgcaaatggagccgggcatggtggctcatgcctgtaatcccagcactttgggaggccgaggtgggcagatcacaaggtcaagagatcgagaccatcctaacatggtgaaaccccatctctactaaaaatacagaaattagctgggtgtggtggcacgtgcgtgtagtcccagctactcaagaggctgaggcaggagaatcgcttgaacccaggaggcggaggttgcagtgagccgaggtcgcgccactgctctccagtctggcaacagagcgagactccgtctcaaaaaaaaaaaaaaaaaaaaaaaaaagcaaatgggtgtggttctaattgaagagtaaagataagcgtttttatttacttaaattattttaaataaataaaaagtaacattcttgggagttgtgtgtagatgaggatttttctgtcaggttggagaacaaatcaactaatcttctagggaaaggttagcctttgactcaagggcaaggatttccatatctctaatatgatttatatgccttgaaaatataggatttgtattggagaagcaccaagactggtcagggttccaaatctgagttgtagggatcaggtgaaaagcagtcaagagttgagagagatgacttgtcgctattctgatggaggagaaattagtggacagagttcatcctcaagtgaaaagtattgtgagagaaaagtgtttttgacaaaagatactgctcttgagaaggcatcatctatagacctcttggttcaactggataatttgctataggatttgttatatattatgggatattccaggaaactagaatttatatccttcccactaaatttctatttgtttaagggtggagggcagatcctggtacaccccccacagaggacgactttggatagcagccacagctaaaaaaccctcccctcaagaagtctcagaactccaggctacatatcgtcttcttcgtgggaaaggtaacagccgcatattctcctttcaattttactttatggagagaagtcattgacgttcatcttctttcacttccttctttctttggctttttctttgttaaaagagacttttaatctttgtatatgtttgtttgtttagtggtaaatcattgacagcgttcaaagcattaatctg

SEQ ID NO: 15865 - DNA, 50310 bp, Homo sapiens
attcaggaagcgcggatctcccggccgccggcgcccagccgtcccggaggtaagtggggcccgggcccgggaggggcggctcagccgaggtcccctcgcgcccctggggacatctccgtggcccgtccggctccggggggtcccgaggctccaaaatgcgggccaggggcgcgggagacggaaggcaccaggttccgcaggcgccagcctctcagctaagtgcccttgggccggacaccggctctttgggtctcggttttatcacctgtgaaatgggcaccaacgtggggcctggggtagcaggtctggggggagggcggttcggttccctgagaccccaagccagggaaccaaaggcccggagccttgcagcccaccttaggagacttggaagagggatttcgggggacctaaggtttgcccttggcccctgagcatgtcggagggaatttggagtctggagcttccaaaggcttcttcttggttactgagtcccggagagacggctgtttcctccaagaggcatgaaaatctttaacctctagttctgccctggactctcaggacgtcccgggggcgggtggctcctgggggtgggtagcgggggtgggggtgggggagagagagactcccacactccccgcttgcctggaaacaccaaccacagatgcattcatcgagccacccactgctccagcctgccccagctgttccctctgtctgtcctctctgttttgcagatggggaaactgaggcttaggtcggggatctagacaattgggatttaaacccagggactatccagccccaaagcccttcccaccacaccaggtggcctgtcctggggccagctctgcacacagggcctggtgcccccggggtgcttgggaagtggcagggcagaggtgggccctgtggctgttctggctcagcttctaaaacaagagcctctgctgggggcagaggggccgtgaacccctgaaatgttaggcagataccctgtgggagctttgttctgggatgctaagaaccgcttgaggatttaagctttgccactttggctccggagcaagggcagagggtaagtcgggactccccgggctcctgaggagggtgacgaggtgggcttttgggggaacaagggtagaaaggtcaggcctgggttatctgcggggctaagagcgggcctgtgtggggcccggggtgtgctctgcagtcccctgctgtgtgaccttggcctggtcccttagctgtctgagcctttgtgttctctcctctgtaatactggggtgcctgagggcaagcccccagggctgtcgtgaggaccgatgaccttccaggaacctggcacagccactgttggctgccatcaatgtttaaccagttgtcgttgccccaaacattttcttaacaaagagggtgaaaaaagtcaattggccatttccacatttctctagttcattctgtttgaagaatgatgggaaccagaaagcctggacacccaccttgattggtgaattgcacgcggaaggggtcccagacacaaatggcaaatggcagtcatagttcagggcggttcactttgtaagatcaaggtggggctgttttgaaatggaggtaaccagggaatggttgcctgaacaaaaagggtgtgatgcccccaggagggatgtttcacatgagctccggtgaggatggctgggattccccaggtgaaacccagataccttatatctggggaaggggctgtggaggttcctcctgccttatctggtgccaactgggcctctgccacttactccctcctccagcaaatgctctctgcaagctcacctgtgccagctctgggctgggcactggagcagtgagatgcttccaatcccagcttcgctgtagcctgaggcgtgtgaaggcaagaaggattttcccttgtggccccccggggaggagctcccacacctgacttgtgagcatctagcaaggtgtgcatggatggccgacgcttagtaaatgtatgctgtggaatggatggggtcaggggagaatgccgtagggtaggaggactggcccaggaaggacccacgagggcttggtcaaggtagtgtttaagccgcaccttaaagaataaatgcagaagtagaggaaagagtattcaggcaaagagaatggcactagcagagatatgacttttacctgttaccaggtggctacacctggggtttatagagcagagaaatagttctgtttgtctggagtttgtgacgtgactggaaagggtgagggatcagacaggcaggagctaaatcagacccagaggcccagaagtcctgcctgggagtgacacggttgtttgtctgttctagaaaggtccctgtggctgcagagtgggaaagattggaggagctcagacagagaggctggccccaaggctggggaagtcatccaagctctgagtggagagcggcagctggaaggagatgtaggagggaaggaaacacacaagactgagcctcatgtgcctggcacatagtaggtgctcagtcagtatctatggcatggttgtctgaacaaatacttttgagatggtcaaagtcctttgagttccttcctctgttcctagggggatggggtctacatgaagtgggtgtctctactccatgcaggcccttgaccctgctgtctgcctcagtttcccccatttgactttgggaaagacactccagtccgttctccaaattatagggacccaggtaacagctcctcttgttgtcacagatagggtctggggagccaagataacatttatttcatgccagtgggccctctggaatgctccacatcgcccatttggagcagaattcacctgttaaagattaattccgatctcttgagataagtggctgctgttatgaactctgggtacaaggttctgtctggctttagccaaccctgggttgcattaacaactattatgatggtggcaagcctttattgagcacttactgtgtgccaagcactgagtcaagcaccctcagcacatttggatacaaaactatttttgtctctatttttcagagggcagaatgaggtctagagggtgaaatctcttgcctgggttctctcagctgagaaggggcagagctgggacctgaatcccatttgtgtgattgcaaatccatcccttcacctgtaaggtggcccgtccccatttgtctggaccctcattggggtgcctggggtcatgggggagctactctgcagtccagagataggaacctgagttggccgggtgcagtggcccacacctgtaatcccaacactctgggaggccaaggcaggtggatcggtcgagcccgtgagtttgagaccagcctgggcaacatggtgaaactctgtctctagaaaaaatacaaaaattagccgaacgtggtagcacgcacctgtagtgccagctacttgagaggctgaggtgggaggatcgcttaagcccaggagtgagaggttgcagtgaactgcgattgtgccactgcagtccagagcaagagatcctgtctcaaaacaaacaaagagcctgaactgcagacaggcctgggcttaaactgcatccgcatgtttaagacaggcctgctattccccgctggaggagctcagggaagccacctggcctctctgggcttccatttcctcctgtgtcaaagggactctcatcccactttgcagggatgacccaaggcacgtggatggggctctgaagcacagctcttctgcctcagcccgtgtcagctccccttgtccccaggcccattccagggcatgttttcttccagcttatcccccagacatcctcagagagcccctccatgccaggtgggtgggtggaaggtattgggggcaaagctagacttgcatttgggcaaataatgatatgttttcagcaatgaaatatttatgagcattgactgagtgccaggagctgtcaactttttttactttcctgatttaatgcttaaaaactagggctggagcccagctgcccaggttcaaatcccagcttccaataagttccattattcctttggcctcagtttcctcatctggacaatggggataaggtaatgcctgccttgctgggaggttgtggacagtcttcagcacaaccttgagtgtttagtttaaaaccagcatctattgcctgttgttcacttttttttttatttattatttttagagacagggtctcagtctgttgctcaggctggaatgcagtggtgtgatcatagctcacagcagcctcgaactcctgggctcaagagatcctcctacttcagcctcccaagtagttgggacacacccagcttattaaaaaaaaaggtttttttcagacaggggtctcactatgttgcccaggttggtctggaattccagagctcaagtaaccctcctgccttggcctcccaaagtgctcagattacaggtgtgagggctgatgttcattttgatggtgtcacagcttccccactgccgggggtgggcaggggcaggaatgctgagccccattttacagctgaggaaatcgagactcagagaggaagcaatttacccagggatgcccagctggctcatggcagagctggagctggaagccagatctgagtgacactggtgtccttgggtccacgaaaagcccagtggccagcttagcttcttgcgtggaaagctacgctaggctcacccaccttggcgtctgagccaccttagcttacctcccagctccgccagttgctgctctgtgacctcagaaagtggcttaagctctctgttcctgggctttgctgaggtcagagctctgccaacttgaggagggatttgggttattctggctgctgctcttgttctggcctgggctccttcaacctcgggtgcccttgcagcccatgagctggcaccccagtggccggacaggaatgaggaagggacagggcctcactttcaatgtgactctgacttccttcccacccctagccccttcctgagcattggtttcccctttctgccccgagccctggccactgccggctgtgtgaccccaaggaggttacatcacttctctgagcatgtttcctcatcggtgagggaggatcacacgagaccacaccaggcgcacaggaagcccttgccggtctccagatgaggtcagggcattggaaaggccacagaaggaggcgggggctcaggggacagacaggcgggccattgaccaaacgggaatatccttctatttctttggttagtgagtaacagcagcccctcttgtccacccaccctgccccttgcacaaagagctcctcagtctcaccaggcgcccgttttcccctgagggtggagtggcctgggttccacccggttgaccgagtgggctggccaccttctgggaccattccctgtgtgtgtgtttgtgtacgtgtgtatgtgtgtgtatattgatgtgcgtgtgtatgtgcgtatgtgtgtctgtgtgtgtatgtgtatgtgtgtatatgtatgtctatatgtgtatgtgtatatgtgtatatatgtgtatgtgtgtatatgtatgactatatgtttatgtgtatgtttgtgtatatatgtgtgtatgtgtgtatatgtatgtctgtgtgtatgtgtgtgcatatgtgtatgtatatacatgtgtatgtgtgtatgtgaatgtctatgtgtgcatgtgtgtatgtgtgtgtatgtttgcgtgtatatgtatgtatgtgtgtatattgtgtgtatgtatgtgtatatgtgtgtaatgtgtatatgtatttgtgtgtagtgtgtgtgtgtgtgtgtgtttatggagggtgggttccatgggctttgggctgagaccccagcaggtgagggtgggacagggggcatggggttgactgacccatgggtctggctcactcctgtccctgcttggcacacaggaggggctcaggaatacctgtagatagagtgaagggatgaatgaaggaaggaatgagtgactggacaagccagccaggcagggcatcagaaggaagcacctgctcagatacaggctctggctctgagaccaagtgtgcttgagtgagtgtcctggtcttgttgagcctcaatttcttcatctataaaatgggctcacgatagttgtcctcatgagaggtgttggtcttataggccagaaaaccccacacatagcaggtgctccgtaagctgtctgttaaaaaatggatgggaggaagctaattagttagctgggcagaggttcgctttggagacctgtctgccctggagagaatgactaagcccgtctttcactcctttcctctgttcattcattcattcattcattcatccagcaaatacatcttgagcagctgctatgtgccaggacctgttccaggcatctgggcctcagcagttaccagaagggagtccctccgccctagagcttttgtccgagtgacatcattccacacgcagtgctttgaggccactttgtgagactctgatacccacaatgacaagtaatccagcagtgggaactgtgatgagctcccttttacaggtgaggaaactgaagctcggagaggtcaagtgatccgtctggggccacgcagttactaaatggcaaagtcaagattcagactccaagcctgtcaccactgtgccatcttgtcctgctgagttccaagggatatggcgttgagaaggggggtcctagggagagggcatggtagcccccaaagggatgaatgaactcaaatggatttaaaagcagatggttggaagtctagccacattcacttcctgtagcgttgtggactcagttaaatctcattctttctgatcttcagtttgttcatctgtgaaatgataacaataacaccgacctcaaatgagagagaaatgtgaaagtgcttagcatatgataggtattggataaatgtcagcccttacctcctttcccccgggactgactttatacatctgggaatggagacaataatatttaatgtctatagttattatttggattaaaatagatagaaggggccagccatggtggttcacgcctgtaatcacaacactttgggaggccaaggtgtgtggatcacgtgagcccgggcattggagactaacctgggcagtagagtgagactccatctctacaaaaaataaattttaaaagtaggaatggtggtacatgcctgtggtcccagcttctggggaggctgaggtgggaggattgcttgagcctgggaggtcgaggctgcagtgagctatgattgtgccactgcactccagcctgggtgacaaagccataccctgtctcaaaacaaaaaacaaccaaatgggaggtgctgtgtgaagtgtgccatggagggtaggcattactgatggtacattgcaggcattagcctcagtcataattccaagcagttaacccctgaggcagcagcttactgttggcacagactggtgttgaggtgggctgggacagaggaaggatctcaaactggttttctgctgccttgggctcccttccccgactcctgccccatccactcataacgggcacctgccctcttccccctcctctgatttggcaaactcgggacttttgctcctagaagtggggtagaggaacgtatgcatggacgagtgtcctgtcccttctggtccttagtctcccagctgggaggcagcccttgtcctgacagccttctaaaggtgacagaagatggaaatgaggtggcgaggaaaccctttccaaaggtgaggtctctgcagtcacgagccctggttttggagccgggaagtctgggttccagtgcctgcccagttctgacctccctggacctcaatgtcatcatcccccacctcccactgcaaactgagggaatgttagcaagaatggcaaagcagccattgaacatccttatctgtaaaatgggggtaataattgctacgacctgggtggggttaagctgtatttgctccatagttatttggtatacagtacattcatgctttaaactaaaaaataagttcaagttcattgaacacttggtgtttgttgggcactgcactgaaggcttgaattatcacatttaatcctcacaatagctctttggggtaggagctgttattttattttttaatattttaaaaaataaataaatttatttattttttgtagagatgggatctcaccattttgcccaggctggtctcgaactcctgggctcaagcgatcctcccaccttggcctcccaaagtgttgggattacaggtgtgagccactgcacccagccttattttttagtttaaagcatgaatgtgctatacaccaaataactatggagcaaatacggcttaaccccacccaggtcgtagtaattattactcccattttacagataaggaaaccaaggcccagagatgagatgtgacttgtgcaagaccatacagccagtgagtggcagatgagatgtaaagcattgatcaggcaacgttctcagactatagaatcctctctggagttctccgtggctgtgaccatcctctaggagaggggctaggccagagagaaggcgggcctaaggttttgttttgttgagatggagtctcgctcttgtcgcccccgctggagtgcagtggtgctatctctgctcactgcaatctctgcctcctgggttcaagagattctcatgcctcagcctcccgagtagctgggattacaggtgcatgctaccacacccggctaatttttgtatttttggtagagatggggtttcaccatgttggccagtctggtcttgaacttctgacctcaagtgatccgcccacctcggtctcccaaagtgctgggattacaggcgtgagccactgcgcccggccggactaagaatttgatgcctccctcctcctgggctggagctgagtagcatgttctcaagcagggctggctgagagggtggaatcctggggctatgctctgatgggaaggaagcgagataagggaagaaggacctggagcctcctggggtagtgactttgtatccttgagctcctactacgtgccagaccttgtttgaaaccctttatgtggctgggcacggtggccgacgcctgtaatcccagcattttgagaggccgaggcggtcggatcacctgaggtcaggagttcgagaccagcctggccaacatggtgaaaccccgtctctactaaaaatacaaaaattagctggcgcagcggtgggcacctgtaatcccagctacttgggaggctgaggcaggaggattgcttgaacctgggagacggaggttgcagtgagccaagattgtgccacttatactctagcctgggtgacagagcaagatcctgtctctctctgtcacacacacatgcgcacacacacacacacacacaagaaagaaaaaaaagaaaccctttatgtgtgcttaatctccatgacattcccatgttgcaacaaggaaactgaggttctgggagggaagtgacctgcctgaggtcactaagcctggaagggtcatttagatgtaattcacatactcataactcagtcttttaaaacgtacaattcagttggtttcttagtgtattcagagttgtacagacatcagcactatctcattccagaacattttcatcaccccaaaaaaggactctgtacccattagcagtcaccactccccactcccagcccctggcaacaactaatctgctttctgtctctgtggatttgcctgttctgggcatttcatataaatggaatcctgcaatatgtggccttttgtgtctacaaggtgcatgctcttaaccattaagccacaccgcttcttggtggctcctacccaggggccgggacccttggaaatgacttggtccctgtgaaagctcagaggggcatctgtgtgtgctgtcagccggcctccctccagccaagggcttgcagaatgaccaaatgactgccgtggccacgctggccttgccctccgtggggcgcggtgagtcaccccagacctgccctgcctgggtggtgtgagtgcatggggtgggggcccagcaggacactggggctctgtctgtcctggacaggcggccactgtgcagcaaacaggaagcgggctgggccgagacctgctaggtaaatacaggctggccagggaaggtgctgggcatggcatgatgcccccctactgctgccgcctgccaagtgcctgggagccgtggggtagcctggcaggcagtaggtttcgcctggccaaggagttgagctcccagccggctgttcccagcagccgccacttcgaggtggctgccagagtctacctccaaggctctggatctggccgctctgccttctctaggagtcattgccttccttggtcctcagtccttttgttcatctgttcccctaatgatactaataaatagtacactgatactgatgattccaacagcagccatgcttgactgaatgcatgctctgtaccaggcactgggctcagtgttttgcatgctttatctcatgtaaccctcacgacagttcccttggggtaggtgctaggatcattgccatttttcaggtgaggaaaccgaggcatgggcaggccaggtgacttgcccagagctggtgaactggtggttcgtcagggactgcgacccatcccccactccattctttctccagcttctccctcccagagttcccttgtctttgtaaagtgtccatcaaaggcgcaggtcccggggatgcatgggttctaatcctgcctccccctttctggagcaaggcaatgccagacaaatgacttcgcctctctgagcctcagttttcttacctggaaggtggggagggggtggacaggtctgggattttctctctagtaacagcaaagctcagagtccttgtcttcctagtaccttcctatccacatgtccccggcaagactgatttggaatggcaggcactcacagttgtgtttatttgagggtaccacaggaagtgggggcccccaaattggctaaggagccccagggtggagggaggtagaagcacactgggtctgtctgggagcctgagcaccttctctgtgggctccttcctacccatggattccaacccccacccacctccccactgcccacccactcacccatctcttctgctttccttctccctgtgccccaggccacaccattcctctgtgcaccctgcactttcccctctacacctttgtccttgacacctcctctgccctttatcttcctcctcctcctcctcacagcctttccccctccccatcaggattctggctgcccttgctctgcaaccctgcctggaacttcaggtccctgatcttacagcctaaaaaaaccaaatattcattgacacctcattttgcttcagcaccatgctgaatgctggggacacaggggacacgaaatagtccctaccacatggaactaaaactctggaggtgaagagagaagatgaatcaaagaataatatataggccgggtgcggtggctcacacctataatcccaacattttgggaggctgaggcaggtggatcatctgaggtcaggggttcaagaccagactgaccaacatggcaaaaccctgcctctactaaaaatacgaaaaattagccgggtgttgtggtgcatgcctgtaatcccagctactcgaggaggctgaggcacgagaattgcttgaacccaggaggcggaggttgcagtgagctgagatcatgccactgcactccaacctgggggacagagcgagactctcttgaaaaaaaaaatacatatatagaaaagtttaatcgtgggaagtgctgtaaaggaaggcacatgttactctaagagtaaagagcaggggaaacaggagggcttttcagaggaagtgccctttaacatgaggcctgaggagtaagtgggagccagccagcgaagggaagggcattccaggcggagggaacagcctaggcaaaggcctggaggcagagagagccatcagccttccctcctggactgcgagttctctgaggttccacacttttatgtctcccctgtgccctgcaaacaggtgccactgcattgatgcctggtggaatgaattgattccagaagggagggaaccgggagaaaccagctccctggattcctccccgctggggcggagcaggtttgcatgcccaaacttgcccccagatttaagcagctttccttggtcacgtaatcaggaggatgggatttgacaaatgtttgccagggtttccatgagatcaggcaaagccgcgggtaaccccgaggatgggcccctttttccaccctccgcaagttggggcatggggacggagccagagacctccaccgcctttgaatccgggattctcagagagaagccatctgttgtgcaatctgctgtttattgaggctttctttatgccaggcacttgactcaaggtatatacctctcacaacgaccctattacgatcccttaatagggcagctgagggccgggcgtagtggctcacgcctataatcccagcactttgggaggctgaggcaggcggatcacgaggtcaggagatcgagaccatcctggctaacaccatgaaaccccgtctgtactaaaaaaatacaaaaaattagccgggcgtggtggcgggtgcctgtagtcccagctactcaggaggctgagcagaagaatggcgtgaacccgggaggcggagcttgcagtgagtggagatgcgccactgcactccagcctaggcgacagagggagactccgtctcaaaaaaaaaaaaaaaaaaaaaaaaatagggcagctgaagaaagtgaagatcagagaggttgggtaacttgctcatactcacccagcaagtgagctgtgggtctgggatctgaccctctggtctgcctgacgtcaaaatgtgccccaccggctcagggggccatgagagcagaaagccaggtttctggaaagcctggggtctctgtctagggcagaaaggaaggtctggggaccctggctcagccctgtatctcatcaccctactcaggactcctgcaccccttaacttgcccactcctgagcccttctggtctatgcagttcttaacaccatccgacatgactctgctgcttgatttgtctagtttattgtttccccaccagaaggtctgcccccaaagggattgatatctgttctgttcacatctgtgtccctagtctagcacagtgcctggcacatagtaggtgctcaataaatgtgtggaataaataggtagctggcttctactgctgccccttgggccctttccagaggaagatgcagattctttgtccatcctacacaactgccatctctgtgtggaccaccattcagtatatatattctaaagaagagtttgaatataaacctgcttttgaatatataggatttaaaaccaacatattcaaaaaccgctactttggctgggcgcagtggctcatgcctgtaattccagcactttgggaggccgaggcgggtagatcatttgaggtcaggagttcaagaccagcctggccaacatgtgaaaccccgtctgtactaaaaatacaaaaattagctgagtggtagtggcatgtttctgtaatcccagctacttgggaggctgaggcaggagaattgcttgagcctgggaggaggaggttgcagtgagctgagattgtgccactgcactgcagtctgggtgagagagtgagaccctgtctcaacaaacaaacacccgctgctctgaatgaacgctgttgtgaagatgtcagtgtgtgaggatgttcacagtcgtgcaggaacgttcttgggtgcctccctgatgcacacctggtgcagctgggagcttccccactgtggaggggctcctggtaggaggcattgtgagcccgtgcgggaacgaagggcccaccatgcctgctcacagtgggcacacacacatgcacacgcccatggaggaaggtgggaagaaatgtacatgacagtcacacgcagaggagacacatgtggactcacacccaggctctcagcctctctccctgcctgcatccccgacttccctccctcctaaaactggcatgagtttggaatgtgtaataacagcctttagggcaaattagaacagggagtaaactctttctctgaccacagagaacaggacagtgtttggggagggaattgccacagagcagcagagccgggtgtgtgtgtgtgtgtgtacacatgcctatgtgtatgtgtacacgtgagctagtgtgtacacactcctgagtgctgtgatgtggaaggagcccagggctaggagtctagaggttttcttcaaagccatttgctccctagctggcctctcagagcctccgtttccttagctgtaaagtgggagcaatagcctagctttgttcaggttcttcgggggattgaatgagagaggggcttggtggattttagcatgggctataaaatgtcaggctgtagtgctggcacgtgtgtgcatgtgtgttttggggaaggggagtaaggaggacaggtaaatcaggaccatatcatagtggtgatgatgataattaaatgtgacaagatccaacatttatcaaatatttcttaggtgcccaagaaacacttgacctgccttatctcccagaagccctacaagggaggtgctattattgcaatccccattttacaagtagagaaaccgaggctcagagagatgagaatgggcggcagtaatcatcccttcctcctgggggtggttgtgaagcttgaaggagacactgtaagcgctcgggtggtaccctggtactccatcactaacctgctgtgtgacctcaggtaagtcgcttagcctctctgagcctcagtttcctcatctgtaaaatgggaatgattgcaatacctacctccagggcagattttctcaacctcagcgctgttgatgttgttgactgggttattctgtgtggtgcggggctgtcttttgttttggaggatgtttactaccatccggcatggcggatcccagcaaaggcccctgtgcaggcctggtgaggtggccgagcttcctggtggggaggccttccccctctcctccctggtcaatctatttgagggtgaggatggctccccttcaccctcacctggcacccaggacatccccagtccatggagggattcaatctgggctctgcagccagctgcccgcatttcagtcctggctctgtcactaacctgctgtgtgacctcaggcaagtcacttagcctctctgagcctcagtttcctcatctgtagaatgggaacgatcgcagtacctacttccagggcagatgttctcagtctcgacgctattgacattgtgggctgggtcatttttttgtggtgtggggctgtcttttgctttggaggatgtttagtgccatccctggccttgatctaccagatgccagtagtgctccctctcctgtacagttgtgacaacaaaacatgtcatcagatattgccaaatgtccttagaggaggagcagaactgtccttggttgagaaccactggtctggagtcatgatgagggctggatgaggccctgtgctgggcacagcctgagctacgtcatcaggcgaggatggtgatttagttcataattattatttcatcctaattagaatgctaatcatgatcgcggcgtgacttgccgaaggccacacagcagccatacaggttgacagttgctgggagaggatttgaacctgggattggctggcaccagagcccccattttggagtccccaggaacctggggtgctgtccaggcttaggggagggctatcctcctgaggggaggagggtgcaggcatggtgggggatggaaggaccttcttggctgccttctctggccttgggagctccctgggatggggttccattagcccctgaggtgccatggtgaggggtgcagtggatagaagggtactggaaacacagagggtgcgcctgatgcctcgtctccccctgacctcagggcccccagtgaggtggacagggccatgcccaggagagtctaatccacctcccgccaatgcctgtgcccctgcagatgcccctcctgcctcagcaaccccctggcccccattcctgcagagcaaagcccaaatgcatgtggcagccatgagggactagggatccagatccccctctcctgtctggccagtcgaaaggacttcgtgtctccagaggtcctactaggtgctggaactgagtaggtgcctcacatgctggaggaccctaggaggaggcgtggtcactccagtcttacaggtgggaaaaccacggggcagacagaggaagtgatttgcccatggtcaaacggctaatgaccagggccaagagaggaactgggtctcatttcagaacctggcctcctaacttctctttcttcgtttggttataataactgaaagtcccactctatttacagatgaggaaactgaggctcagagaggctaagcaacttacctgaggtatttatttttagatagagtcttgctctgttgccctggctggagtgcagtggcgccatcttggctcactgcaacctctgcctcctgggttcaagtgattctcctgcctcagcctcctaagtagctgggactacagtcacgtgccaccacgcctggctaatttttgtattttttatagagacggggttttgccatgttagccaggctggtctcgaactcctgacttcaagtgatccacccgcctcggcctcccaaagtgctggggttacaggcgtgagctgctgcactgagccaaaaccccactttaatcccagaagtggcactggatatatctgacctcacttcccactgcctgcaaccctatgaagaagtgactacaattgtacccattttgcagaggaggaaactgaggcttggggagctcaagtaacttacctaagatcacactacatgtaaatagcagagctgggattagaacccaggcctgaatgactccaaaggccaggctgtctctcccttttggtgtccaaagggaagcccacccccagtgggagctctgaccctctgtgtcctgctgcgcccactaagggaggcctcttgctgtgtccccacctctctggtccaagtcttccctcctggaagccacagaacaaacaaggtgggaactagtttatttgtttttctacgtgcgtattgggtgggaagggtgagatgtacaagagagggcttttcagacatgcccctgcctcccgggtggggtggtaagagttccaggaaactcacccttggtgcccagccctgcctggctggcaccatgctacagagagcagggcactgacagccaaccagtggggccttgcccctcccttgccctggctcctggctaagcactggacccgggagccagagagacatggttcaagtccagctcttcttcctgcaagctgtttgctgcctttgaaagctgcttcctcatctgagaaatgggaacaaatgacatctttgtcataaagtttttcatttgtgtgaggactcagggatggacaagacagatacatttcctgcctcctggcacccacagcctgggaacgaaccatcccgtgaacagctgggataaagcttctgaggagaggagcatggatcctgggagcgagtgtgtgcaggccagggagggctttccagaggagcccagttgagctggaacaccagtggggaggagttgaccagcaaaggtgcagggagggatcagcactttgcactggggagcagagtttgtgcactggggaagtcaactcaagtattggagcctcagtttcctgttctgtaaaatgggttcatcatgacagtgtttgatgaggaaaaggactgccggcctacacagcaagtccacatggattttctgagcccctcctgtgcctgaagcccacggttaatggttctgccttagcaggtgcttaccacgtgccaggcactgcactgcactggccactggactgcatgttctgtccatgaggcttggatatccccatcttacagatcaggaagctgaggctatgaaatgtcgacttgctcaatgtcatggaatgactaagtgtggagcctggatttgaacttggctctctggggctccaaagctggctttcttggtcagcagtagggtctgggatccaagtatggggtcccagcttgaccctgaagtccaccctctttcagctaatgcccagggtagttggacctggggccaatttgtgtttccaggttcgtgaaagaggctcctgttgcagttcccgcctgaggctggcggccaaccacatctgggagtggcctccctgtgcccctgtcattacaacggtggctttgaagcagctggcagcactgctgcttgtccacgtgggagggggcttcctggagcccccgcccctggccgggttctgcctgactcccctttcattcccttgcaggctgagcagtgcagacgggcctggggcaggcatggcggattccagcgaaggcccccgcgcggggcccggggaggtggctgagctccccggggatgagagtggcaccccaggtggggaggcttttcctctctcctccctggccaatctgtttgagggggaggatggctccctttcgccctcaccggctgatgccagtcgccctgctggcccaggcgatgggcgaccaaatctgcgcatgaagttccagggcgccttccgcaagggggtgcccaaccccatcgatctgctggagtccaccctatatgagtcctcggtggtgcctgggcccaagaaagcacccatggactcactgtttgactacggcacctatcgtcaccactccagtgacaacaagaggtggaggaagaagatcatagagtgagtattgttagcttcctggcctgtggtctcctcctctgtatccattcacccattcatcatccacccctctatctattatccacccatccgtcgattcatccatccatccatctgtccatccaaccatccatacatctatccatccatctattcatctccctatccatatatcatccgtccatccatccatccaaccacccatctattcgtccatccatccaaccatccacacatctatccatcaatccattcatctctccatctctatatcctccatccatccatccaaccatccatacatctatccatcgatccattcatctctccatccatatatcatccatccatatatcatccatccatacatccatccatcatccagccatctatcatctatccatctatccaaccatccatcatccatcatccatccattcatctattcatttatacatcatccttccatctgtccatctattcatctatccatcattattccatctgtccatctatctactatccatccatctatccatctacccatcatccatccatccattcatccatcatccttccatctgtccatctactcgtctattcatcattccatatgtccatctatccattaatctatccatccatccatatatcatctatctatccacccatcatccatccatccatctacccatctatccatcatccatccatctattcatcatccatctatctattaatccatcatccattactctacccatttacccctctgtccacccttccataggacatttgtctgttcatccattcatccatccacccactcatttatacaatgcatccatccacccactcatttatacaaatgcaaatgcatttatacaaatgcaaactcagccatttacccatttacccattcacccttccacccactcatttatacaactatttactcatctaactctccattcattcatctgctttttttttctttttgagatggagtcttgctctgttgcccaggctggagtgcaatggcatgatctcggctcactgaaacctccacctcctgggttcaagcaattctccagtctcagcctcccgagtagcgggattacaggcacccgccaccacacccagctaattttttttgtatttttagtagagacaggttttcaccatcttggccaggctggtcttgaactcctgacctcgtgatccacctgccttggcctcccaaagtgctgggattataggtgtgagccaccgcatcccgcctcatctttttttattcacctacatatccacgtactcatctgtcccccattaatctacttgtctgtccatctcttcacctacacatccagccttccatttgtttatcttcttatttatacatctgttcatccatccatccatccatccatttatccatctatcatctactcattcatttacccatctttacacttttttgtccacctatccaatctatagatccattgtccactcattaaaatatctatctactcatctacccatctgtcagccatctgtccagccatacacccatataaccaaccttccattcatctaccattttctcatctgaatgtcatttcatcttctcacctacccactgtttctagtcatctagccattcagctatcaaactattcatcattcattcatttattcattcattcattccatttctcatgcttgattgctcacctgcctgctgtccttctttccttcctctccttctctcttctaaccaccaattcattcacccagatctctgtccatccatttgtccattcactcttttgtttgcttagtcactgactcatttattcatttgctcatcttttcttccatttttgcatctattcatccatccatctccctaccttctcttcctggcacacatccagctgcccctcctgggtcttcttcaatcatcacctccattcctggccatccagtggctttcctgaggcttagaaagagctggaaaccccaaggcattcaaccttctttcccataatgacagccttgctgaaagaaaagacagactggagagaagccctggatggggccacagcatgtggcccctatgacgcattccatgccaggcctagctggggacagggagcctccagcccccttgaccaccttgtctggtccccatcctcccccagtgtgttatgctggcatctgcatgtggtttgtgtggcactctgcaaactcagacatcccgggttctgtttccagcatgactctattgtctgtcacctgcagactccctgctttgtgaggttgagccctccctcctggtcctttaggaagcccagggacttccacaagcttttggcagtttggaggagggagcagggcttgcagtctcctagccagctcctcctgagcctcagcaggccctgctgaactgtatcctttctatgtcccggccctgctgtccctaatgtgccctgaattgaccctttcctcaactgctccatgaaatctcctctcggtggcctgtgtgtgtgtcctggaggatggtgctgaggtctggagatgacctggacttgcgtgtcctcctctgtccccctgctggccacagattcatttatctcttggatggagccgattcaccttcacagcccttgcttggtcaagagccgccccctttatttattcacagtcattgattcattcagatgtctctttttcttttttttttttttgagacaggttctttctctgccactcaggctggagtgcagtggcgctatcttggcttactgcaacctccacctcccaggttcaagcaattctccagcctcagcctcctgggtagctggagctacaggtgtgcacgaccacaaccggctaatttttgtatttttagtagagacagggttttaccatgttggccaggctagtctcgaactactgtcctcaagtgacctgcccacctcggcctcccaaaatgctgggattacaggcgtgagccaccgcacccagccagtggatgtttcttgggtgcccactgtctgccagtcagtggggttggccctgaggcttcaggctgagccagaccagatccacttctactcaggcggcactttccgtttagagggtgagacagacaagaagcaagtagctgagcacatggatgtgccatgtgagttgggggaggtgctgaagttagagagtgggtggatacaagaaaggtaatccaggagggcttcttggaggagttgacatttaagcccaaagctaaaggtcatgaaggggcagtcacagagagggagggaagggtgttgtaggtggagagaagtgtgagtgcaagggcctaaggctggagaggctctgcagatgtcgccaaggaatagggcctcacagttgtctgtgctgaaaaatctgtacaacctctgctcagaggtggaaactaagggccagagcagcagagtgcccagtgttcccatccttctgtccccaagccttcccaggtcctgttgaaagctggtgggctctgtatctcccattcccctcccgcaagccctcctccccacccctaccccaggaagtccaggctggtggagtaagtggggcacggctgagccctgaaggctgcctcagtgagatctggtgggggcagtattgctttttattttttggctcaaaggtcaaagttcaggaagaggtaaagtgggggctgcctaagtgccctcattagaggctgtatctgtgcctgtgcccctgtcaacaggagagcacgtcttaccctactgtggatgctaatgatcccctttgccagtacctgccctgagatggaaaatctcaacccctggcgaagaggaagggaggagagtggctgtccccttctcatggcaagacaggctgggtacagccagatgccagctttgtccacccttgcaaccccgtcccacctgcttccacaacctgccctggcctcagtttccccaactgcattccccttcccctctggccctgctgcctcttgttagggttttctctgttcccctactctcccctcttctccctcccagaccctgtgcctccatcttcctccttctctttagtctcttattcattgaacagagtcttactgcatcccaagatgtgccaggcactgggccaggtaagaatgtgacagagagagcattcctgcctcatggtggccctgggctagctctttctctctcagaacctagcacataataggtgccgaaataatgtttgttgaatgactgaatgagtgtctccaagccctccagctcttagtgtctgtttccttcctttctctctctatctcttctcttcccagccctctctgtgccacacccttccgccatctgcctctgtagccccacatctctcccatgcacatacaagctccagacacacagtaggcactcattaataatggtaatatcaactaacatttattgaatgtttaccgtgtggtgggccatgggcaggtacatatgagcatggcctcatttgtctcaaatgtttgttgaatgaataaattaatgggttagttatggaatgaatggatgaaatgcctcatcttttagtctgctgtttctttattttatctttgtttttgtctctttcagtttctctgccttagtaagtactcaataaatgactaatatatgagtgggtgggtgagtggatgggcagttggatggatggatggatggatggatggatggatgggtgggtgggtggataggcagatggatggatagacgagtgatggatggatggatggatggatgggtgagtggatggatgggcagatgggtggatggatgagtgggtggatggatggatgagtagtggatggatgggtggacagatggaggagtgagtggatgggtagatgaatggatgagtgatggatggatggatggatggatgagtgggtggatggatggatggatcagtgagggatggatggatggatgagtgatggatggatgaatgggtggatggatgatgggtgggtaggtggatgggtggatgctgggtgggtggatgtatggatgagggatggatggatggatgggcgggtaggtggatggatggatgggcgggtagttagatgggtggatgaatggatggatgggtgggtggatgggtagatggatggatgagtgatggacggatggataagtggatggatgggtggatggatggatgagtgatggatggatgagtgatgaatggatggatgggtgggtaggtggatgggtgaatggtgggtgggtggatggatggatggatgagtgggcagatggatggatgagtgatggatggatggatggatgggtgggtggatgggtagatggatggatggatgagtgatggatggatggatgggtgagtggatgggtagatggatggatggatggatgaatgatggatggatgggtggatagatggaggagtgggtggatgggtagatggatggatgagtgatggttggatggatagatgggtggatgggtagatggatggatggatggatgagtgatggatggatgggtggatagatggatgagtgggtggataggtagatggatagatgagtgatggatggatggatggatagatggatgggtcggtgagtggatgtgtggatggatgggtggatagatgtatgggcagtctgtgcatttctttctgtttgtctccacccaacacacagtaggtactagctatagtttgttggataaaacattacttagtttttacatctgccccaactacctcaccctgttccttgtaaggcttcagctgcctgcccgccaccacagtctctgggtccctaaggccagggacagtggggcaggcaggggatgagccctcccatcaacttgcctccctacctcctccaggaagcagccgcagagccccaaagcccctgcccctcagccgccccccatcctcaaagtcttcaaccggcctatcctctttgacatcgtgtcccggggctccactgctgacctggacgggctgctcccattcttgctgacccacaagaaacgcctaactgatgaggagtttcgaggtgagccacccagatgggcatagccagtgggacagccaggggtgtgggggaagcctggcattgggggccccctttcccctcagcttctttctttgggtcggtggactgcattggcctggaaagtgcactggacagggagtctggtcctgtgtgtccttcaccatgttacttaacctctctgtgcctcagctacctccatttattcattctttcattcattcagcccttatgtatgaaaaggttagtgtagtgggtaagcagagtccacctacctgggttcagattctacctttaccagttaagcgatgtgtgacctctctgagcctccgtttcctcatctgtaaactggggaataatcatagcatactcctggctctcatcccacagagagcccagcgcaggcagctggagtcctggagctcctgctcccctgagggaaggtctggagggatgggcaggtgtctgggctggtagtcctgattctacttcttggggtctgctccaccccagcctagctttagggctccacttcctaggctgaagccccagcccagagagctaacccttcagccttgtccagattcaaaacacccacctcaggacaccggcaccctccacagccccaggccttacctgtgaacacctgcacccaaatcagccacctgcaatgtgctgggttctgggtaagccattattaaactggccgtgatctcacaagtcaagataccatgtcaagaagtgtgacaccaaggctgggcatggtggctcacacctgtaatcccagcactttgggaggccaaggcaggagggttgcatgagcctgggaggctcaggctgcagtgagctgtgatcatgccactgcactccagcctgggtgacagacaggaaaaaaaaaaaaaaaagaattgtgatacctgctatgaagaagggcccatcttggaaggcggaccatggttggtctacagcctaagtctgaggaggcttcagggatgtcagaagaggcttttttttttttttttgagacagagtttcattcttgttgcccaggctggagtgcaatggcatgatctctgctcactgcaacctccgcctcctgggttcaagtgattctcctgcctcagcctcccaagtagctgggattacaggcatgcgccaccacgcccggctaattttgtatttttagtagagacggggtcgctccatgttggtcaggttggtcttgaactctcgacctcaggtgatctgcccgccttggcctcccgaagtgctgggattataggcatgagccactgtgcccagccagaagaggacattttttaagacttcagttactttaagtaaattaagttcccaaacagggtgaacaagtctgtgctacatcatccacatatacctttatcaacctgttttttttttttttttcttttttttttttgagatagggtctcattctgtcacccaggctggaatgctgtggtgtgatcacagctccctgcagccttgaacttctggcctcaagcaatcctcctgcttcggcctcgagagtagttgggactacaggtgcaagctaccatgcctggctaaatttttttttttctttttttttaagagacaggtctcactatgttgcccaggctggtatcaaactcctggcttcaagcgatcctcctgcctcaacctcccaaagtgctgggattacaggcatgagccactgaggctggcctcaacctcattcttaccctgaaacaatacgatgcagtatcattgtgtccatcaggagacaattactggggccgggtgcggtggctcatgcctataatcccagcactttgggaggctgaggcgggtggatcacctaaggtcaggagtttgagaccagccttgccaacatggtaaaaacctgtctctactaaaaatacaaaaaaaaaaaaaaaaaagccaggcttagtggcacacacctgtaatttcagctacttaggaagctgagccaggagaatcacttgaacctgggaggtgggggttgcagtgagccgagattgcaccactgcactccagcctgggcgaaagagcgagactctgtctcaaaaaaaaaaagaaaatacaattgctggatttatgaaaaatattcattcatggttcctggccacgcgacgtggcctcgtttggaggcacaagtttagagctgtgggaggacggggcttctctctgctcctggagtagctcagtgatggcatgagtaatctcattcggagataacccatgtttaagccctggccaaatggcctctcctggtccaccaagtacgtgaggcaaaagtgcggaatcttggggtagagcgaatcctgggagatggatgctggcacctgtgccttcagcaccaggctagcttgtcaaggcctctggcttcttctgaattcaggactgagttgggggcttctagcatagtccaggaacccagatgcatgtgtgtctgtgcatgagtgtgggtgggggactctaagataggctttggaggtgggtctctgaaattgcagaggctagcgtatgtgcatagagggagacttactgtgaggtccatgatactaattaagtgccagggcccctggctaaggccctttctgaggtcctcgacctagtctacgtcccacaaaacctggatccgtccctgcatggctaaaaggtcatgagctcatctgattatcagggaagtctgggacgccctcctgtgcccccacctcccctccgcagagtttcacaacctccaatttggcaattgtcaatttagagcccctggctacagcaccccaccctgggcagagccacttcgccacctggtggctggttcctggaactgcatgttccacctcatctctgggaagatgctgctcctgacatcttctcccaggacccaggcgtcccctccctgggtctataacctgtgtctgaaagcccgaatccagggtctctagttccactttgggtcacctatggtttggaattacctggggtgcccagctctcgccttcattcaatgtgtgttaactcagcaaatggttgttgggcacctaccacataccaggcactgtgcttggcagaggccgaatgatagtgagcaaagcagacatcaccctgccctcaaggtgcccacaggctcctggacaggaccatcattgaccaagcaaccacataaataagcacacagttatgaactgtaacaggtgtcaacaaaaggctgtactggaggatttgacctagtcagggaaaatccaggagagcttcctggaggaggtaacacttgagcagagtctgagtgagttgcagttaaccaggtgaaaagaggagggaagaatgtttcagattggggtgggggttcagagacagcaggtgcaaagaccctgtagttcaccgtggtctattgcagtctgaaatgaccattccagctgctatgtggaaagtggataaaggaaggccagagaggctgggggaaatgagggaaataaaggaggtgtcttaggcatgtgagagggatggtggctgggccacattattccatgagaggtttggtgtcgcctctgagctgggcgccaggtggacagcgggaaagcaactgggaacaagacttgtcccaaacaaccctgctcctggaagggctgagactagaattcaggtctcttgagtctgccccactgattcccggcatttagggagacggttcctaaatcccgtctcatggattgataacagcaacagtaatatttatcaaagactgctatctgcctggtactgggctaatcaacaaacactgattagctctttgatttcccttcatagctttaatttagccagaaaggaccctaagcagagaaatggtcatacagctgtggggagcaaagccaggcctcaaacctgaggtgcctggcttcagaacgggcacctgaacccacacctgcgtctcccaccctctggccattcctgagcccctggctgattttgccctgtccttgattcacaggggagttttcaacttactcttttgagatataaatcaactcaggtaaccataaaaatagctacaacagaaagaaacttgcaaagagacatcagcaagcgttagtgagaggtgttaaggacccgctagtaccaaacggagagttgacttcatgagaaagattcgatagtggatgaaaccttcagggttattattgttgcaccccctagaacccccaagattctctcctggatcccctaaggtcagttcacatccactgtggcacacagtcccacactttggggaacgctgcacccctccactcccttctaggggcaccagtgtaaatgcttcatgggaaaaggattcgatgctctgacaggtgggtgaatgctgcctagtgtgtcttgcttttacaggttcacagtccctgttagtgtatgaaaggctctgagaagtcctgtagtaaggaattatgattggctttgtttaacccagcattctaaccatttatttgtttatgaagcactttacataaatcttttcgagggccaggtgtggtggctcacatctgtaatcccagcactttgggaggctgaggtgggaggatcacttgaggccaggtgtttgagaccagcctgggtaacagagtgagatcccttctctacgaaaataaaaattaaaaaattagttgagcatggaggtgcacacctgtagtcttagctgctacttgggaggctgaggtgggaggatcacttgagcccaggaatcggaggctgcaatgagctaggattgcacaactataccccaggctggatgacagagcgagaccctctctctcaaaaaaaaggatattaataaataaaaataaatacaaaatcttcccaaataagattaattaaataaataccaatctgtaggctgaagcctctcacatttcaaagcacctaaccccatgcgtttattgtaccctctcagcaccactggaggcagaaagatagagtggccctgggtccccactggacagatgaggaaacaggcttggagaggagatgttgacagccaggacatctgaccccctacccagtgttctgtaccccgatgcctggaagttcaaggtcatgggctggagcactgcgtcatcttgtgtgtctctcttgctagagccatctacggggaagacctgcctgcccaaggccttgctgaacctgagcaatggccgcaacgacaccatccctgtgctgctggacatcgcggagcgcaccggcaacatgagggagttcattaactcgcccttccgtgacatctactatcgaggtggggccccgggctgggcaggggtgccacgggggctgatggagacgctgtcctttgcttgtctgactcctgagacttttgatctgggcctaagtgccagcatgtacccaggacctgacaaatggatggatggatggatggatggatggatgcatggatgcatggatagatggatggatgaaggaacggtaactaccccttccaactttgtttcgagtttcagaatagaagattccactgggtgcggtggctcttacctgtaatcccagcactttgggaggccaaggggggcagatcgcttgagcccaggagttcaagaccagcatgggcaacatggtgaaatcctgtcttgacaaaagatacaaaaaaaaaaaaataaaataaaagaaggccaggtgcggtggctcacacctgtaatcccagcactttgggaggctgaggtgggcagatcacttgaggtcaggtgttcaagaccagcctggccaacatggtgaaaccctgtctctgctgaaaatgcaaaaattagccaggcgtggtggtgcgcacctataatctcagctacttgggaggctgaggcaggagaatcgcttgaacctgggaggtggaggttgcagtgagccaatatcgcgccattgcactccagcttgggcaacaagagcaagactcatctcaaaaaaaaaaaaaagatgcaaaaaaagccaggcttgttggtgcacacctgtagtcccagctacttgggaggctggggtgggaagatcacttgagctcagagggtcaaggcttcagtgagctatgattgtgccactgcactccagcctgggtgacagagtgagaccctgtctcaaaaaaaaaaaaaaaaagattccaagattctgagatgcagcgagtctagtgatcatgaactcgggatctggccctaagatgctgtggtggcggatactctaaggctctatgataataagtcctgagttcacaagttctaagaggcaaaggcagcagggggccaagaactgggccaatccccagttgagattctgtaaatcagagttgaccttcagatgcctggatattaagattcaaaatccatgaatattatatcttgagtccaaaattctgggaggccaaggtactgttgtttcctctaggagttttcttttttttgagacaaggtcttgctctgttacccaagctggagtgcagtggtgtgatcatggctcactgcagccttgacttcctgggctcaagggagtctcccacctcaccctcccaagtagctgggaccaccggcatggaccaccatgccaggctaatttttaaaatttctgtagagacagggtctcactatgttgttgtattagcccgttctcatgctgctataaagaactgcccaagactggataatttataaaggaaagaggcttaattgactcacagttccgcagggctggggaggcatcaggaaacttacaatcattgtggaaggggaagcaaacatgtccttcttcacatggtggtaggaagaagaagtgccaagcaaaagggggaaaagccccttatagaatcatcagatctcttgaggactcactcactatcatgaaaacagcatgagggtaactgcccccatgattaaattacctttcacagggtccctcccatgatacatggggattatgggaactacaattcaaggtgagatttaggtgtggacacagagccaaaccatatcagttgcccaggctggtactgaactgctaggcttcagcaatcctcctgcctcagcctctggagtagctgggaccacaggtgtaagtcaccaggcccagctaatttttagcatttctatagagatgggatctcactgtgttgcccaggcttgcctcaaacgcctgggctcaggtgatctccctccttggtctcccaaattgctgggattacaggcgtgagcctgcgcctggcctcctctaggatttttaaagcatcttatgaatctaaaaacttctcacattcaggattccacaaactaggtatccttcaggcttgagattctgcttctgcgatggatcccagggaatatccaaggacctatttgctgcccttgggtgtcgctgggcaggactctgcctgcatcccccaccccccaatttctacgtcctgcaccctacccccacccccagcaagcctggctaggtctctgctccgccaggaccctggatgaccgtcccctgcccccaggtcagacagccctgcacatcgccattgagcgtcgctgcaaacactacgtggaacttctcgtggcccagggagctgatgtccacgcccaggcccgtgggcgcttcttccagcccaaggatgaggggggctacttctactttggtaaggaggggcctggtgggggctgacagcatgctggagaagcatggcgggagatagcatgatactggttggtgtctgcagccctgaccatcacccagacacccagggccactctggccatgagcgcaggcagcactctggaccacaggctgcacgttggtcttggtcacagggccgttgcctctgaggtgtaagtgccatggggagtaccatggacctggattcagatcctcactccagccaggcacggtgtctcacacctgtcatcccagcactttgggaggtcaaggcaggaggatcgcttgagggcaggagtttgagaccagcctaggcaacatagcaataccctgtctcttttaaacatttaaaaaatggctgggcacggtggctcatgcctgtaatcccagcactttgggaggatgaggcaggtggatcacctgaggtcaagagttcaagaccagcctggccaacaagatggtgaaacccatctctacaaaaataacaaaaattagccgggcatggtggtgggtgcctgtaatcccagctacttgggaggctgaggcaggagaattgcttgaacctgggggacagaggttgcaatgagccgagatttccccattgcactccagcttgggtgacagagtgagactctgtctcaaaaaataaataaataaataaataaataaataagttagatggcatggtggcatgtgcttgaagtcccagctgcttgggaggccgaggctggaggatcacttgaacctaggagttcgaggctgcagtaagccatgattgcaccactgcactccagcctggaaaatagagcaagaccccgtctttaaaaagcaaaaagaaaagaacaaaaaaaaagccaaatcctcactctgcactttccaggcatgtgacctcacttccctgagcctcaccttccccagctgtgcagtggggatcacgagaggcccttgggctgtgatgtcagcgcccagctctgtattgtctgtgtgctttaatctggtttatgctgggaccaacagccccatcaccaggcccaaagcccaccactgccgttgtcatcactggactcatgaaatattttgaattttgcccctgcttaaaggcattcattatgtgcagctcagggacaaagtcacacaaagaattccatcatcagctgggcgcggtggctcacgcctgtaatcccagcactttgggaggccgaggtcggcggatcacttgaggtcaggagtttgagaccagcctggccaacatggcgaaatcctgcctctactaaaaatacaaaaattagccaggtgtggtggcgtgcgcctgtaatcccagctactcggctgaggcacaagaactgcttgcacccgggaggtggaggttgcaatgagccgagattgtgccactgcactccagcctaggcgacagagtgagactttgtctcaaaaaaaaaaaaaaaaagaattccatcattggatgtgtccagtccctcacagcctccaaatcgcgtggctgtgcccttaactagccacaccccatctccctggcatcacccagagaaacgtgcagttcatatccactgctggtgctgtctccgtcattatcctcagagcgccacggtgtccgtcccccgagtgtctgcaggcagagtcccaccctgggcccccttcgctgacctcccacccttcaccctggcccgcaggggagctgcccctgtcgctggctgcctgcaccaaccagccccacattgtcaactacctgacggagaacccccacaagaaggcggacatgcggcgccaggactcgcgaggcaacacagtgctgcatgcgctggtggccattgctgacaacacccgtgagaacaccaagtttgttaccaagatgtacgacctgctgctgctcaagtgtgcccgcctcttccccgacagcaacctggaggccgtgctcaacaacgacggcctctcgcccctcatgatggctgccaagacgggcaagattggggtgagtgtgcggctgggggcacagctgatccacctactcgtacccctctgcacacacacacgagggtctgctgctggtattcattattaatacgtgcatgcacctcccaacatgccaaccccagtgtgcagatgtcccagctcaagaacctgctatggctccctagtgtccagccaagctccttagcttcatccccgagcctctcgcctcatgtcaccctactggatgttcaccactccacccccaccagccaggatgagccactgataagaaactgagtccccgggccctagcccagcggtgctcccagcctcaaacctgttgaatggccctgccccagttccttcccttttctgggccgcgcagcatggggcctggagaagggtttctcaacttcagcatgattattttgggcggcaggctctttgtggtggggaccgtcttgtgctattgccagacattgatctgcatcccgggcctctacccaccagatgccaggaacacctccccttacacttgtgaccaccaaaaatatctccagaacattgctgaattgtcctctggggggcaccatcgctggattgggaaccaagtctggagtatgctagaggcaggagcacctgtccaagccctggcgctaccacttcccagtgtgtgacctcagacatctcatttcccttttctgtgcctcagtttccttgtctgtaaaatggggatataagagtgtcctctggtgtggtgttgtgacaaatgcggtgatccacataaggctcttaggaaggagcctgggagaagcagtaagtgtcacttacatgtctgtaatgccagctagttgggaggctgaggtgagaggatcgtttaagtccagcctggattatttgagatcccaaataaataaaaaccaaaataaaaaaaaatgtagcaaaaattactaaaattgcaattataccatggccctgaggcagtagaaaggctccagtttaaatcctggctttggctaggctcagtggctcgtgtctgtaatcctagcactttgggaggctgaggtgggaggagcacttgagcccaggaggttgaggctgcaatgagctgtgatagtgccattgcactccagcctgggcaacagagccagaccctgtctcaaaaaaccccaaaatcctggctgtgcacagtggctcatgcctgtaatcccagcactttgggaggccgaggtgggcggatcacctgaggtcaggagttcaagaccagcctggccaacatggtgaaaccccgtctctactaaaaatacaaaaatattagctgggtgtgatagtgggcacctgtaatcccagctactcaggaggctgaggcaggagaattgcttgaacctaggaggagagggttgcagtgtgctgagatcgcgccactgcactccagcctgggtgacagagagagactctgtctcaaaacaaaaaccccaaaatcctaacattgcctgaccttgggcaattcccacccctctctgtgcctccgcttccctgtgtgtaagccagggaaggaggagtggtaacaggaaggaccgcatgtgatcgtcagtattataattcacatgtcattaagatggattcattgctattttaacggcatgaagaagatattcattacaattaagatgttgaaggctcatccaggttctgtctggctccagctgactggttaagtggcttctggaacacccttcgtttttcccagcctccattctttatctgtaaaccaagataataagagcaagaattaaacaagatgaggaaagggtcctccagcagccggtgcttagctgttttctggggaggcgtcatgtgctgagctgggcccagccctgggggtctttccagtgtgagccccctgaccctcctggccccctgtgcagatctttcagcacatcatccggcgggaggtgacggatgaggacacacggcacctgtcccgcaagttcaaggactgggcctatgggccagtgtattcctcgctttatgacctctcctccctggacacgtgtggggaagaggcctccgtgctggagatcctggtgtacaacagcaagattgaggtgggctccaggagggggcatggggtgtgaggaaggaggggcagggctgggagtagggacagggccctggggctgggctgggggagacagccccagcctctaggacccaacgtggtgggtctgttggctgaatgcaagagaaggtgccaactaagtgcccagaacagtgtctgccatgtgaggaaatgagcaagacttgtgggaagatggacttttggggcaggtaggactgggttgggatcctggctctgtaacttacatgctgtgtgtctcaggacaagtggctccacctctctgggtctcagcttcttcatttgtaacctggggataaggatcatggatatcccatggggttcttgggaggaccaaagaggttaattttagaatggcttggcacagagtaaacattatgtcagcttttactactcatggttgttatatgaacttttgaaagctcttttttttcggtcaggcatggtggcttatgcctgtaattctagcattttggggagccaaggtgggcggattgcttgaagccaggagtttgagactagcctgggcaatatggcgaaaccccgtctctaccaaaaaaaaataataaaaatgaaaattagctaggcatggtggtgcgagcctgtagtcccagctacttgggaggcgaggtgggaggatcacctgagcctggggaggtcgaggcttcagtgagccgagatcatgccactgcactccagcctgggtgacagagtgagatcctgtctcaaaataaacaaacaaacaaacaaacaaaaaaccaagcttttttttccctacttagcagtattttgtgaacgtcgttctgtacttttaaatattctttggtaatattgtcgctgcatgtaaacataccatattcaaatgaactgttctcttattgctggtcgcttgggtttgtttctgcctttatcaggaataacactataagagcatctctgtggctgctttattgcacaaatcatgattatagagaaactcaagttaataaagggctaggaagctataaaaatggagcagaaaatgctggggactgggtgcaggtggtcttccttctagccctgccctgtggcttactggtctgtgagcttggcttccttgcaagacctcatttccctcattttttgaattagtgaccatcttgatttaaattagtggtggcaggaggtttagcatctcaggtgcaaactgattgattagtagtgtctacccagggaactgtatgaatacaattgtgcagggctcaattattgatgtctgccctgggttcagaattggagaattgtggtgagtcaatcatttatcatctttgggcaaaatttctcaatctttctctctgaatcagaatttctgagagcggaggccaggatttatacttgcagcaagttacataaattattttgcggccagcagcttggtactatccacagattggagtttgggaaccatgagaataaatgtctttttttcttttttgagatggagtctcactcttgttgcccaggctggagtgcagtagtgcgatctaggctcactgcaatctccgcctcccaggttcaagtgattctcctgcctcagccttaggagtagctgggattacaggtgtgcaccaccacgcccggctaattgttgtgtttttagtggagacagggtttcaccacattggccaggctgatcttgaactgctgaccttaggtgatccgcctgtcttggcctcccaaagtgctaggattacaggcatgagccactgcggccggcctgaaaataaatgtcttttaagggactttccagttccgagttctgtgatgctagaatagggtggaaaggtacattgaggcagaattgggcagctgaatccattcatgaatccgtgaatgcagctgaggaatggatggaaagagaaagcgctgtccgggtggagggtgggggaaggcacacccgaggcagcctgcctggaccccccacccatctcaggaaggcagcccccgaccaccctgcctctcttagaaccgccacgagatgctggctgtggagcccatcaatgaactgctgcgggacaagtggcgcaagttcggggccgtctccttctacatcaacgtggtctcctacctgtgtgccatggtcatcttcactctcaccgcctactaccagccgctggagggcacagtgagtgcccggggaccgggcaggggctggggcaggcactgggctgagccatgcaggactggggcacaacctcatccttctgggtcccctgtagggggacccggagaaggtttaggaacaggttggggaggcgccctccagcatccacgggtggccctgagctgggaggaggaagactcaggaggaagagagtgaaggaggaggctccatgggatgccgatgtttcgggcctgggggaacatctggattgggggccagatgttggaggggctgggtgacgacctgtgtgcccttgctgctccccagccgccgtacccttaccgcaccacggtggactacctgcggctggctggcgaggtcattacgctcttcactggggtcctgttcttcttcaccaacgtaagtgcctggcccccgtgccccccaccctgcctgccctcctcttctcttcctgcacctcttttctctccctctttttctcttctctctcctccaaatggtccttctcctttccttcctccttttattttcccatttctcttctacctcctccaatcccacgttctccatctctgcttttttctccttttctaacaggaaagagtcctttgtcttttctctgtaccagcctctgcctccctctcttctatccctttctctgtctcctctctcctcctctcctctcctgctggccccacccctttcacgtgccccctcctgtcttccagatcaaagacttgttcatgaagaaatgccctggagtgaattctctcttcattgatggctccttccagctgctctagtgagtagaggtccctgggccggcagcttctgggtgaggaaggtgggtttgggctgctaggtcgtccagattcaggagagaggtgattctgttagaaatgaatgcacccaacctgggcagctctaacccaaagtcaggacaaagccacaaacaatagggtcttctggttcaagaaaaattctgattgctagggagttatcatatacaacatggatagaaataattttaacctcttatgctggtgaatgattgctaatgtctgcctgaagtgccatgttaagaattttgcacctgtgtctgtgtttagtgggaaagagttgggattgattaatgatgtctgcctgggacagagaatgagagagttactgagtgtgtgttacctctttcacatttcccttagagttggagaatgatgaaattcacttagccacaaaatctccactgaacaccactaaatctttctttagcaattccaaggggcatcacttcaggatcctgtgggacctcaggattaattgccagctaattgaatgttcttgttaacagaatgctggggaaccctgctaatccactttgtttcttttctgggggtctagaaggcattgggaagtcctgataccctggagggcttggaggcgtgtcttcccctccagagcctcattgtcccctctcccctctggcctctcttgtggtctctgctgcactgcagcttcatctactctgtcctggtgatcgtctcagcagccctctacctggcagggatcgaggcctacctggccgtgatggtctttgccctggtcctgggctggatgaatgccctttacttcacccgtgggctgaagctgacggggacctatagcatcatgatccagaaggtacgggctgggaggaccctctggactcgtgtgttcctggagggagtcacacacacaccacatgcacacttatgcacctgcagacctgaggatgctgggtaccgtgggggcaggaggcatggtctggacactggggtgggaccagggtggagatggaggaatggggaaagtgagaaaccatgtgtctcctctttgcctccataatcccgctggggtctttagattctcttcaaggaccttttccgattcctgctcgtctacttgctcttcatgatcggctacgcttcaggtgagctctgggtgctcaggtggtcctggcaggggtggtgcaaggacgggaacagtagccatgatgtataggggacaatagcagccttgctgagttcttttttttttttttttttttttgaggtggagttttgctcctgttgcccgggctggagtgcaatggcacaatctcagctcactgtaacctccacctcccaggttcaagtaattctgcctcagcctcccacgtagttgggattacgggctcctgccaccacgccccactattttttaatttttttttttttgtatttttagtagagatggggtttcaccatgttggccatgctggtcttgaactcctgacctcaggtgatccaccctccttggcctcccaaaatggtgggattacaggtgtgagccaacgcgcctggccactgagttcttatttgtgtgccaggcaccagactaagtacgtttccatccttgcctcccaacaagcctgtaagctaagtgcctttattatcccctattatagaaaaggaaactgaggcttaggagggttaaataactagcacaagttcaaaagccagtgaatggtggccgggcgcagtggctcacatctgtaatcccagcacttcaggaggctgaggcgggtagatcacttgaggtcaggagtttgagaccagcctggccaacatggcaaaaccccgtctctaccaaaaaatacaaaaattagacaggcatggtggcgcgcaactatagacccagctactcgggaggctgaggcacaagaatcgcttgaacccagggggtggaggttgcagtaagccaagatggcaccactgcactccagcctgggcaacacagcgagactctgtctcaaaaaaaaaaaaaaaaaaaaagctggtgaatggcaaaactggagtattagctattgctacaaaggaagccacctaaagtggggcttaaaatagcacccacttattattattattttttttgtggcaaggtctcactctgtcaccaaggctggagggcagtggtgctcttggctcactgcaatctctgcctcctgggttcaagcgattctcttgcctcagcctctcgaatagctgggattacaggcgtgtgccaccacgcatggctaagttttatatttttggtagagatggggtttcactatgttggccaggctggtctcgaactcctgaccccaagtgatccacccaccttggcctcccaaagtgctgggattacaggcgtgagccactgtaccaggccaacttactattgcttatgagtcaatgggtcagctgggtggctgtgctgccctgggccaggtttggctgatccctacaggctcttgtgcctgtggtcagctggcaggctggctgctggctgactggtctagctagtatggacttggttagagggggtttgctatctatcttccacatggtcactcatttctggacagctagcttgggcttgtccacatggtggccttagggttccaagaacatgagcagaagtgttcaaggacacctcctggcatggcatcactgctgccttactctgttggccaaagcaagtcacaaggccagcctcgattcaagggatggggaaatagacgccacttctttttttccattttttttttttggtggaggcagggtcttgctatgttgcccaggctggtcttgaactcctgggctcaagcagtcctcctgcctcagcctcccaaagtgcaggattataggcgcgagccactgcacctggcctagactccacttcttagtgggagaagctgtaaagccacattgaaggaggatggatacatggaaggataaaatttaataattaaactagcagcccaggtattttcttaaagcccaacatcagctcccttgatataccttcttcgtgatgtcatgatgccactaagaagcattctgggacctcagtggcatgggtcatgggagaaggaccagggaccagggctggagaaactgaccaagtccttgggctgatccccgaggtgtgggtaatctgacatcaatgcccagcatccaaaggggaatggccaactcaggttagacctggacacatacacatctgagcaggttcatctggggacgagcctggcacaggaatctgacaagggtgatattttaacccacgatagtggccaagtctctaggtagattattggtgggaagtggaattgtagttttcactggggagatagggacagggtacagctttcccttcccagggatcacactggacaaactagacagtgtcaagggttcaacaacagtttgggattcaggtcagggatctagccctactgcagtcctagttattgaaactaaggagaaacaagggttagagtagcagcttagcagtcagcttggttgcaggtcttctccttataggatgcactagatctcaattctgaggctgacatgacataaacaggacacacatgcttctgttcccacactttggtgtccatagcagacatcactaatggatcacagaacagtttttccggtgagtccagacaaggtctcagaatccttctcaacacagtgtttcaccaggtactatacaactgaagaacattagcatatgagttgaaatctgcatactctaatccctggttgcaggcagtatgacattctgtgccccactgactgatgggactgagtcttcttcatgctcccctccctggctggtttagggacaggttgttgctgccaaactgtgttgagaaggaatctgaagctccacctgggcttagtaggaaaggagaaccatgatgagtttgagatgtctagagcaggagaggccccttagagaacacggctttggggacagtcaggactgatgcctggtttcagcccccacttttcctctctgggttggggtggagtgggaaactgtcagagagagagtctacccctgcgaataggggcattccagagcccccaagacctctaagaatggtaggccgcattaggatttcccaacactattgacatttgagaccagatcattcttcgtggcggggaccatcctgtgcattgtagggtgtcaggcagcacccctggcctccacccacctgatgccagtagcacccccacccccagttgtaacaaccaaatatgtctctagacattgtcaaatgtcccctggtgggaaaaactgagaccctccctggactagatcctgaaaaccttttccctcccggtagcagggaaccaccaggttgtgtaaggaggggtgaactgtcccaggttggaaacagagcaggtcaaaactcctacgcttatcagtagtgggattgagcctgtgagtagccactgcactccagcctgggcaacatagcaagaccccatctcagaaagaaagagagagagagagagataacctcttccttatcagcaagagtttatggaaaggcttcaaaggttttgggatcaggaggacctgggtctggtgtggcttggctgatgtgtagggtgacatgggtcagcgtgtgggccagcgtgctccgctcactaggcctcagctttctcctccagcaaatgagaatgacaccctccacctctctgtgggtgtgctcacactcagtgagtgccacccctatcctcccacagccctggtctccctcctgaacccgtgtgccaacatgaaggtgtgcaatgaggaccagaccaactgcacagtgcccacttacccctcgtgccgtgacagcgagaccttcagcaccttcctcctggacctgtttaagctgaccatcggcatgggcgacctggagatgctgagcagcaccaagtaccccgtggtcttcatcatcctgctggtgacctacatcatcctcacctttgtgctgctcctcaacatgctcattgccctcatgggcgagacagtgggccaggtctccaaggagagcaagcacatctggaagctgcaggtgaggccccagggcccccagccccactctaccagccaccctcgtccttccgaggagacccacccgactggcttcctcggccttccactctgagcaagcagtgtcttctcattctccctccacttctctgtcggtaaaatgggcatcagaggctgctgctgacttcccagagctgcctagtgaattttgaggtggcttcttgcctggctgccagcagtgggctcagattctccttgtggtccagctcacaggacacagtcggctccacctagcatgactgagtgacttctgccggctcagaaagtgctccgtgggcatcagcgtttcagcaggggtcccacgctgagcccaggggcagcttttgtgctctagcactccagcacagggatgtcagcattctcatgggggtctttttctagcaactgtgagcatgcttcctagaggagaaaccaatggggacaggggccgccttggcccggggagctgcagaaagtttttacttaccaaaagctttctatgcaatcctggaaagaacaggccctgggatcacagccctcccaggccaggtgcagcctacaaacctggtgtcctaataaacagtgctgccccacggcccaggaatacagcacccgtgtttaccttgactgtgcatttcaggaaaatggtgcagtgagaaaaaagggcccaaggttgtcctcccaggactgggtctgagggaaacagctctggcctgctcttaacctttatctatattgcttacttcattgggcctcagtttccccactgggcattactcacaggatgcaaactgggcatcctgtgggctggagtgcaatggtgtgatcttggctcactgcaacctctgcctcccaggctcaagtgattctctgtcctcagcctcccgagtagctggggctaaggtgtgcaccacctcacccggctaatttttgtattttttgtaaagatggggtttcaccatgttgcccaggctggtcttgaacttctgagttcaagctatccacctgccttggcctcctaaagtgctgagattgcaggtgtgagccactgcacccagcatcagaccattatattaaaaacaacaacaacaacaaaaaactgcaaaatttaaaaattaagagattccctatgaaaacccagatttctggcttttcttgaaaagttggaagctccaggcagtgcagggtccggattcctgcctggcagccctcaggtggggtgagtggcagctgcccccttacacgtgggcatttgctccctgttctccccagtctctacccctccctcactgagaggcaactgctgtgtaagtgtgatagggcttgggcggcagcctttctgcacctgatcctgtttcacccatttgttttcctgcctgccacctgtgggtatttgagtttataaaccctgtgtctagtggggagtaggagtctaaatgcctagttctgggcccaccctggcccgttgtctcatttctgccaccagagcggcaggcgcaggctgtgaggctcaccgatgtccctcctgaccctccctccccgcagtgggccaccaccatcctggacattgagcgctccttccccgtattcctgaggaaggccttccgctctggggagatggtcaccgtgggcaagagctcggacggcactcctgaccgcaggtggtgcttcaggtgaggctggggcagtggggccaggatggcagggcggaactgtccccactggctcggggcccctgctgctccagcgtcgtctacccattgcaatttctggagccactgaggccccaagaggcccgagcagagttcatttccaccaggcgatctcaggcaagtcagcccacctctctcagcctcagtttcttcatctgtggaatgagacaatgatctcacgggctcctaggctggcggtgcggattagacaggtcagcacgtgagaagtgctcagccagtgcccgacgcgcatcgggacgccacaggctcccctgttcttgctcagggggaagcagagacttggatggtgggttcattttagagcatcaccctgtatctaccaaacagtggggtgagctctagtgccctcggtgaaatgggaagctgaggaatgtgcagtttccagggctggagacctcacccagcccatctgcagaatgactccgtgttccagaggcacagggagtgccagcttcttaggggaaccccttcatgaatcttttctttccagttgattcattcattgtaaagtggttgtcagcatggagcataagcagaatgtttggagtcagacaaagtcagtttcttcatctgtgaaatgggaacaataatagaacccacctcctaggccatccgatcagttcaattccattttttgtttgtttttagaggcagggttgctcaggctggagtgcagtggtgtgatcatagctgactgcagcctccaactcctggtctcaagcgatcctcccacctcagcctcctcatgccaccatgtccgaccaatttttaatttttttgtagagatggggttcttgctatgttgcccaggctggtctcaaactcctggtctcaagcgatcttcccacctcagcctcccaaaatgctgggattacaggcgtgagccaccacacccagcctctgttcagtttgaatccaaagctcaaatcttggctgggtgtggtggctcgtgcttgtaatcccagcactttgggaggccaaggtgggtggatcacctgaggtcaggagtttgagaccaccctgggcaacatggtgaaaccctgtctccactaaaaatacaaaaattagtcgggagtggtggcatgcacctgtaatcccagctactcgggaggctgaggcaggagaatcgcttgaacctggtaggtggaggttgcagtgagccgagattgcactactgcactccagtctggcggacagagcaagactctgccttaaaacaaacaaacaaaaatgaatagataggataaaaaattaaagataatatgtaaaaaaaaaagataatatataaaaaaatgagtggataaacaaaatgtgggctatgtgtacagtgaaatattatctgggccaggcgtggtgactgtaataccaacactttgggaagcgaggcaagaggattgcttgagcccaggagttcaagaccaacatagtgaaaccccatctctacaaaacgtttttaaaaaattagccaggtgtggtggcatatccctgtaatcccagctacatggggggctgaagtgggcggatcacttgagcctgggaggtcaaggttgcagtgagctgtgatcgtgccactgcaccctagcctgggcaatggagtgagaccctgtctcaaaagaaggttaaaaaaaataatttctgcttgggggaatggaagaattttggaaatagatagctgtgatggtcacacaatgtggatgtgcttaatgccactgaattgtatactcaaaaatgattaagatggcaaattttttgtgtgtgtatacacacacacacacacacacacacacacgtctttttttttttttttttgagatggagtcttgctttgtcccccaggttggagtgcagtggcgtgatctcggctcactgcaactgcctcccaggttcaagtgattttcctgcctcagcctctcgggtcactgggactataggcacccgccaccatgccccgctaattttttttttaattttttttaatttttagtagaggtggggtttcaccatgttggccaggctggtctcgaactcctgacctcaaatgacccacccacctcggcctcccaaagtgctgggattgcaggcatgagccaccacgcccagccttgttatgtatatgttaccataataaaaaaataggagggtgtgctggggatggtggcatggagagcgtctctgaggggttccccatgaccctctgcttgggccctgccagggtggatgaggtgaactggtctcactggaaccagaacttgggcatcatcaacgaggacccgggcaagaatgagacctaccagtattatggcttctcgcataccgtgggccgcctccgcaggggtgagtggaggggcgggtgcggaggggagccccagtccattctcatcacgaatttgctttgagcagtcctgcttctttccgggactcagtgtccgtgtctacagaatgagagagtgtgcccctgagcttcctctgctgcttgtgaatgcctggggcacctcacctacgtggcttcatcctggccctccctactgttgacataagctggcctggggagggaggacgagctcctcagccatccctgtgtggagaaaaccttcctgtttgtccagtaagccatgagcacgcgagacgcagctggagaggacacaggcactcagggcattcggctccaggcttgaatcctggttcctccattctctcctggggaggcaccttgacctctcttgagccccagtttccacctctgtaaaatgagcatagtcacatccccccttcagaacactgtggagtgcccagtacacagtaggcactcaatatacgcacgctctctctccaccaacccccacccctccctctgatgtgctctcggtgcagatcgctggtcctcggtggtaccccgcgtggtggaactgaacaagaactcgaacccggacgaggtggtggtgcctctggacagcatggggaacccccgctgcgatggccaccagcagggttacccccgcaagtggaggactgatgacgccccgctctagggactgcagcccagccccagcttctctgcccactcatttctagtccagccgcatttcagcagtgccttctggggtgtccccccacaccctgctttggccccagaggcgagggaccagtggaggtgccagggaggccccaggaccctgtggtcccctggctctgcctccccaccctggggtgggggctcccggccacctgtcttgctcctatggagtcacataagccaacgccagagcccctccacctcaggccccagcccctgcctctccattatttatttgctctgctctcaggaagcgacgtgacccctgccccagctggaacctggcagaggccttaggaccccgttccaagtgcactgcccggccaagccccagcctcagcctgcgcctgagctgcatgcgccaccatttttggcagcgtggcagctttgcaaggggctggggccctcggcgtggggccatgccttctgtgtgttctgtagtgtctgggatttgccggtgctcaataaatgtttattcattgacggtg

SEQ ID NO: 15866 - DNA, 31807 bp, Homo sapiens
ggggcttcctggagcccccgcccctggccgggttctgcctgactcccctttcattcccttgcaggctgagcagtgcagacgggcctggggcaggcatggcggattccagcgaaggcccccgcgcggggcccggggaggtggctgagctccccggggatgagagtggcaccccaggtggggaggcttttcctctctcctccctggccaatctgtttgagggggaggatggctccctttcgccctcaccggctgatgccagtcgccctgctggcccaggcgatgggcgaccaaatctgcgcatgaagttccagggcgccttccgcaagggggtgcccaaccccatcgatctgctggagtccaccctatatgagtcctcggtggtgcctgggcccaagaaagcacccatggactcactgtttgactacggcacctatcgtcaccactccagtgacaacaagaggtggaggaagaagatcatagagtgagtattgttagcttcctggcctgtggtctcctcctctgtatccattcacccattcatcatccacccctctatctattatccacccatccgtcgattcatccatccatccatctgtccatccaaccatccatacatctatccatccatctattcatctccctatccatatatcatccgtccatccatccatccaaccacccatctattcgtccatccatccaaccatccacacatctatccatcaatccattcatctctccatctctatatcctccatccatccatccaaccatccatacatctatccatcgatccattcatctctccatccatatatcatccatccatatatcatccatccatacatccatccatcatccagccatctatcatctatccatctatccaaccatccatcatccatcatccatccattcatctattcatttatacatcatccttccatctgtccatctattcatctatccatcattattccatctgtccatctatctactatccatccatctatccatctacccatcatccatccatccattcatccatcatccttccatctgtccatctactcgtctattcatcattccatatgtccatctatccattaatctatccatccatccatatatcatctatctatccacccatcatccatccatccatctacccatctatccatcatccatccatctattcatcatccatctatctattaatccatcatccattactctacccatttacccctctgtccacccttccataggacatttgtctgttcatccattcatccatccacccactcatttatacaatgcatccatccacccactcatttatacaaatgcaaatgcatttatacaaatgcaaactcagccatttacccatttacccattcacccttccacccactcatttatacaactatttactcatctaactctccattcattcatctgctttttttttctttttgagatggagtcttgctctgttgcccaggctggagtgcaatggcatgatctcggctcactgaaacctccacctcctgggttcaagcaattctccagtctcagcctcccgagtagcgggattacaggcacccgccaccacacccagctaattttttttgtatttttagtagagacaggttttcaccatcttggccaggctggtcttgaactcctgacctcgtgatccacctgccttggcctcccaaagtgctgggattataggtgtgagccaccgcatcccgcctcatctttttttattcacctacatatccacgtactcatctgtcccccattaatctacttgtctgtccatctcttcacctacacatccagccttccatttgtttatcttcttatttatacatctgttcatccatccatccatccatccatttatccatctatcatctactcattcatttacccatctttacacttttttgtccacctatccaatctatagatccattgtccactcattaaaatatctatctactcatctacccatctgtcagccatctgtccagccatacacccatataaccaaccttccattcatctaccattttctcatctgaatgtcatttcatcttctcacctacccactgtttctagtcatctagccattcagctatcaaactattcatcattcattcatttattcattcattcattccatttctcatgcttgattgctcacctgcctgctgtccttctttccttcctctccttctctcttctaaccaccaattcattcacccagatctctgtccatccatttgtccattcactcttttgtttgcttagtcactgactcatttattcatttgctcatcttttcttccatttttgcatctattcatccatccatctccctaccttctcttcctggcacacatccagctgcccctcctgggtcttcttcaatcatcacctccattcctggccatccagtggctttcctgaggcttagaaagagctggaaaccccaaggcattcaaccttctttcccataatgacagccttgctgaaagaaaagacagactggagagaagccctggatggggccacagcatgtggcccctatgacgcattccatgccaggcctagctggggacagggagcctccagcccccttgaccaccttgtctggtccccatcctcccccagtgtgttatgctggcatctgcatgtggtttgtgtggcactctgcaaactcagacatcccgggttctgtttccagcatgactctattgtctgtcacctgcagactccctgctttgtgaggttgagccctccctcctggtcctttaggaagcccagggacttccacaagcttttggcagtttggaggagggagcagggcttgcagtctcctagccagctcctcctgagcctcagcaggccctgctgaactgtatcctttctatgtcccggccctgctgtccctaatgtgccctgaattgaccctttcctcaactgctccatgaaatctcctctcggtggcctgtgtgtgtgtcctggaggatggtgctgaggtctggagatgacctggacttgcgtgtcctcctctgtccccctgctggccacagattcatttatctcttggatggagccgattcaccttcacagcccttgcttggtcaagagccgccccctttatttattcacagtcattgattcattcagatgtctctttttcttttttttttttttgagacaggttctttctctgccactcaggctggagtgcagtggcgctatcttggcttactgcaacctccacctcccaggttcaagcaattctccagcctcagcctcctgggtagctggagctacaggtgtgcacgaccacaaccggctaatttttgtatttttagtagagacagggttttaccatgttggccaggctagtctcgaactactgtcctcaagtgacctgcccacctcggcctcccaaaatgctgggattacaggcgtgagccaccgcacccagccagtggatgtttcttgggtgcccactgtctgccagtcagtggggttggccctgaggcttcaggctgagccagaccagatccacttctactcaggcggcactttccgtttagagggtgagacagacaagaagcaagtagctgagcacatggatgtgccatgtgagttgggggaggtgctgaagttagagagtgggtggatacaagaaaggtaatccaggagggcttcttggaggagttgacatttaagcccaaagctaaaggtcatgaaggggcagtcacagagagggagggaagggtgttgtaggtggagagaagtgtgagtgcaagggcctaaggctggagaggctctgcagatgtcgccaaggaatagggcctcacagttgtctgtgctgaaaaatctgtacaacctctgctcagaggtggaaactaagggccagagcagcagagtgcccagtgttcccatccttctgtccccaagccttcccaggtcctgttgaaagctggtgggctctgtatctcccattcccctcccgcaagccctcctccccacccctaccccaggaagtccaggctggtggagtaagtggggcacggctgagccctgaaggctgcctcagtgagatctggtgggggcagtattgctttttattttttggctcaaaggtcaaagttcaggaagaggtaaagtgggggctgcctaagtgccctcattagaggctgtatctgtgcctgtgcccctgtcaacaggagagcacgtcttaccctactgtggatgctaatgatcccctttgccagtacctgccctgagatggaaaatctcaacccctggcgaagaggaagggaggagagtggctgtccccttctcatggcaagacaggctgggtacagccagatgccagctttgtccacccttgcaaccccgtcccacctgcttccacaacctgccctggcctcagtttccccaactgcattccccttcccctctggccctgctgcctcttgttagggttttctctgttcccctactctcccctcttctccctcccagaccctgtgcctccatcttcctccttctctttagtctcttattcattgaacagagtcttactgcatcccaagatgtgccaggcactgggccaggtaagaatgtgacagagagagcattcctgcctcatggtggccctgggctagctctttctctctcagaacctagcacataataggtgccgaaataatgtttgttgaatgactgaatgagtgtctccaagccctccagctcttagtgtctgtttccttcctttctctctctatctcttctcttcccagccctctctgtgccacacccttccgccatctgcctctgtagccccacatctctcccatgcacatacaagctccagacacacagtaggcactcattaataatggtaatatcaactaacatttattgaatgtttaccgtgtggtgggccatgggcaggtacatatgagcatggcctcatttgtctcaaatgtttgttgaatgaataaattaatgggttagttatggaatgaatggatgaaatgcctcatcttttagtctgctgtttctttattttatctttgtttttgtctctttcagtttctctgccttagtaagtactcaataaatgactaatatatgagtgggtgggtgagtggatgggcagttggatggatggatggatggatggatggatggatgggtgggtgggtggataggcagatggatggatagacgagtgatggatggatggatggatggatgggtgagtggatggatgggcagatgggtggatggatgagtgggtggatggatggatgagtagtggatggatgggtggacagatggaggagtgagtggatgggtagatgaatggatgagtgatggatggatggatggatggatgagtgggtggatggatggatggatcagtgagggatggatggatggatgagtgatggatggatgaatgggtggatggatgatgggtgggtaggtggatgggtggatgctgggtgggtggatgtatggatgagggatggatggatggatgggcgggtaggtggatggatggatgggcgggtagttagatgggtggatgaatggatggatgggtgggtggatgggtagatggatggatgagtgatggacggatggataagtggatggatgggtggatggatggatgagtgatggatggatgagtgatgaatggatggatgggtgggtaggtggatgggtgaatggtgggtgggtggatggatggatggatgagtgggcagatggatggatgagtgatggatggatggatggatgggtgggtggatgggtagatggatggatggatgagtgatggatggatggatgggtgagtggatgggtagatggatggatggatggatgaatgatggatggatgggtggatagatggaggagtgggtggatgggtagatggatggatgagtgatggttggatggatagatgggtggatgggtagatggatggatggatggatgagtgatggatggatgggtggatagatggatgagtgggtggataggtagatggatagatgagtgatggatggatggatggatagatggatgggtcggtgagtggatgtgtggatggatgggtggatagatgtatgggcagtctgtgcatttctttctgtttgtctccacccaacacacagtaggtactagctatagtttgttggataaaacattacttagtttttacatctgccccaactacctcaccctgttccttgtaaggcttcagctgcctgcccgccaccacagtctctgggtccctaaggccagggacagtggggcaggcaggggatgagccctcccatcaacttgcctccctacctcctccaggaagcagccgcagagccccaaagcccctgcccctcagccgccccccatcctcaaagtcttcaaccggcctatcctctttgacatcgtgtcccggggctccactgctgacctggacgggctgctcccattcttgctgacccacaagaaacgcctaactgatgaggagtttcgaggtgagccacccagatgggcatagccagtgggacagccaggggtgtgggggaagcctggcattgggggccccctttcccctcagcttctttctttgggtcggtggactgcattggcctggaaagtgcactggacagggagtctggtcctgtgtgtccttcaccatgttacttaacctctctgtgcctcagctacctccatttattcattctttcattcattcagcccttatgtatgaaaaggttagtgtagtgggtaagcagagtccacctacctgggttcagattctacctttaccagttaagcgatgtgtgacctctctgagcctccgtttcctcatctgtaaactggggaataatcatagcatactcctggctctcatcccacagagagcccagcgcaggcagctggagtcctggagctcctgctcccctgagggaaggtctggagggatgggcaggtgtctgggctggtagtcctgattctacttcttggggtctgctccaccccagcctagctttagggctccacttcctaggctgaagccccagcccagagagctaacccttcagccttgtccagattcaaaacacccacctcaggacaccggcaccctccacagccccaggccttacctgtgaacacctgcacccaaatcagccacctgcaatgtgctgggttctgggtaagccattattaaactggccgtgatctcacaagtcaagataccatgtcaagaagtgtgacaccaaggctgggcatggtggctcacacctgtaatcccagcactttgggaggccaaggcaggagggttgcatgagcctgggaggctcaggctgcagtgagctgtgatcatgccactgcactccagcctgggtgacagacaggaaaaaaaaaaaaaaaagaattgtgatacctgctatgaagaagggcccatcttggaaggcggaccatggttggtctacagcctaagtctgaggaggcttcagggatgtcagaagaggcttttttttttttttttgagacagagtttcattcttgttgcccaggctggagtgcaatggcatgatctctgctcactgcaacctccgcctcctgggttcaagtgattctcctgcctcagcctcccaagtagctgggattacaggcatgcgccaccacgcccggctaattttgtatttttagtagagacggggtcgctccatgttggtcaggttggtcttgaactctcgacctcaggtgatctgcccgccttggcctcccgaagtgctgggattataggcatgagccactgtgcccagccagaagaggacattttttaagacttcagttactttaagtaaattaagttcccaaacagggtgaacaagtctgtgctacatcatccacatatacctttatcaacctgttttttttttttttttcttttttttttttgagatagggtctcattctgtcacccaggctggaatgctgtggtgtgatcacagctccctgcagccttgaacttctggcctcaagcaatcctcctgcttcggcctcgagagtagttgggactacaggtgcaagctaccatgcctggctaaatttttttttttctttttttttaagagacaggtctcactatgttgcccaggctggtatcaaactcctggcttcaagcgatcctcctgcctcaacctcccaaagtgctgggattacaggcatgagccactgaggctggcctcaacctcattcttaccctgaaacaatacgatgcagtatcattgtgtccatcaggagacaattactggggccgggtgcggtggctcatgcctataatcccagcactttgggaggctgaggcgggtggatcacctaaggtcaggagtttgagaccagccttgccaacatggtaaaaacctgtctctactaaaaatacaaaaaaaaaaaaaaaaaagccaggcttagtggcacacacctgtaatttcagctacttaggaagctgagccaggagaatcacttgaacctgggaggtgggggttgcagtgagccgagattgcaccactgcactccagcctgggcgaaagagcgagactctgtctcaaaaaaaaaaagaaaatacaattgctggatttatgaaaaatattcattcatggttcctggccacgcgacgtggcctcgtttggaggcacaagtttagagctgtgggaggacggggcttctctctgctcctggagtagctcagtgatggcatgagtaatctcattcggagataacccatgtttaagccctggccaaatggcctctcctggtccaccaagtacgtgaggcaaaagtgcggaatcttggggtagagcgaatcctgggagatggatgctggcacctgtgccttcagcaccaggctagcttgtcaaggcctctggcttcttctgaattcaggactgagttgggggcttctagcatagtccaggaacccagatgcatgtgtgtctgtgcatgagtgtgggtgggggactctaagataggctttggaggtgggtctctgaaattgcagaggctagcgtatgtgcatagagggagacttactgtgaggtccatgatactaattaagtgccagggcccctggctaaggccctttctgaggtcctcgacctagtctacgtcccacaaaacctggatccgtccctgcatggctaaaaggtcatgagctcatctgattatcagggaagtctgggacgccctcctgtgcccccacctcccctccgcagagtttcacaacctccaatttggcaattgtcaatttagagcccctggctacagcaccccaccctgggcagagccacttcgccacctggtggctggttcctggaactgcatgttccacctcatctctgggaagatgctgctcctgacatcttctcccaggacccaggcgtcccctccctgggtctataacctgtgtctgaaagcccgaatccagggtctctagttccactttgggtcacctatggtttggaattacctggggtgcccagctctcgccttcattcaatgtgtgttaactcagcaaatggttgttgggcacctaccacataccaggcactgtgcttggcagaggccgaatgatagtgagcaaagcagacatcaccctgccctcaaggtgcccacaggctcctggacaggaccatcattgaccaagcaaccacataaataagcacacagttatgaactgtaacaggtgtcaacaaaaggctgtactggaggatttgacctagtcagggaaaatccaggagagcttcctggaggaggtaacacttgagcagagtctgagtgagttgcagttaaccaggtgaaaagaggagggaagaatgtttcagattggggtgggggttcagagacagcaggtgcaaagaccctgtagttcaccgtggtctattgcagtctgaaatgaccattccagctgctatgtggaaagtggataaaggaaggccagagaggctgggggaaatgagggaaataaaggaggtgtcttaggcatgtgagagggatggtggctgggccacattattccatgagaggtttggtgtcgcctctgagctgggcgccaggtggacagcgggaaagcaactgggaacaagacttgtcccaaacaaccctgctcctggaagggctgagactagaattcaggtctcttgagtctgccccactgattcccggcatttagggagacggttcctaaatcccgtctcatggattgataacagcaacagtaatatttatcaaagactgctatctgcctggtactgggctaatcaacaaacactgattagctctttgatttcccttcatagctttaatttagccagaaaggaccctaagcagagaaatggtcatacagctgtggggagcaaagccaggcctcaaacctgaggtgcctggcttcagaacgggcacctgaacccacacctgcgtctcccaccctctggccattcctgagcccctggctgattttgccctgtccttgattcacaggggagttttcaacttactcttttgagatataaatcaactcaggtaaccataaaaatagctacaacagaaagaaacttgcaaagagacatcagcaagcgttagtgagaggtgttaaggacccgctagtaccaaacggagagttgacttcatgagaaagattcgatagtggatgaaaccttcagggttattattgttgcaccccctagaacccccaagattctctcctggatcccctaaggtcagttcacatccactgtggcacacagtcccacactttggggaacgctgcacccctccactcccttctaggggcaccagtgtaaatgcttcatgggaaaaggattcgatgctctgacaggtgggtgaatgctgcctagtgtgtcttgcttttacaggttcacagtccctgttagtgtatgaaaggctctgagaagtcctgtagtaaggaattatgattggctttgtttaacccagcattctaaccatttatttgtttatgaagcactttacataaatcttttcgagggccaggtgtggtggctcacatctgtaatcccagcactttgggaggctgaggtgggaggatcacttgaggccaggtgtttgagaccagcctgggtaacagagtgagatcccttctctacgaaaataaaaattaaaaaattagttgagcatggaggtgcacacctgtagtcttagctgctacttgggaggctgaggtgggaggatcacttgagcccaggaatcggaggctgcaatgagctaggattgcacaactataccccaggctggatgacagagcgagaccctctctctcaaaaaaaaggatattaataaataaaaataaatacaaaatcttcccaaataagattaattaaataaataccaatctgtaggctgaagcctctcacatttcaaagcacctaaccccatgcgtttattgtaccctctcagcaccactggaggcagaaagatagagtggccctgggtccccactggacagatgaggaaacaggcttggagaggagatgttgacagccaggacatctgaccccctacccagtgttctgtaccccgatgcctggaagttcaaggtcatgggctggagcactgcgtcatcttgtgtgtctctcttgctagagccatctacggggaagacctgcctgcccaaggccttgctgaacctgagcaatggccgcaacgacaccatccctgtgctgctggacatcgcggagcgcaccggcaacatgagggagttcattaactcgcccttccgtgacatctactatcgaggtggggccccgggctgggcaggggtgccacgggggctgatggagacgctgtcctttgcttgtctgactcctgagacttttgatctgggcctaagtgccagcatgtacccaggacctgacaaatggatggatggatggatggatggatggatgcatggatgcatggatagatggatggatgaaggaacggtaactaccccttccaactttgtttcgagtttcagaatagaagattccactgggtgcggtggctcttacctgtaatcccagcactttgggaggccaaggggggcagatcgcttgagcccaggagttcaagaccagcatgggcaacatggtgaaatcctgtcttgacaaaagatacaaaaaaaaaaaaataaaataaaagaaggccaggtgcggtggctcacacctgtaatcccagcactttgggaggctgaggtgggcagatcacttgaggtcaggtgttcaagaccagcctggccaacatggtgaaaccctgtctctgctgaaaatgcaaaaattagccaggcgtggtggtgcgcacctataatctcagctacttgggaggctgaggcaggagaatcgcttgaacctgggaggtggaggttgcagtgagccaatatcgcgccattgcactccagcttgggcaacaagagcaagactcatctcaaaaaaaaaaaaaagatgcaaaaaaagccaggcttgttggtgcacacctgtagtcccagctacttgggaggctggggtgggaagatcacttgagctcagagggtcaaggcttcagtgagctatgattgtgccactgcactccagcctgggtgacagagtgagaccctgtctcaaaaaaaaaaaaaaaaagattccaagattctgagatgcagcgagtctagtgatcatgaactcgggatctggccctaagatgctgtggtggcggatactctaaggctctatgataataagtcctgagttcacaagttctaagaggcaaaggcagcagggggccaagaactgggccaatccccagttgagattctgtaaatcagagttgaccttcagatgcctggatattaagattcaaaatccatgaatattatatcttgagtccaaaattctgggaggccaaggtactgttgtttcctctaggagttttcttttttttgagacaaggtcttgctctgttacccaagctggagtgcagtggtgtgatcatggctcactgcagccttgacttcctgggctcaagggagtctcccacctcaccctcccaagtagctgggaccaccggcatggaccaccatgccaggctaatttttaaaatttctgtagagacagggtctcactatgttgttgtattagcccgttctcatgctgctataaagaactgcccaagactggataatttataaaggaaagaggcttaattgactcacagttccgcagggctggggaggcatcaggaaacttacaatcattgtggaaggggaagcaaacatgtccttcttcacatggtggtaggaagaagaagtgccaagcaaaagggggaaaagccccttatagaatcatcagatctcttgaggactcactcactatcatgaaaacagcatgagggtaactgcccccatgattaaattacctttcacagggtccctcccatgatacatggggattatgggaactacaattcaaggtgagatttaggtgtggacacagagccaaaccatatcagttgcccaggctggtactgaactgctaggcttcagcaatcctcctgcctcagcctctggagtagctgggaccacaggtgtaagtcaccaggcccagctaatttttagcatttctatagagatgggatctcactgtgttgcccaggcttgcctcaaacgcctgggctcaggtgatctccctccttggtctcccaaattgctgggattacaggcgtgagcctgcgcctggcctcctctaggatttttaaagcatcttatgaatctaaaaacttctcacattcaggattccacaaactaggtatccttcaggcttgagattctgcttctgcgatggatcccagggaatatccaaggacctatttgctgcccttgggtgtcgctgggcaggactctgcctgcatcccccaccccccaatttctacgtcctgcaccctacccccacccccagcaagcctggctaggtctctgctccgccaggaccctggatgaccgtcccctgcccccaggtcagacagccctgcacatcgccattgagcgtcgctgcaaacactacgtggaacttctcgtggcccagggagctgatgtccacgcccaggcccgtgggcgcttcttccagcccaaggatgaggggggctacttctactttggtaaggaggggcctggtgggggctgacagcatgctggagaagcatggcgggagatagcatgatactggttggtgtctgcagccctgaccatcacccagacacccagggccactctggccatgagcgcaggcagcactctggaccacaggctgcacgttggtcttggtcacagggccgttgcctctgaggtgtaagtgccatggggagtaccatggacctggattcagatcctcactccagccaggcacggtgtctcacacctgtcatcccagcactttgggaggtcaaggcaggaggatcgcttgagggcaggagtttgagaccagcctaggcaacatagcaataccctgtctcttttaaacatttaaaaaatggctgggcacggtggctcatgcctgtaatcccagcactttgggaggatgaggcaggtggatcacctgaggtcaagagttcaagaccagcctggccaacaagatggtgaaacccatctctacaaaaataacaaaaattagccgggcatggtggtgggtgcctgtaatcccagctacttgggaggctgaggcaggagaattgcttgaacctgggggacagaggttgcaatgagccgagatttccccattgcactccagcttgggtgacagagtgagactctgtctcaaaaaataaataaataaataaataaataaataagttagatggcatggtggcatgtgcttgaagtcccagctgcttgggaggccgaggctggaggatcacttgaacctaggagttcgaggctgcagtaagccatgattgcaccactgcactccagcctggaaaatagagcaagaccccgtctttaaaaagcaaaaagaaaagaacaaaaaaaaagccaaatcctcactctgcactttccaggcatgtgacctcacttccctgagcctcaccttccccagctgtgcagtggggatcacgagaggcccttgggctgtgatgtcagcgcccagctctgtattgtctgtgtgctttaatctggtttatgctgggaccaacagccccatcaccaggcccaaagcccaccactgccgttgtcatcactggactcatgaaatattttgaattttgcccctgcttaaaggcattcattatgtgcagctcagggacaaagtcacacaaagaattccatcatcagctgggcgcggtggctcacgcctgtaatcccagcactttgggaggccgaggtcggcggatcacttgaggtcaggagtttgagaccagcctggccaacatggcgaaatcctgcctctactaaaaatacaaaaattagccaggtgtggtggcgtgcgcctgtaatcccagctactcggctgaggcacaagaactgcttgcacccgggaggtggaggttgcaatgagccgagattgtgccactgcactccagcctaggcgacagagtgagactttgtctcaaaaaaaaaaaaaaaaagaattccatcattggatgtgtccagtccctcacagcctccaaatcgcgtggctgtgcccttaactagccacaccccatctccctggcatcacccagagaaacgtgcagttcatatccactgctggtgctgtctccgtcattatcctcagagcgccacggtgtccgtcccccgagtgtctgcaggcagagtcccaccctgggcccccttcgctgacctcccacccttcaccctggcccgcaggggagctgcccctgtcgctggctgcctgcaccaaccagccccacattgtcaactacctgacggagaacccccacaagaaggcggacatgcggcgccaggactcgcgaggcaacacagtgctgcatgcgctggtggccattgctgacaacacccgtgagaacaccaagtttgttaccaagatgtacgacctgctgctgctcaagtgtgcccgcctcttccccgacagcaacctggaggccgtgctcaacaacgacggcctctcgcccctcatgatggctgccaagacgggcaagattggggtgagtgtgcggctgggggcacagctgatccacctactcgtacccctctgcacacacacacgagggtctgctgctggtattcattattaatacgtgcatgcacctcccaacatgccaaccccagtgtgcagatgtcccagctcaagaacctgctatggctccctagtgtccagccaagctccttagcttcatccccgagcctctcgcctcatgtcaccctactggatgttcaccactccacccccaccagccaggatgagccactgataagaaactgagtccccgggccctagcccagcggtgctcccagcctcaaacctgttgaatggccctgccccagttccttcccttttctgggccgcgcagcatggggcctggagaagggtttctcaacttcagcatgattattttgggcggcaggctctttgtggtggggaccgtcttgtgctattgccagacattgatctgcatcccgggcctctacccaccagatgccaggaacacctccccttacacttgtgaccaccaaaaatatctccagaacattgctgaattgtcctctggggggcaccatcgctggattgggaaccaagtctggagtatgctagaggcaggagcacctgtccaagccctggcgctaccacttcccagtgtgtgacctcagacatctcatttcccttttctgtgcctcagtttccttgtctgtaaaatggggatataagagtgtcctctggtgtggtgttgtgacaaatgcggtgatccacataaggctcttaggaaggagcctgggagaagcagtaagtgtcacttacatgtctgtaatgccagctagttgggaggctgaggtgagaggatcgtttaagtccagcctggattatttgagatcccaaataaataaaaaccaaaataaaaaaaaatgtagcaaaaattactaaaattgcaattataccatggccctgaggcagtagaaaggctccagtttaaatcctggctttggctaggctcagtggctcgtgtctgtaatcctagcactttgggaggctgaggtgggaggagcacttgagcccaggaggttgaggctgcaatgagctgtgatagtgccattgcactccagcctgggcaacagagccagaccctgtctcaaaaaaccccaaaatcctggctgtgcacagtggctcatgcctgtaatcccagcactttgggaggccgaggtgggcggatcacctgaggtcaggagttcaagaccagcctggccaacatggtgaaaccccgtctctactaaaaatacaaaaatattagctgggtgtgatagtgggcacctgtaatcccagctactcaggaggctgaggcaggagaattgcttgaacctaggaggagagggttgcagtgtgctgagatcgcgccactgcactccagcctgggtgacagagagagactctgtctcaaaacaaaaaccccaaaatcctaacattgcctgaccttgggcaattcccacccctctctgtgcctccgcttccctgtgtgtaagccagggaaggaggagtggtaacaggaaggaccgcatgtgatcgtcagtattataattcacatgtcattaagatggattcattgctattttaacggcatgaagaagatattcattacaattaagatgttgaaggctcatccaggttctgtctggctccagctgactggttaagtggcttctggaacacccttcgtttttcccagcctccattctttatctgtaaaccaagataataagagcaagaattaaacaagatgaggaaagggtcctccagcagccggtgcttagctgttttctggggaggcgtcatgtgctgagctgggcccagccctgggggtctttccagtgtgagccccctgaccctcctggccccctgtgcagatctttcagcacatcatccggcgggaggtgacggatgaggacacacggcacctgtcccgcaagttcaaggactgggcctatgggccagtgtattcctcgctttatgacctctcctccctggacacgtgtggggaagaggcctccgtgctggagatcctggtgtacaacagcaagattgaggtgggctccaggagggggcatggggtgtgaggaaggaggggcagggctgggagtagggacagggccctggggctgggctgggggagacagccccagcctctaggacccaacgtggtgggtctgttggctgaatgcaagagaaggtgccaactaagtgcccagaacagtgtctgccatgtgaggaaatgagcaagacttgtgggaagatggacttttggggcaggtaggactgggttgggatcctggctctgtaacttacatgctgtgtgtctcaggacaagtggctccacctctctgggtctcagcttcttcatttgtaacctggggataaggatcatggatatcccatggggttcttgggaggaccaaagaggttaattttagaatggcttggcacagagtaaacattatgtcagcttttactactcatggttgttatatgaacttttgaaagctcttttttttcggtcaggcatggtggcttatgcctgtaattctagcattttggggagccaaggtgggcggattgcttgaagccaggagtttgagactagcctgggcaatatggcgaaaccccgtctctaccaaaaaaaaataataaaaatgaaaattagctaggcatggtggtgcgagcctgtagtcccagctacttgggaggcgaggtgggaggatcacctgagcctggggaggtcgaggcttcagtgagccgagatcatgccactgcactccagcctgggtgacagagtgagatcctgtctcaaaataaacaaacaaacaaacaaacaaaaaaccaagcttttttttccctacttagcagtattttgtgaacgtcgttctgtacttttaaatattctttggtaatattgtcgctgcatgtaaacataccatattcaaatgaactgttctcttattgctggtcgcttgggtttgtttctgcctttatcaggaataacactataagagcatctctgtggctgctttattgcacaaatcatgattatagagaaactcaagttaataaagggctaggaagctataaaaatggagcagaaaatgctggggactgggtgcaggtggtcttccttctagccctgccctgtggcttactggtctgtgagcttggcttccttgcaagacctcatttccctcattttttgaattagtgaccatcttgatttaaattagtggtggcaggaggtttagcatctcaggtgcaaactgattgattagtagtgtctacccagggaactgtatgaatacaattgtgcagggctcaattattgatgtctgccctgggttcagaattggagaattgtggtgagtcaatcatttatcatctttgggcaaaatttctcaatctttctctctgaatcagaatttctgagagcggaggccaggatttatacttgcagcaagttacataaattattttgcggccagcagcttggtactatccacagattggagtttgggaaccatgagaataaatgtctttttttcttttttgagatggagtctcactcttgttgcccaggctggagtgcagtagtgcgatctaggctcactgcaatctccgcctcccaggttcaagtgattctcctgcctcagccttaggagtagctgggattacaggtgtgcaccaccacgcccggctaattgttgtgtttttagtggagacagggtttcaccacattggccaggctgatcttgaactgctgaccttaggtgatccgcctgtcttggcctcccaaagtgctaggattacaggcatgagccactgcggccggcctgaaaataaatgtcttttaagggactttccagttccgagttctgtgatgctagaatagggtggaaaggtacattgaggcagaattgggcagctgaatccattcatgaatccgtgaatgcagctgaggaatggatggaaagagaaagcgctgtccgggtggagggtgggggaaggcacacccgaggcagcctgcctggaccccccacccatctcaggaaggcagcccccgaccaccctgcctctcttagaaccgccacgagatgctggctgtggagcccatcaatgaactgctgcgggacaagtggcgcaagttcggggccgtctccttctacatcaacgtggtctcctacctgtgtgccatggtcatcttcactctcaccgcctactaccagccgctggagggcacagtgagtgcccggggaccgggcaggggctggggcaggcactgggctgagccatgcaggactggggcacaacctcatccttctgggtcccctgtagggggacccggagaaggtttaggaacaggttggggaggcgccctccagcatccacgggtggccctgagctgggaggaggaagactcaggaggaagagagtgaaggaggaggctccatgggatgccgatgtttcgggcctgggggaacatctggattgggggccagatgttggaggggctgggtgacgacctgtgtgcccttgctgctccccagccgccgtacccttaccgcaccacggtggactacctgcggctggctggcgaggtcattacgctcttcactggggtcctgttcttcttcaccaacgtaagtgcctggcccccgtgccccccaccctgcctgccctcctcttctcttcctgcacctcttttctctccctctttttctcttctctctcctccaaatggtccttctcctttccttcctccttttattttcccatttctcttctacctcctccaatcccacgttctccatctctgcttttttctccttttctaacaggaaagagtcctttgtcttttctctgtaccagcctctgcctccctctcttctatccctttctctgtctcctctctcctcctctcctctcctgctggccccacccctttcacgtgccccctcctgtcttccagatcaaagacttgttcatgaagaaatgccctggagtgaattctctcttcattgatggctccttccagctgctctagtgagtagaggtccctgggccggcagcttctgggtgaggaaggtgggtttgggctgctaggtcgtccagattcaggagagaggtgattctgttagaaatgaatgcacccaacctgggcagctctaacccaaagtcaggacaaagccacaaacaatagggtcttctggttcaagaaaaattctgattgctagggagttatcatatacaacatggatagaaataattttaacctcttatgctggtgaatgattgctaatgtctgcctgaagtgccatgttaagaattttgcacctgtgtctgtgtttagtgggaaagagttgggattgattaatgatgtctgcctgggacagagaatgagagagttactgagtgtgtgttacctctttcacatttcccttagagttggagaatgatgaaattcacttagccacaaaatctccactgaacaccactaaatctttctttagcaattccaaggggcatcacttcaggatcctgtgggacctcaggattaattgccagctaattgaatgttcttgttaacagaatgctggggaaccctgctaatccactttgtttcttttctgggggtctagaaggcattgggaagtcctgataccctggagggcttggaggcgtgtcttcccctccagagcctcattgtcccctctcccctctggcctctcttgtggtctctgctgcactgcagcttcatctactctgtcctggtgatcgtctcagcagccctctacctggcagggatcgaggcctacctggccgtgatggtctttgccctggtcctgggctggatgaatgccctttacttcacccgtgggctgaagctgacggggacctatagcatcatgatccagaaggtacgggctgggaggaccctctggactcgtgtgttcctggagggagtcacacacacaccacatgcacacttatgcacctgcagacctgaggatgctgggtaccgtgggggcaggaggcatggtctggacactggggtgggaccagggtggagatggaggaatggggaaagtgagaaaccatgtgtctcctctttgcctccataatcccgctggggtctttagattctcttcaaggaccttttccgattcctgctcgtctacttgctcttcatgatcggctacgcttcaggtgagctctgggtgctcaggtggtcctggcaggggtggtgcaaggacgggaacagtagccatgatgtataggggacaatagcagccttgctgagttcttttttttttttttttttttttgaggtggagttttgctcctgttgcccgggctggagtgcaatggcacaatctcagctcactgtaacctccacctcccaggttcaagtaattctgcctcagcctcccacgtagttgggattacgggctcctgccaccacgccccactattttttaatttttttttttttgtatttttagtagagatggggtttcaccatgttggccatgctggtcttgaactcctgacctcaggtgatccaccctccttggcctcccaaaatggtgggattacaggtgtgagccaacgcgcctggccactgagttcttatttgtgtgccaggcaccagactaagtacgtttccatccttgcctcccaacaagcctgtaagctaagtgcctttattatcccctattatagaaaaggaaactgaggcttaggagggttaaataactagcacaagttcaaaagccagtgaatggtggccgggcgcagtggctcacatctgtaatcccagcacttcaggaggctgaggcgggtagatcacttgaggtcaggagtttgagaccagcctggccaacatggcaaaaccccgtctctaccaaaaaatacaaaaattagacaggcatggtggcgcgcaactatagacccagctactcgggaggctgaggcacaagaatcgcttgaacccagggggtggaggttgcagtaagccaagatggcaccactgcactccagcctgggcaacacagcgagactctgtctcaaaaaaaaaaaaaaaaaaaaagctggtgaatggcaaaactggagtattagctattgctacaaaggaagccacctaaagtggggcttaaaatagcacccacttattattattattttttttgtggcaaggtctcactctgtcaccaaggctggagggcagtggtgctcttggctcactgcaatctctgcctcctgggttcaagcgattctcttgcctcagcctctcgaatagctgggattacaggcgtgtgccaccacgcatggctaagttttatatttttggtagagatggggtttcactatgttggccaggctggtctcgaactcctgaccccaagtgatccacccaccttggcctcccaaagtgctgggattacaggcgtgagccactgtaccaggccaacttactattgcttatgagtcaatgggtcagctgggtggctgtgctgccctgggccaggtttggctgatccctacaggctcttgtgcctgtggtcagctggcaggctggctgctggctgactggtctagctagtatggacttggttagagggggtttgctatctatcttccacatggtcactcatttctggacagctagcttgggcttgtccacatggtggccttagggttccaagaacatgagcagaagtgttcaaggacacctcctggcatggcatcactgctgccttactctgttggccaaagcaagtcacaaggccagcctcgattcaagggatggggaaatagacgccacttctttttttccattttttttttttggtggaggcagggtcttgctatgttgcccaggctggtcttgaactcctgggctcaagcagtcctcctgcctcagcctcccaaagtgcaggattataggcgcgagccactgcacctggcctagactccacttcttagtgggagaagctgtaaagccacattgaaggaggatggatacatggaaggataaaatttaataattaaactagcagcccaggtattttcttaaagcccaacatcagctcccttgatataccttcttcgtgatgtcatgatgccactaagaagcattctgggacctcagtggcatgggtcatgggagaaggaccagggaccagggctggagaaactgaccaagtccttgggctgatccccgaggtgtgggtaatctgacatcaatgcccagcatccaaaggggaatggccaactcaggttagacctggacacatacacatctgagcaggttcatctggggacgagcctggcacaggaatctgacaagggtgatattttaacccacgatagtggccaagtctctaggtagattattggtgggaagtggaattgtagttttcactggggagatagggacagggtacagctttcccttcccagggatcacactggacaaactagacagtgtcaagggttcaacaacagtttgggattcaggtcagggatctagccctactgcagtcctagttattgaaactaaggagaaacaagggttagagtagcagcttagcagtcagcttggttgcaggtcttctccttataggatgcactagatctcaattctgaggctgacatgacataaacaggacacacatgcttctgttcccacactttggtgtccatagcagacatcactaatggatcacagaacagtttttccggtgagtccagacaaggtctcagaatccttctcaacacagtgtttcaccaggtactatacaactgaagaacattagcatatgagttgaaatctgcatactctaatccctggttgcaggcagtatgacattctgtgccccactgactgatgggactgagtcttcttcatgctcccctccctggctggtttagggacaggttgttgctgccaaactgtgttgagaaggaatctgaagctccacctgggcttagtaggaaaggagaaccatgatgagtttgagatgtctagagcaggagaggccccttagagaacacggctttggggacagtcaggactgatgcctggtttcagcccccacttttcctctctgggttggggtggagtgggaaactgtcagagagagagtctacccctgcgaataggggcattccagagcccccaagacctctaagaatggtaggccgcattaggatttcccaacactattgacatttgagaccagatcattcttcgtggcggggaccatcctgtgcattgtagggtgtcaggcagcacccctggcctccacccacctgatgccagtagcacccccacccccagttgtaacaaccaaatatgtctctagacattgtcaaatgtcccctggtgggaaaaactgagaccctccctggactagatcctgaaaaccttttccctcccggtagcagggaaccaccaggttgtgtaaggaggggtgaactgtcccaggttggaaacagagcaggtcaaaactcctacgcttatcagtagtgggattgagcctgtgagtagccactgcactccagcctgggcaacatagcaagaccccatctcagaaagaaagagagagagagagagataacctcttccttatcagcaagagtttatggaaaggcttcaaaggttttgggatcaggaggacctgggtctggtgtggcttggctgatgtgtagggtgacatgggtcagcgtgtgggccagcgtgctccgctcactaggcctcagctttctcctccagcaaatgagaatgacaccctccacctctctgtgggtgtgctcacactcagtgagtgccacccctatcctcccacagccctggtctccctcctgaacccgtgtgccaacatgaaggtgtgcaatgaggaccagaccaactgcacagtgcccacttacccctcgtgccgtgacagcgagaccttcagcaccttcctcctggacctgtttaagctgaccatcggcatgggcgacctggagatgctgagcagcaccaagtaccccgtggtcttcatcatcctgctggtgacctacatcatcctcacctttgtgctgctcctcaacatgctcattgccctcatgggcgagacagtgggccaggtctccaaggagagcaagcacatctggaagctgcaggtgaggccccagggcccccagccccactctaccagccaccctcgtccttccgaggagacccacccgactggcttcctcggccttccactctgagcaagcagtgtcttctcattctccctccacttctctgtcggtaaaatgggcatcagaggctgctgctgacttcccagagctgcctagtgaattttgaggtggcttcttgcctggctgccagcagtgggctcagattctccttgtggtccagctcacaggacacagtcggctccacctagcatgactgagtgacttctgccggctcagaaagtgctccgtgggcatcagcgtttcagcaggggtcccacgctgagcccaggggcagcttttgtgctctagcactccagcacagggatgtcagcattctcatgggggtctttttctagcaactgtgagcatgcttcctagaggagaaaccaatggggacaggggccgccttggcccggggagctgcagaaagtttttacttaccaaaagctttctatgcaatcctggaaagaacaggccctgggatcacagccctcccaggccaggtgcagcctacaaacctggtgtcctaataaacagtgctgccccacggcccaggaatacagcacccgtgtttaccttgactgtgcatttcaggaaaatggtgcagtgagaaaaaagggcccaaggttgtcctcccaggactgggtctgagggaaacagctctggcctgctcttaacctttatctatattgcttacttcattgggcctcagtttccccactgggcattactcacaggatgcaaactgggcatcctgtgggctggagtgcaatggtgtgatcttggctcactgcaacctctgcctcccaggctcaagtgattctctgtcctcagcctcccgagtagctggggctaaggtgtgcaccacctcacccggctaatttttgtattttttgtaaagatggggtttcaccatgttgcccaggctggtcttgaacttctgagttcaagctatccacctgccttggcctcctaaagtgctgagattgcaggtgtgagccactgcacccagcatcagaccattatattaaaaacaacaacaacaacaaaaaactgcaaaatttaaaaattaagagattccctatgaaaacccagatttctggcttttcttgaaaagttggaagctccaggcagtgcagggtccggattcctgcctggcagccctcaggtggggtgagtggcagctgcccccttacacgtgggcatttgctccctgttctccccagtctctacccctccctcactgagaggcaactgctgtgtaagtgtgatagggcttgggcggcagcctttctgcacctgatcctgtttcacccatttgttttcctgcctgccacctgtgggtatttgagtttataaaccctgtgtctagtggggagtaggagtctaaatgcctagttctgggcccaccctggcccgttgtctcatttctgccaccagagcggcaggcgcaggctgtgaggctcaccgatgtccctcctgaccctccctccccgcagtgggccaccaccatcctggacattgagcgctccttccccgtattcctgaggaaggccttccgctctggggagatggtcaccgtgggcaagagctcggacggcactcctgaccgcaggtggtgcttcaggtgaggctggggcagtggggccaggatggcagggcggaactgtccccactggctcggggcccctgctgctccagcgtcgtctacccattgcaatttctggagccactgaggccccaagaggcccgagcagagttcatttccaccaggcgatctcaggcaagtcagcccacctctctcagcctcagtttcttcatctgtggaatgagacaatgatctcacgggctcctaggctggcggtgcggattagacaggtcagcacgtgagaagtgctcagccagtgcccgacgcgcatcgggacgccacaggctcccctgttcttgctcagggggaagcagagacttggatggtgggttcattttagagcatcaccctgtatctaccaaacagtggggtgagctctagtgccctcggtgaaatgggaagctgaggaatgtgcagtttccagggctggagacctcacccagcccatctgcagaatgactccgtgttccagaggcacagggagtgccagcttcttaggggaaccccttcatgaatcttttctttccagttgattcattcattgtaaagtggttgtcagcatggagcataagcagaatgtttggagtcagacaaagtcagtttcttcatctgtgaaatgggaacaataatagaacccacctcctaggccatccgatcagttcaattccattttttgtttgtttttagaggcagggttgctcaggctggagtgcagtggtgtgatcatagctgactgcagcctccaactcctggtctcaagcgatcctcccacctcagcctcctcatgccaccatgtccgaccaatttttaatttttttgtagagatggggttcttgctatgttgcccaggctggtctcaaactcctggtctcaagcgatcttcccacctcagcctcccaaaatgctgggattacaggcgtgagccaccacacccagcctctgttcagtttgaatccaaagctcaaatcttggctgggtgtggtggctcgtgcttgtaatcccagcactttgggaggccaaggtgggtggatcacctgaggtcaggagtttgagaccaccctgggcaacatggtgaaaccctgtctccactaaaaatacaaaaattagtcgggagtggtggcatgcacctgtaatcccagctactcgggaggctgaggcaggagaatcgcttgaacctggtaggtggaggttgcagtgagccgagattgcactactgcactccagtctggcggacagagcaagactctgccttaaaacaaacaaacaaaaatgaatagataggataaaaaattaaagataatatgtaaaaaaaaaagataatatataaaaaaatgagtggataaacaaaatgtgggctatgtgtacagtgaaatattatctgggccaggcgtggtgactgtaataccaacactttgggaagcgaggcaagaggattgcttgagcccaggagttcaagaccaacatagtgaaaccccatctctacaaaacgtttttaaaaaattagccaggtgtggtggcatatccctgtaatcccagctacatggggggctgaagtgggcggatcacttgagcctgggaggtcaaggttgcagtgagctgtgatcgtgccactgcaccctagcctgggcaatggagtgagaccctgtctcaaaagaaggttaaaaaaaataatttctgcttgggggaatggaagaattttggaaatagatagctgtgatggtcacacaatgtggatgtgcttaatgccactgaattgtatactcaaaaatgattaagatggcaaattttttgtgtgtgtatacacacacacacacacacacacacacacgtctttttttttttttttttgagatggagtcttgctttgtcccccaggttggagtgcagtggcgtgatctcggctcactgcaactgcctcccaggttcaagtgattttcctgcctcagcctctcgggtcactgggactataggcacccgccaccatgccccgctaattttttttttaattttttttaatttttagtagaggtggggtttcaccatgttggccaggctggtctcgaactcctgacctcaaatgacccacccacctcggcctcccaaagtgctgggattgcaggcatgagccaccacgcccagccttgttatgtatatgttaccataataaaaaaataggagggtgtgctggggatggtggcatggagagcgtctctgaggggttccccatgaccctctgcttgggccctgccagggtggatgaggtgaactggtctcactggaaccagaacttgggcatcatcaacgaggacccgggcaagaatgagacctaccagtattatggcttctcgcataccgtgggccgcctccgcaggggtgagtggaggggcgggtgcggaggggagccccagtccattctcatcacgaatttgctttgagcagtcctgcttctttccgggactcagtgtccgtgtctacagaatgagagagtgtgcccctgagcttcctctgctgcttgtgaatgcctggggcacctcacctacgtggcttcatcctggccctccctactgttgacataagctggcctggggagggaggacgagctcctcagccatccctgtgtggagaaaaccttcctgtttgtccagtaagccatgagcacgcgagacgcagctggagaggacacaggcactcagggcattcggctccaggcttgaatcctggttcctccattctctcctggggaggcaccttgacctctcttgagccccagtttccacctctgtaaaatgagcatagtcacatccccccttcagaacactgtggagtgcccagtacacagtaggcactcaatatacgcacgctctctctccaccaacccccacccctccctctgatgtgctctcggtgcagatcgctggtcctcggtggtaccccgcgtggtggaactgaacaagaactcgaacccggacgaggtggtggtgcctctggacagcatggggaacccccgctgcgatggccaccagcagggttacccccgcaagtggaggactgatgacgccccgctctagggactgcagcccagccccagcttctctgcccactcatttctagtccagccgcatttcagcagtgccttctggggtgtccccccacaccctgctttggccccagaggcgagggaccagtggaggtgccagggaggccccaggaccctgtggtcccctggctctgcctccccaccctggggtgggggctcccggccacctgtcttgctcctatggagtcacataagccaacgccagagcccctccacctcaggccccagcccctgcctctccattatttatttgctctgctctcaggaagcgacgtgacccctgccccagctggaacctggcagaggccttaggaccccgttccaagtgcactgcccggccaagccccagcctcagcctgcgcctgagctgcatgcgccaccatttttggcagcgtggcagctttgcaaggggctggggccctcggcgtggggccatgccttctgtgtgttctgtagtgtctgggatttgccggtgctcaataaatgtttattcattgacggtggaga

SEQ ID NO: 15867 - DNA, 31176 bp, Homo sapiens
atggcggattccagcgaaggcccccgcgcggggcccggggaggtggctgagctccccggggatgagagtggcaccccaggtggggaggcttttcctctctcctccctggccaatctgtttgagggggaggatggctccctttcgccctcaccggctgatgccagtcgccctgctggcccaggcgatgggcgaccaaatctgcgcatgaagttccagggcgccttccgcaagggggtgcccaaccccatcgatctgctggagtccaccctatatgagtcctcggtggtgcctgggcccaagaaagcacccatggactcactgtttgactacggcacctatcgtcaccactccagtgacaacaagaggtggaggaagaagatcatagagtgagtattgttagcttcctggcctgtggtctcctcctctgtatccattcacccattcatcatccacccctctatctattatccacccatccgtcgattcatccatccatccatctgtccatccaaccatccatacatctatccatccatctattcatctccctatccatatatcatccgtccatccatccatccaaccacccatctattcgtccatccatccaaccatccacacatctatccatcaatccattcatctctccatctctatatcctccatccatccatccaaccatccatacatctatccatcgatccattcatctctccatccatatatcatccatccatatatcatccatccatacatccatccatcatccagccatctatcatctatccatctatccaaccatccatcatccatcatccatccattcatctattcatttatacatcatccttccatctgtccatctattcatctatccatcattattccatctgtccatctatctactatccatccatctatccatctacccatcatccatccatccattcatccatcatccttccatctgtccatctactcgtctattcatcattccatatgtccatctatccattaatctatccatccatccatatatcatctatctatccacccatcatccatccatccatctacccatctatccatcatccatccatctattcatcatccatctatctattaatccatcatccattactctacccatttacccctctgtccacccttccataggacatttgtctgttcatccattcatccatccacccactcatttatacaatgcatccatccacccactcatttatacaaatgcaaatgcatttatacaaatgcaaactcagccatttacccatttacccattcacccttccacccactcatttatacaactatttactcatctaactctccattcattcatctgctttttttttctttttgagatggagtcttgctctgttgcccaggctggagtgcaatggcatgatctcggctcactgaaacctccacctcctgggttcaagcaattctccagtctcagcctcccgagtagcgggattacaggcacccgccaccacacccagctaattttttttgtatttttagtagagacaggttttcaccatcttggccaggctggtcttgaactcctgacctcgtgatccacctgccttggcctcccaaagtgctgggattataggtgtgagccaccgcatcccgcctcatctttttttattcacctacatatccacgtactcatctgtcccccattaatctacttgtctgtccatctcttcacctacacatccagccttccatttgtttatcttcttatttatacatctgttcatccatccatccatccatccatttatccatctatcatctactcattcatttacccatctttacacttttttgtccacctatccaatctatagatccattgtccactcattaaaatatctatctactcatctacccatctgtcagccatctgtccagccatacacccatataaccaaccttccattcatctaccattttctcatctgaatgtcatttcatcttctcacctacccactgtttctagtcatctagccattcagctatcaaactattcatcattcattcatttattcattcattcattccatttctcatgcttgattgctcacctgcctgctgtccttctttccttcctctccttctctcttctaaccaccaattcattcacccagatctctgtccatccatttgtccattcactcttttgtttgcttagtcactgactcatttattcatttgctcatcttttcttccatttttgcatctattcatccatccatctccctaccttctcttcctggcacacatccagctgcccctcctgggtcttcttcaatcatcacctccattcctggccatccagtggctttcctgaggcttagaaagagctggaaaccccaaggcattcaaccttctttcccataatgacagccttgctgaaagaaaagacagactggagagaagccctggatggggccacagcatgtggcccctatgacgcattccatgccaggcctagctggggacagggagcctccagcccccttgaccaccttgtctggtccccatcctcccccagtgtgttatgctggcatctgcatgtggtttgtgtggcactctgcaaactcagacatcccgggttctgtttccagcatgactctattgtctgtcacctgcagactccctgctttgtgaggttgagccctccctcctggtcctttaggaagcccagggacttccacaagcttttggcagtttggaggagggagcagggcttgcagtctcctagccagctcctcctgagcctcagcaggccctgctgaactgtatcctttctatgtcccggccctgctgtccctaatgtgccctgaattgaccctttcctcaactgctccatgaaatctcctctcggtggcctgtgtgtgtgtcctggaggatggtgctgaggtctggagatgacctggacttgcgtgtcctcctctgtccccctgctggccacagattcatttatctcttggatggagccgattcaccttcacagcccttgcttggtcaagagccgccccctttatttattcacagtcattgattcattcagatgtctctttttcttttttttttttttgagacaggttctttctctgccactcaggctggagtgcagtggcgctatcttggcttactgcaacctccacctcccaggttcaagcaattctccagcctcagcctcctgggtagctggagctacaggtgtgcacgaccacaaccggctaatttttgtatttttagtagagacagggttttaccatgttggccaggctagtctcgaactactgtcctcaagtgacctgcccacctcggcctcccaaaatgctgggattacaggcgtgagccaccgcacccagccagtggatgtttcttgggtgcccactgtctgccagtcagtggggttggccctgaggcttcaggctgagccagaccagatccacttctactcaggcggcactttccgtttagagggtgagacagacaagaagcaagtagctgagcacatggatgtgccatgtgagttgggggaggtgctgaagttagagagtgggtggatacaagaaaggtaatccaggagggcttcttggaggagttgacatttaagcccaaagctaaaggtcatgaaggggcagtcacagagagggagggaagggtgttgtaggtggagagaagtgtgagtgcaagggcctaaggctggagaggctctgcagatgtcgccaaggaatagggcctcacagttgtctgtgctgaaaaatctgtacaacctctgctcagaggtggaaactaagggccagagcagcagagtgcccagtgttcccatccttctgtccccaagccttcccaggtcctgttgaaagctggtgggctctgtatctcccattcccctcccgcaagccctcctccccacccctaccccaggaagtccaggctggtggagtaagtggggcacggctgagccctgaaggctgcctcagtgagatctggtgggggcagtattgctttttattttttggctcaaaggtcaaagttcaggaagaggtaaagtgggggctgcctaagtgccctcattagaggctgtatctgtgcctgtgcccctgtcaacaggagagcacgtcttaccctactgtggatgctaatgatcccctttgccagtacctgccctgagatggaaaatctcaacccctggcgaagaggaagggaggagagtggctgtccccttctcatggcaagacaggctgggtacagccagatgccagctttgtccacccttgcaaccccgtcccacctgcttccacaacctgccctggcctcagtttccccaactgcattccccttcccctctggccctgctgcctcttgttagggttttctctgttcccctactctcccctcttctccctcccagaccctgtgcctccatcttcctccttctctttagtctcttattcattgaacagagtcttactgcatcccaagatgtgccaggcactgggccaggtaagaatgtgacagagagagcattcctgcctcatggtggccctgggctagctctttctctctcagaacctagcacataataggtgccgaaataatgtttgttgaatgactgaatgagtgtctccaagccctccagctcttagtgtctgtttccttcctttctctctctatctcttctcttcccagccctctctgtgccacacccttccgccatctgcctctgtagccccacatctctcccatgcacatacaagctccagacacacagtaggcactcattaataatggtaatatcaactaacatttattgaatgtttaccgtgtggtgggccatgggcaggtacatatgagcatggcctcatttgtctcaaatgtttgttgaatgaataaattaatgggttagttatggaatgaatggatgaaatgcctcatcttttagtctgctgtttctttattttatctttgtttttgtctctttcagtttctctgccttagtaagtactcaataaatgactaatatatgagtgggtgggtgagtggatgggcagttggatggatggatggatggatggatggatggatgggtgggtgggtggataggcagatggatggatagacgagtgatggatggatggatggatggatgggtgagtggatggatgggcagatgggtggatggatgagtgggtggatggatggatgagtagtggatggatgggtggacagatggaggagtgagtggatgggtagatgaatggatgagtgatggatggatggatggatggatgagtgggtggatggatggatggatcagtgagggatggatggatggatgagtgatggatggatgaatgggtggatggatgatgggtgggtaggtggatgggtggatgctgggtgggtggatgtatggatgagggatggatggatggatgggcgggtaggtggatggatggatgggcgggtagttagatgggtggatgaatggatggatgggtgggtggatgggtagatggatggatgagtgatggacggatggataagtggatggatgggtggatggatggatgagtgatggatggatgagtgatgaatggatggatgggtgggtaggtggatgggtgaatggtgggtgggtggatggatggatggatgagtgggcagatggatggatgagtgatggatggatggatggatgggtgggtggatgggtagatggatggatggatgagtgatggatggatggatgggtgagtggatgggtagatggatggatggatggatgaatgatggatggatgggtggatagatggaggagtgggtggatgggtagatggatggatgagtgatggttggatggatagatgggtggatgggtagatggatggatggatggatgagtgatggatggatgggtggatagatggatgagtgggtggataggtagatggatagatgagtgatggatggatggatggatagatggatgggtcggtgagtggatgtgtggatggatgggtggatagatgtatgggcagtctgtgcatttctttctgtttgtctccacccaacacacagtaggtactagctatagtttgttggataaaacattacttagtttttacatctgccccaactacctcaccctgttccttgtaaggcttcagctgcctgcccgccaccacagtctctgggtccctaaggccagggacagtggggcaggcaggggatgagccctcccatcaacttgcctccctacctcctccaggaagcagccgcagagccccaaagcccctgcccctcagccgccccccatcctcaaagtcttcaaccggcctatcctctttgacatcgtgtcccggggctccactgctgacctggacgggctgctcccattcttgctgacccacaagaaacgcctaactgatgaggagtttcgaggtgagccacccagatgggcatagccagtgggacagccaggggtgtgggggaagcctggcattgggggccccctttcccctcagcttctttctttgggtcggtggactgcattggcctggaaagtgcactggacagggagtctggtcctgtgtgtccttcaccatgttacttaacctctctgtgcctcagctacctccatttattcattctttcattcattcagcccttatgtatgaaaaggttagtgtagtgggtaagcagagtccacctacctgggttcagattctacctttaccagttaagcgatgtgtgacctctctgagcctccgtttcctcatctgtaaactggggaataatcatagcatactcctggctctcatcccacagagagcccagcgcaggcagctggagtcctggagctcctgctcccctgagggaaggtctggagggatgggcaggtgtctgggctggtagtcctgattctacttcttggggtctgctccaccccagcctagctttagggctccacttcctaggctgaagccccagcccagagagctaacccttcagccttgtccagattcaaaacacccacctcaggacaccggcaccctccacagccccaggccttacctgtgaacacctgcacccaaatcagccacctgcaatgtgctgggttctgggtaagccattattaaactggccgtgatctcacaagtcaagataccatgtcaagaagtgtgacaccaaggctgggcatggtggctcacacctgtaatcccagcactttgggaggccaaggcaggagggttgcatgagcctgggaggctcaggctgcagtgagctgtgatcatgccactgcactccagcctgggtgacagacaggaaaaaaaaaaaaaaaagaattgtgatacctgctatgaagaagggcccatcttggaaggcggaccatggttggtctacagcctaagtctgaggaggcttcagggatgtcagaagaggcttttttttttttttttgagacagagtttcattcttgttgcccaggctggagtgcaatggcatgatctctgctcactgcaacctccgcctcctgggttcaagtgattctcctgcctcagcctcccaagtagctgggattacaggcatgcgccaccacgcccggctaattttgtatttttagtagagacggggtcgctccatgttggtcaggttggtcttgaactctcgacctcaggtgatctgcccgccttggcctcccgaagtgctgggattataggcatgagccactgtgcccagccagaagaggacattttttaagacttcagttactttaagtaaattaagttcccaaacagggtgaacaagtctgtgctacatcatccacatatacctttatcaacctgttttttttttttttttcttttttttttttgagatagggtctcattctgtcacccaggctggaatgctgtggtgtgatcacagctccctgcagccttgaacttctggcctcaagcaatcctcctgcttcggcctcgagagtagttgggactacaggtgcaagctaccatgcctggctaaatttttttttttctttttttttaagagacaggtctcactatgttgcccaggctggtatcaaactcctggcttcaagcgatcctcctgcctcaacctcccaaagtgctgggattacaggcatgagccactgaggctggcctcaacctcattcttaccctgaaacaatacgatgcagtatcattgtgtccatcaggagacaattactggggccgggtgcggtggctcatgcctataatcccagcactttgggaggctgaggcgggtggatcacctaaggtcaggagtttgagaccagccttgccaacatggtaaaaacctgtctctactaaaaatacaaaaaaaaaaaaaaaaaagccaggcttagtggcacacacctgtaatttcagctacttaggaagctgagccaggagaatcacttgaacctgggaggtgggggttgcagtgagccgagattgcaccactgcactccagcctgggcgaaagagcgagactctgtctcaaaaaaaaaaagaaaatacaattgctggatttatgaaaaatattcattcatggttcctggccacgcgacgtggcctcgtttggaggcacaagtttagagctgtgggaggacggggcttctctctgctcctggagtagctcagtgatggcatgagtaatctcattcggagataacccatgtttaagccctggccaaatggcctctcctggtccaccaagtacgtgaggcaaaagtgcggaatcttggggtagagcgaatcctgggagatggatgctggcacctgtgccttcagcaccaggctagcttgtcaaggcctctggcttcttctgaattcaggactgagttgggggcttctagcatagtccaggaacccagatgcatgtgtgtctgtgcatgagtgtgggtgggggactctaagataggctttggaggtgggtctctgaaattgcagaggctagcgtatgtgcatagagggagacttactgtgaggtccatgatactaattaagtgccagggcccctggctaaggccctttctgaggtcctcgacctagtctacgtcccacaaaacctggatccgtccctgcatggctaaaaggtcatgagctcatctgattatcagggaagtctgggacgccctcctgtgcccccacctcccctccgcagagtttcacaacctccaatttggcaattgtcaatttagagcccctggctacagcaccccaccctgggcagagccacttcgccacctggtggctggttcctggaactgcatgttccacctcatctctgggaagatgctgctcctgacatcttctcccaggacccaggcgtcccctccctgggtctataacctgtgtctgaaagcccgaatccagggtctctagttccactttgggtcacctatggtttggaattacctggggtgcccagctctcgccttcattcaatgtgtgttaactcagcaaatggttgttgggcacctaccacataccaggcactgtgcttggcagaggccgaatgatagtgagcaaagcagacatcaccctgccctcaaggtgcccacaggctcctggacaggaccatcattgaccaagcaaccacataaataagcacacagttatgaactgtaacaggtgtcaacaaaaggctgtactggaggatttgacctagtcagggaaaatccaggagagcttcctggaggaggtaacacttgagcagagtctgagtgagttgcagttaaccaggtgaaaagaggagggaagaatgtttcagattggggtgggggttcagagacagcaggtgcaaagaccctgtagttcaccgtggtctattgcagtctgaaatgaccattccagctgctatgtggaaagtggataaaggaaggccagagaggctgggggaaatgagggaaataaaggaggtgtcttaggcatgtgagagggatggtggctgggccacattattccatgagaggtttggtgtcgcctctgagctgggcgccaggtggacagcgggaaagcaactgggaacaagacttgtcccaaacaaccctgctcctggaagggctgagactagaattcaggtctcttgagtctgccccactgattcccggcatttagggagacggttcctaaatcccgtctcatggattgataacagcaacagtaatatttatcaaagactgctatctgcctggtactgggctaatcaacaaacactgattagctctttgatttcccttcatagctttaatttagccagaaaggaccctaagcagagaaatggtcatacagctgtggggagcaaagccaggcctcaaacctgaggtgcctggcttcagaacgggcacctgaacccacacctgcgtctcccaccctctggccattcctgagcccctggctgattttgccctgtccttgattcacaggggagttttcaacttactcttttgagatataaatcaactcaggtaaccataaaaatagctacaacagaaagaaacttgcaaagagacatcagcaagcgttagtgagaggtgttaaggacccgctagtaccaaacggagagttgacttcatgagaaagattcgatagtggatgaaaccttcagggttattattgttgcaccccctagaacccccaagattctctcctggatcccctaaggtcagttcacatccactgtggcacacagtcccacactttggggaacgctgcacccctccactcccttctaggggcaccagtgtaaatgcttcatgggaaaaggattcgatgctctgacaggtgggtgaatgctgcctagtgtgtcttgcttttacaggttcacagtccctgttagtgtatgaaaggctctgagaagtcctgtagtaaggaattatgattggctttgtttaacccagcattctaaccatttatttgtttatgaagcactttacataaatcttttcgagggccaggtgtggtggctcacatctgtaatcccagcactttgggaggctgaggtgggaggatcacttgaggccaggtgtttgagaccagcctgggtaacagagtgagatcccttctctacgaaaataaaaattaaaaaattagttgagcatggaggtgcacacctgtagtcttagctgctacttgggaggctgaggtgggaggatcacttgagcccaggaatcggaggctgcaatgagctaggattgcacaactataccccaggctggatgacagagcgagaccctctctctcaaaaaaaaggatattaataaataaaaataaatacaaaatcttcccaaataagattaattaaataaataccaatctgtaggctgaagcctctcacatttcaaagcacctaaccccatgcgtttattgtaccctctcagcaccactggaggcagaaagatagagtggccctgggtccccactggacagatgaggaaacaggcttggagaggagatgttgacagccaggacatctgaccccctacccagtgttctgtaccccgatgcctggaagttcaaggtcatgggctggagcactgcgtcatcttgtgtgtctctcttgctagagccatctacggggaagacctgcctgcccaaggccttgctgaacctgagcaatggccgcaacgacaccatccctgtgctgctggacatcgcggagcgcaccggcaacatgagggagttcattaactcgcccttccgtgacatctactatcgaggtggggccccgggctgggcaggggtgccacgggggctgatggagacgctgtcctttgcttgtctgactcctgagacttttgatctgggcctaagtgccagcatgtacccaggacctgacaaatggatggatggatggatggatggatggatgcatggatgcatggatagatggatggatgaaggaacggtaactaccccttccaactttgtttcgagtttcagaatagaagattccactgggtgcggtggctcttacctgtaatcccagcactttgggaggccaaggggggcagatcgcttgagcccaggagttcaagaccagcatgggcaacatggtgaaatcctgtcttgacaaaagatacaaaaaaaaaaaaataaaataaaagaaggccaggtgcggtggctcacacctgtaatcccagcactttgggaggctgaggtgggcagatcacttgaggtcaggtgttcaagaccagcctggccaacatggtgaaaccctgtctctgctgaaaatgcaaaaattagccaggcgtggtggtgcgcacctataatctcagctacttgggaggctgaggcaggagaatcgcttgaacctgggaggtggaggttgcagtgagccaatatcgcgccattgcactccagcttgggcaacaagagcaagactcatctcaaaaaaaaaaaaaagatgcaaaaaaagccaggcttgttggtgcacacctgtagtcccagctacttgggaggctggggtgggaagatcacttgagctcagagggtcaaggcttcagtgagctatgattgtgccactgcactccagcctgggtgacagagtgagaccctgtctcaaaaaaaaaaaaaaaaagattccaagattctgagatgcagcgagtctagtgatcatgaactcgggatctggccctaagatgctgtggtggcggatactctaaggctctatgataataagtcctgagttcacaagttctaagaggcaaaggcagcagggggccaagaactgggccaatccccagttgagattctgtaaatcagagttgaccttcagatgcctggatattaagattcaaaatccatgaatattatatcttgagtccaaaattctgggaggccaaggtactgttgtttcctctaggagttttcttttttttgagacaaggtcttgctctgttacccaagctggagtgcagtggtgtgatcatggctcactgcagccttgacttcctgggctcaagggagtctcccacctcaccctcccaagtagctgggaccaccggcatggaccaccatgccaggctaatttttaaaatttctgtagagacagggtctcactatgttgttgtattagcccgttctcatgctgctataaagaactgcccaagactggataatttataaaggaaagaggcttaattgactcacagttccgcagggctggggaggcatcaggaaacttacaatcattgtggaaggggaagcaaacatgtccttcttcacatggtggtaggaagaagaagtgccaagcaaaagggggaaaagccccttatagaatcatcagatctcttgaggactcactcactatcatgaaaacagcatgagggtaactgcccccatgattaaattacctttcacagggtccctcccatgatacatggggattatgggaactacaattcaaggtgagatttaggtgtggacacagagccaaaccatatcagttgcccaggctggtactgaactgctaggcttcagcaatcctcctgcctcagcctctggagtagctgggaccacaggtgtaagtcaccaggcccagctaatttttagcatttctatagagatgggatctcactgtgttgcccaggcttgcctcaaacgcctgggctcaggtgatctccctccttggtctcccaaattgctgggattacaggcgtgagcctgcgcctggcctcctctaggatttttaaagcatcttatgaatctaaaaacttctcacattcaggattccacaaactaggtatccttcaggcttgagattctgcttctgcgatggatcccagggaatatccaaggacctatttgctgcccttgggtgtcgctgggcaggactctgcctgcatcccccaccccccaatttctacgtcctgcaccctacccccacccccagcaagcctggctaggtctctgctccgccaggaccctggatgaccgtcccctgcccccaggtcagacagccctgcacatcgccattgagcgtcgctgcaaacactacgtggaacttctcgtggcccagggagctgatgtccacgcccaggcccgtgggcgcttcttccagcccaaggatgaggggggctacttctactttggtaaggaggggcctggtgggggctgacagcatgctggagaagcatggcgggagatagcatgatactggttggtgtctgcagccctgaccatcacccagacacccagggccactctggccatgagcgcaggcagcactctggaccacaggctgcacgttggtcttggtcacagggccgttgcctctgaggtgtaagtgccatggggagtaccatggacctggattcagatcctcactccagccaggcacggtgtctcacacctgtcatcccagcactttgggaggtcaaggcaggaggatcgcttgagggcaggagtttgagaccagcctaggcaacatagcaataccctgtctcttttaaacatttaaaaaatggctgggcacggtggctcatgcctgtaatcccagcactttgggaggatgaggcaggtggatcacctgaggtcaagagttcaagaccagcctggccaacaagatggtgaaacccatctctacaaaaataacaaaaattagccgggcatggtggtgggtgcctgtaatcccagctacttgggaggctgaggcaggagaattgcttgaacctgggggacagaggttgcaatgagccgagatttccccattgcactccagcttgggtgacagagtgagactctgtctcaaaaaataaataaataaataaataaataaataagttagatggcatggtggcatgtgcttgaagtcccagctgcttgggaggccgaggctggaggatcacttgaacctaggagttcgaggctgcagtaagccatgattgcaccactgcactccagcctggaaaatagagcaagaccccgtctttaaaaagcaaaaagaaaagaacaaaaaaaaagccaaatcctcactctgcactttccaggcatgtgacctcacttccctgagcctcaccttccccagctgtgcagtggggatcacgagaggcccttgggctgtgatgtcagcgcccagctctgtattgtctgtgtgctttaatctggtttatgctgggaccaacagccccatcaccaggcccaaagcccaccactgccgttgtcatcactggactcatgaaatattttgaattttgcccctgcttaaaggcattcattatgtgcagctcagggacaaagtcacacaaagaattccatcatcagctgggcgcggtggctcacgcctgtaatcccagcactttgggaggccgaggtcggcggatcacttgaggtcaggagtttgagaccagcctggccaacatggcgaaatcctgcctctactaaaaatacaaaaattagccaggtgtggtggcgtgcgcctgtaatcccagctactcggctgaggcacaagaactgcttgcacccgggaggtggaggttgcaatgagccgagattgtgccactgcactccagcctaggcgacagagtgagactttgtctcaaaaaaaaaaaaaaaaagaattccatcattggatgtgtccagtccctcacagcctccaaatcgcgtggctgtgcccttaactagccacaccccatctccctggcatcacccagagaaacgtgcagttcatatccactgctggtgctgtctccgtcattatcctcagagcgccacggtgtccgtcccccgagtgtctgcaggcagagtcccaccctgggcccccttcgctgacctcccacccttcaccctggcccgcaggggagctgcccctgtcgctggctgcctgcaccaaccagccccacattgtcaactacctgacggagaacccccacaagaaggcggacatgcggcgccaggactcgcgaggcaacacagtgctgcatgcgctggtggccattgctgacaacacccgtgagaacaccaagtttgttaccaagatgtacgacctgctgctgctcaagtgtgcccgcctcttccccgacagcaacctggaggccgtgctcaacaacgacggcctctcgcccctcatgatggctgccaagacgggcaagattggggtgagtgtgcggctgggggcacagctgatccacctactcgtacccctctgcacacacacacgagggtctgctgctggtattcattattaatacgtgcatgcacctcccaacatgccaaccccagtgtgcagatgtcccagctcaagaacctgctatggctccctagtgtccagccaagctccttagcttcatccccgagcctctcgcctcatgtcaccctactggatgttcaccactccacccccaccagccaggatgagccactgataagaaactgagtccccgggccctagcccagcggtgctcccagcctcaaacctgttgaatggccctgccccagttccttcccttttctgggccgcgcagcatggggcctggagaagggtttctcaacttcagcatgattattttgggcggcaggctctttgtggtggggaccgtcttgtgctattgccagacattgatctgcatcccgggcctctacccaccagatgccaggaacacctccccttacacttgtgaccaccaaaaatatctccagaacattgctgaattgtcctctggggggcaccatcgctggattgggaaccaagtctggagtatgctagaggcaggagcacctgtccaagccctggcgctaccacttcccagtgtgtgacctcagacatctcatttcccttttctgtgcctcagtttccttgtctgtaaaatggggatataagagtgtcctctggtgtggtgttgtgacaaatgcggtgatccacataaggctcttaggaaggagcctgggagaagcagtaagtgtcacttacatgtctgtaatgccagctagttgggaggctgaggtgagaggatcgtttaagtccagcctggattatttgagatcccaaataaataaaaaccaaaataaaaaaaaatgtagcaaaaattactaaaattgcaattataccatggccctgaggcagtagaaaggctccagtttaaatcctggctttggctaggctcagtggctcgtgtctgtaatcctagcactttgggaggctgaggtgggaggagcacttgagcccaggaggttgaggctgcaatgagctgtgatagtgccattgcactccagcctgggcaacagagccagaccctgtctcaaaaaaccccaaaatcctggctgtgcacagtggctcatgcctgtaatcccagcactttgggaggccgaggtgggcggatcacctgaggtcaggagttcaagaccagcctggccaacatggtgaaaccccgtctctactaaaaatacaaaaatattagctgggtgtgatagtgggcacctgtaatcccagctactcaggaggctgaggcaggagaattgcttgaacctaggaggagagggttgcagtgtgctgagatcgcgccactgcactccagcctgggtgacagagagagactctgtctcaaaacaaaaaccccaaaatcctaacattgcctgaccttgggcaattcccacccctctctgtgcctccgcttccctgtgtgtaagccagggaaggaggagtggtaacaggaaggaccgcatgtgatcgtcagtattataattcacatgtcattaagatggattcattgctattttaacggcatgaagaagatattcattacaattaagatgttgaaggctcatccaggttctgtctggctccagctgactggttaagtggcttctggaacacccttcgtttttcccagcctccattctttatctgtaaaccaagataataagagcaagaattaaacaagatgaggaaagggtcctccagcagccggtgcttagctgttttctggggaggcgtcatgtgctgagctgggcccagccctgggggtctttccagtgtgagccccctgaccctcctggccccctgtgcagatctttcagcacatcatccggcgggaggtgacggatgaggacacacggcacctgtcccgcaagttcaaggactgggcctatgggccagtgtattcctcgctttatgacctctcctccctggacacgtgtggggaagaggcctccgtgctggagatcctggtgtacaacagcaagattgaggtgggctccaggagggggcatggggtgtgaggaaggaggggcagggctgggagtagggacagggccctggggctgggctgggggagacagccccagcctctaggacccaacgtggtgggtctgttggctgaatgcaagagaaggtgccaactaagtgcccagaacagtgtctgccatgtgaggaaatgagcaagacttgtgggaagatggacttttggggcaggtaggactgggttgggatcctggctctgtaacttacatgctgtgtgtctcaggacaagtggctccacctctctgggtctcagcttcttcatttgtaacctggggataaggatcatggatatcccatggggttcttgggaggaccaaagaggttaattttagaatggcttggcacagagtaaacattatgtcagcttttactactcatggttgttatatgaacttttgaaagctcttttttttcggtcaggcatggtggcttatgcctgtaattctagcattttggggagccaaggtgggcggattgcttgaagccaggagtttgagactagcctgggcaatatggcgaaaccccgtctctaccaaaaaaaaataataaaaatgaaaattagctaggcatggtggtgcgagcctgtagtcccagctacttgggaggcgaggtgggaggatcacctgagcctggggaggtcgaggcttcagtgagccgagatcatgccactgcactccagcctgggtgacagagtgagatcctgtctcaaaataaacaaacaaacaaacaaacaaaaaaccaagcttttttttccctacttagcagtattttgtgaacgtcgttctgtacttttaaatattctttggtaatattgtcgctgcatgtaaacataccatattcaaatgaactgttctcttattgctggtcgcttgggtttgtttctgcctttatcaggaataacactataagagcatctctgtggctgctttattgcacaaatcatgattatagagaaactcaagttaataaagggctaggaagctataaaaatggagcagaaaatgctggggactgggtgcaggtggtcttccttctagccctgccctgtggcttactggtctgtgagcttggcttccttgcaagacctcatttccctcattttttgaattagtgaccatcttgatttaaattagtggtggcaggaggtttagcatctcaggtgcaaactgattgattagtagtgtctacccagggaactgtatgaatacaattgtgcagggctcaattattgatgtctgccctgggttcagaattggagaattgtggtgagtcaatcatttatcatctttgggcaaaatttctcaatctttctctctgaatcagaatttctgagagcggaggccaggatttatacttgcagcaagttacataaattattttgcggccagcagcttggtactatccacagattggagtttgggaaccatgagaataaatgtctttttttcttttttgagatggagtctcactcttgttgcccaggctggagtgcagtagtgcgatctaggctcactgcaatctccgcctcccaggttcaagtgattctcctgcctcagccttaggagtagctgggattacaggtgtgcaccaccacgcccggctaattgttgtgtttttagtggagacagggtttcaccacattggccaggctgatcttgaactgctgaccttaggtgatccgcctgtcttggcctcccaaagtgctaggattacaggcatgagccactgcggccggcctgaaaataaatgtcttttaagggactttccagttccgagttctgtgatgctagaatagggtggaaaggtacattgaggcagaattgggcagctgaatccattcatgaatccgtgaatgcagctgaggaatggatggaaagagaaagcgctgtccgggtggagggtgggggaaggcacacccgaggcagcctgcctggaccccccacccatctcaggaaggcagcccccgaccaccctgcctctcttagaaccgccacgagatgctggctgtggagcccatcaatgaactgctgcgggacaagtggcgcaagttcggggccgtctccttctacatcaacgtggtctcctacctgtgtgccatggtcatcttcactctcaccgcctactaccagccgctggagggcacagtgagtgcccggggaccgggcaggggctggggcaggcactgggctgagccatgcaggactggggcacaacctcatccttctgggtcccctgtagggggacccggagaaggtttaggaacaggttggggaggcgccctccagcatccacgggtggccctgagctgggaggaggaagactcaggaggaagagagtgaaggaggaggctccatgggatgccgatgtttcgggcctgggggaacatctggattgggggccagatgttggaggggctgggtgacgacctgtgtgcccttgctgctccccagccgccgtacccttaccgcaccacggtggactacctgcggctggctggcgaggtcattacgctcttcactggggtcctgttcttcttcaccaacgtaagtgcctggcccccgtgccccccaccctgcctgccctcctcttctcttcctgcacctcttttctctccctctttttctcttctctctcctccaaatggtccttctcctttccttcctccttttattttcccatttctcttctacctcctccaatcccacgttctccatctctgcttttttctccttttctaacaggaaagagtcctttgtcttttctctgtaccagcctctgcctccctctcttctatccctttctctgtctcctctctcctcctctcctctcctgctggccccacccctttcacgtgccccctcctgtcttccagatcaaagacttgttcatgaagaaatgccctggagtgaattctctcttcattgatggctccttccagctgctctagtgagtagaggtccctgggccggcagcttctgggtgaggaaggtgggtttgggctgctaggtcgtccagattcaggagagaggtgattctgttagaaatgaatgcacccaacctgggcagctctaacccaaagtcaggacaaagccacaaacaatagggtcttctggttcaagaaaaattctgattgctagggagttatcatatacaacatggatagaaataattttaacctcttatgctggtgaatgattgctaatgtctgcctgaagtgccatgttaagaattttgcacctgtgtctgtgtttagtgggaaagagttgggattgattaatgatgtctgcctgggacagagaatgagagagttactgagtgtgtgttacctctttcacatttcccttagagttggagaatgatgaaattcacttagccacaaaatctccactgaacaccactaaatctttctttagcaattccaaggggcatcacttcaggatcctgtgggacctcaggattaattgccagctaattgaatgttcttgttaacagaatgctggggaaccctgctaatccactttgtttcttttctgggggtctagaaggcattgggaagtcctgataccctggagggcttggaggcgtgtcttcccctccagagcctcattgtcccctctcccctctggcctctcttgtggtctctgctgcactgcagcttcatctactctgtcctggtgatcgtctcagcagccctctacctggcagggatcgaggcctacctggccgtgatggtctttgccctggtcctgggctggatgaatgccctttacttcacccgtgggctgaagctgacggggacctatagcatcatgatccagaaggtacgggctgggaggaccctctggactcgtgtgttcctggagggagtcacacacacaccacatgcacacttatgcacctgcagacctgaggatgctgggtaccgtgggggcaggaggcatggtctggacactggggtgggaccagggtggagatggaggaatggggaaagtgagaaaccatgtgtctcctctttgcctccataatcccgctggggtctttagattctcttcaaggaccttttccgattcctgctcgtctacttgctcttcatgatcggctacgcttcaggtgagctctgggtgctcaggtggtcctggcaggggtggtgcaaggacgggaacagtagccatgatgtataggggacaatagcagccttgctgagttcttttttttttttttttttttttgaggtggagttttgctcctgttgcccgggctggagtgcaatggcacaatctcagctcactgtaacctccacctcccaggttcaagtaattctgcctcagcctcccacgtagttgggattacgggctcctgccaccacgccccactattttttaatttttttttttttgtatttttagtagagatggggtttcaccatgttggccatgctggtcttgaactcctgacctcaggtgatccaccctccttggcctcccaaaatggtgggattacaggtgtgagccaacgcgcctggccactgagttcttatttgtgtgccaggcaccagactaagtacgtttccatccttgcctcccaacaagcctgtaagctaagtgcctttattatcccctattatagaaaaggaaactgaggcttaggagggttaaataactagcacaagttcaaaagccagtgaatggtggccgggcgcagtggctcacatctgtaatcccagcacttcaggaggctgaggcgggtagatcacttgaggtcaggagtttgagaccagcctggccaacatggcaaaaccccgtctctaccaaaaaatacaaaaattagacaggcatggtggcgcgcaactatagacccagctactcgggaggctgaggcacaagaatcgcttgaacccagggggtggaggttgcagtaagccaagatggcaccactgcactccagcctgggcaacacagcgagactctgtctcaaaaaaaaaaaaaaaaaaaaagctggtgaatggcaaaactggagtattagctattgctacaaaggaagccacctaaagtggggcttaaaatagcacccacttattattattattttttttgtggcaaggtctcactctgtcaccaaggctggagggcagtggtgctcttggctcactgcaatctctgcctcctgggttcaagcgattctcttgcctcagcctctcgaatagctgggattacaggcgtgtgccaccacgcatggctaagttttatatttttggtagagatggggtttcactatgttggccaggctggtctcgaactcctgaccccaagtgatccacccaccttggcctcccaaagtgctgggattacaggcgtgagccactgtaccaggccaacttactattgcttatgagtcaatgggtcagctgggtggctgtgctgccctgggccaggtttggctgatccctacaggctcttgtgcctgtggtcagctggcaggctggctgctggctgactggtctagctagtatggacttggttagagggggtttgctatctatcttccacatggtcactcatttctggacagctagcttgggcttgtccacatggtggccttagggttccaagaacatgagcagaagtgttcaaggacacctcctggcatggcatcactgctgccttactctgttggccaaagcaagtcacaaggccagcctcgattcaagggatggggaaatagacgccacttctttttttccattttttttttttggtggaggcagggtcttgctatgttgcccaggctggtcttgaactcctgggctcaagcagtcctcctgcctcagcctcccaaagtgcaggattataggcgcgagccactgcacctggcctagactccacttcttagtgggagaagctgtaaagccacattgaaggaggatggatacatggaaggataaaatttaataattaaactagcagcccaggtattttcttaaagcccaacatcagctcccttgatataccttcttcgtgatgtcatgatgccactaagaagcattctgggacctcagtggcatgggtcatgggagaaggaccagggaccagggctggagaaactgaccaagtccttgggctgatccccgaggtgtgggtaatctgacatcaatgcccagcatccaaaggggaatggccaactcaggttagacctggacacatacacatctgagcaggttcatctggggacgagcctggcacaggaatctgacaagggtgatattttaacccacgatagtggccaagtctctaggtagattattggtgggaagtggaattgtagttttcactggggagatagggacagggtacagctttcccttcccagggatcacactggacaaactagacagtgtcaagggttcaacaacagtttgggattcaggtcagggatctagccctactgcagtcctagttattgaaactaaggagaaacaagggttagagtagcagcttagcagtcagcttggttgcaggtcttctccttataggatgcactagatctcaattctgaggctgacatgacataaacaggacacacatgcttctgttcccacactttggtgtccatagcagacatcactaatggatcacagaacagtttttccggtgagtccagacaaggtctcagaatccttctcaacacagtgtttcaccaggtactatacaactgaagaacattagcatatgagttgaaatctgcatactctaatccctggttgcaggcagtatgacattctgtgccccactgactgatgggactgagtcttcttcatgctcccctccctggctggtttagggacaggttgttgctgccaaactgtgttgagaaggaatctgaagctccacctgggcttagtaggaaaggagaaccatgatgagtttgagatgtctagagcaggagaggccccttagagaacacggctttggggacagtcaggactgatgcctggtttcagcccccacttttcctctctgggttggggtggagtgggaaactgtcagagagagagtctacccctgcgaataggggcattccagagcccccaagacctctaagaatggtaggccgcattaggatttcccaacactattgacatttgagaccagatcattcttcgtggcggggaccatcctgtgcattgtagggtgtcaggcagcacccctggcctccacccacctgatgccagtagcacccccacccccagttgtaacaaccaaatatgtctctagacattgtcaaatgtcccctggtgggaaaaactgagaccctccctggactagatcctgaaaaccttttccctcccggtagcagggaaccaccaggttgtgtaaggaggggtgaactgtcccaggttggaaacagagcaggtcaaaactcctacgcttatcagtagtgggattgagcctgtgagtagccactgcactccagcctgggcaacatagcaagaccccatctcagaaagaaagagagagagagagagataacctcttccttatcagcaagagtttatggaaaggcttcaaaggttttgggatcaggaggacctgggtctggtgtggcttggctgatgtgtagggtgacatgggtcagcgtgtgggccagcgtgctccgctcactaggcctcagctttctcctccagcaaatgagaatgacaccctccacctctctgtgggtgtgctcacactcagtgagtgccacccctatcctcccacagccctggtctccctcctgaacccgtgtgccaacatgaaggtgtgcaatgaggaccagaccaactgcacagtgcccacttacccctcgtgccgtgacagcgagaccttcagcaccttcctcctggacctgtttaagctgaccatcggcatgggcgacctggagatgctgagcagcaccaagtaccccgtggtcttcatcatcctgctggtgacctacatcatcctcacctttgtgctgctcctcaacatgctcattgccctcatgggcgagacagtgggccaggtctccaaggagagcaagcacatctggaagctgcaggtgaggccccagggcccccagccccactctaccagccaccctcgtccttccgaggagacccacccgactggcttcctcggccttccactctgagcaagcagtgtcttctcattctccctccacttctctgtcggtaaaatgggcatcagaggctgctgctgacttcccagagctgcctagtgaattttgaggtggcttcttgcctggctgccagcagtgggctcagattctccttgtggtccagctcacaggacacagtcggctccacctagcatgactgagtgacttctgccggctcagaaagtgctccgtgggcatcagcgtttcagcaggggtcccacgctgagcccaggggcagcttttgtgctctagcactccagcacagggatgtcagcattctcatgggggtctttttctagcaactgtgagcatgcttcctagaggagaaaccaatggggacaggggccgccttggcccggggagctgcagaaagtttttacttaccaaaagctttctatgcaatcctggaaagaacaggccctgggatcacagccctcccaggccaggtgcagcctacaaacctggtgtcctaataaacagtgctgccccacggcccaggaatacagcacccgtgtttaccttgactgtgcatttcaggaaaatggtgcagtgagaaaaaagggcccaaggttgtcctcccaggactgggtctgagggaaacagctctggcctgctcttaacctttatctatattgcttacttcattgggcctcagtttccccactgggcattactcacaggatgcaaactgggcatcctgtgggctggagtgcaatggtgtgatcttggctcactgcaacctctgcctcccaggctcaagtgattctctgtcctcagcctcccgagtagctggggctaaggtgtgcaccacctcacccggctaatttttgtattttttgtaaagatggggtttcaccatgttgcccaggctggtcttgaacttctgagttcaagctatccacctgccttggcctcctaaagtgctgagattgcaggtgtgagccactgcacccagcatcagaccattatattaaaaacaacaacaacaacaaaaaactgcaaaatttaaaaattaagagattccctatgaaaacccagatttctggcttttcttgaaaagttggaagctccaggcagtgcagggtccggattcctgcctggcagccctcaggtggggtgagtggcagctgcccccttacacgtgggcatttgctccctgttctccccagtctctacccctccctcactgagaggcaactgctgtgtaagtgtgatagggcttgggcggcagcctttctgcacctgatcctgtttcacccatttgttttcctgcctgccacctgtgggtatttgagtttataaaccctgtgtctagtggggagtaggagtctaaatgcctagttctgggcccaccctggcccgttgtctcatttctgccaccagagcggcaggcgcaggctgtgaggctcaccgatgtccctcctgaccctccctccccgcagtgggccaccaccatcctggacattgagcgctccttccccgtattcctgaggaaggccttccgctctggggagatggtcaccgtgggcaagagctcggacggcactcctgaccgcaggtggtgcttcaggtgaggctggggcagtggggccaggatggcagggcggaactgtccccactggctcggggcccctgctgctccagcgtcgtctacccattgcaatttctggagccactgaggccccaagaggcccgagcagagttcatttccaccaggcgatctcaggcaagtcagcccacctctctcagcctcagtttcttcatctgtggaatgagacaatgatctcacgggctcctaggctggcggtgcggattagacaggtcagcacgtgagaagtgctcagccagtgcccgacgcgcatcgggacgccacaggctcccctgttcttgctcagggggaagcagagacttggatggtgggttcattttagagcatcaccctgtatctaccaaacagtggggtgagctctagtgccctcggtgaaatgggaagctgaggaatgtgcagtttccagggctggagacctcacccagcccatctgcagaatgactccgtgttccagaggcacagggagtgccagcttcttaggggaaccccttcatgaatcttttctttccagttgattcattcattgtaaagtggttgtcagcatggagcataagcagaatgtttggagtcagacaaagtcagtttcttcatctgtgaaatgggaacaataatagaacccacctcctaggccatccgatcagttcaattccattttttgtttgtttttagaggcagggttgctcaggctggagtgcagtggtgtgatcatagctgactgcagcctccaactcctggtctcaagcgatcctcccacctcagcctcctcatgccaccatgtccgaccaatttttaatttttttgtagagatggggttcttgctatgttgcccaggctggtctcaaactcctggtctcaagcgatcttcccacctcagcctcccaaaatgctgggattacaggcgtgagccaccacacccagcctctgttcagtttgaatccaaagctcaaatcttggctgggtgtggtggctcgtgcttgtaatcccagcactttgggaggccaaggtgggtggatcacctgaggtcaggagtttgagaccaccctgggcaacatggtgaaaccctgtctccactaaaaatacaaaaattagtcgggagtggtggcatgcacctgtaatcccagctactcgggaggctgaggcaggagaatcgcttgaacctggtaggtggaggttgcagtgagccgagattgcactactgcactccagtctggcggacagagcaagactctgccttaaaacaaacaaacaaaaatgaatagataggataaaaaattaaagataatatgtaaaaaaaaaagataatatataaaaaaatgagtggataaacaaaatgtgggctatgtgtacagtgaaatattatctgggccaggcgtggtgactgtaataccaacactttgggaagcgaggcaagaggattgcttgagcccaggagttcaagaccaacatagtgaaaccccatctctacaaaacgtttttaaaaaattagccaggtgtggtggcatatccctgtaatcccagctacatggggggctgaagtgggcggatcacttgagcctgggaggtcaaggttgcagtgagctgtgatcgtgccactgcaccctagcctgggcaatggagtgagaccctgtctcaaaagaaggttaaaaaaaataatttctgcttgggggaatggaagaattttggaaatagatagctgtgatggtcacacaatgtggatgtgcttaatgccactgaattgtatactcaaaaatgattaagatggcaaattttttgtgtgtgtatacacacacacacacacacacacacacacgtctttttttttttttttttgagatggagtcttgctttgtcccccaggttggagtgcagtggcgtgatctcggctcactgcaactgcctcccaggttcaagtgattttcctgcctcagcctctcgggtcactgggactataggcacccgccaccatgccccgctaattttttttttaattttttttaatttttagtagaggtggggtttcaccatgttggccaggctggtctcgaactcctgacctcaaatgacccacccacctcggcctcccaaagtgctgggattgcaggcatgagccaccacgcccagccttgttatgtatatgttaccataataaaaaaataggagggtgtgctggggatggtggcatggagagcgtctctgaggggttccccatgaccctctgcttgggccctgccagggtggatgaggtgaactggtctcactggaaccagaacttgggcatcatcaacgaggacccgggcaagaatgagacctaccagtattatggcttctcgcataccgtgggccgcctccgcaggggtgagtggaggggcgggtgcggaggggagccccagtccattctcatcacgaatttgctttgagcagtcctgcttctttccgggactcagtgtccgtgtctacagaatgagagagtgtgcccctgagcttcctctgctgcttgtgaatgcctggggcacctcacctacgtggcttcatcctggccctccctactgttgacataagctggcctggggagggaggacgagctcctcagccatccctgtgtggagaaaaccttcctgtttgtccagtaagccatgagcacgcgagacgcagctggagaggacacaggcactcagggcattcggctccaggcttgaatcctggttcctccattctctcctggggaggcaccttgacctctcttgagccccagtttccacctctgtaaaatgagcatagtcacatccccccttcagaacactgtggagtgcccagtacacagtaggcactcaatatacgcacgctctctctccaccaacccccacccctccctctgatgtgctctcggtgcagatcgctggtcctcggtggtaccccgcgtggtggaactgaacaagaactcgaacccggacgaggtggtggtgcctctggacagcatggggaacccccgctgcgatggccaccagcagggttacccccgcaagtggaggactgatgacgccccgctctag

SEQ ID NO: 15868 - DNA, 31176 bp, Homo sapiens; identical to SEQ ID NO: 15867

SEQ ID NO: 15869 - DNA, 49844 bp, Homo sapiens
gggattcaggaagcgcggatctcccggccgccggcgcccagccgtcccggaggtaagtggggcccgggcccgggaggggcggctcagccgaggtcccctcgcgcccctggggacatctccgtggcccgtccggctccggggggtcccgaggctccaaaatgcgggccaggggcgcgggagacggaaggcaccaggttccgcaggcgccagcctctcagctaagtgcccttgggccggacaccggctctttgggtctcggttttatcacctgtgaaatgggcaccaacgtggggcctggggtagcaggtctggggggagggcggttcggttccctgagaccccaagccagggaaccaaaggcccggagccttgcagcccaccttaggagacttggaagagggatttcgggggacctaaggtttgcccttggcccctgagcatgtcggagggaatttggagtctggagcttccaaaggcttcttcttggttactgagtcccggagagacggctgtttcctccaagaggcatgaaaatctttaacctctagttctgccctggactctcaggacgtcccgggggcgggtggctcctgggggtgggtagcgggggtgggggtgggggagagagagactcccacactccccgcttgcctggaaacaccaaccacagatgcattcatcgagccacccactgctccagcctgccccagctgttccctctgtctgtcctctctgttttgcagatggggaaactgaggcttaggtcggggatctagacaattgggatttaaacccagggactatccagccccaaagcccttcccaccacaccaggtggcctgtcctggggccagctctgcacacagggcctggtgcccccggggtgcttgggaagtggcagggcagaggtgggccctgtggctgttctggctcagcttctaaaacaagagcctctgctgggggcagaggggccgtgaacccctgaaatgttaggcagataccctgtgggagctttgttctgggatgctaagaaccgcttgaggatttaagctttgccactttggctccggagcaagggcagagggtaagtcgggactccccgggctcctgaggagggtgacgaggtgggcttttgggggaacaagggtagaaaggtcaggcctgggttatctgcggggctaagagcgggcctgtgtggggcccggggtgtgctctgcagtcccctgctgtgtgaccttggcctggtcccttagctgtctgagcctttgtgttctctcctctgtaatactggggtgcctgagggcaagcccccagggctgtcgtgaggaccgatgaccttccaggaacctggcacagccactgttggctgccatcaatgtttaaccagttgtcgttgccccaaacattttcttaacaaagagggtgaaaaaagtcaattggccatttccacatttctctagttcattctgtttgaagaatgatgggaaccagaaagcctggacacccaccttgattggtgaattgcacgcggaaggggtcccagacacaaatggcaaatggcagtcatagttcagggcggttcactttgtaagatcaaggtggggctgttttgaaatggaggtaaccagggaatggttgcctgaacaaaaagggtgtgatgcccccaggagggatgtttcacatgagctccggtgaggatggctgggattccccaggtgaaacccagataccttatatctggggaaggggctgtggaggttcctcctgccttatctggtgccaactgggcctctgccacttactccctcctccagcaaatgctctctgcaagctcacctgtgccagctctgggctgggcactggagcagtgagatgcttccaatcccagcttcgctgtagcctgaggcgtgtgaaggcaagaaggattttcccttgtggccccccggggaggagctcccacacctgacttgtgagcatctagcaaggtgtgcatggatggccgacgcttagtaaatgtatgctgtggaatggatggggtcaggggagaatgccgtagggtaggaggactggcccaggaaggacccacgagggcttggtcaaggtagtgtttaagccgcaccttaaagaataaatgcagaagtagaggaaagagtattcaggcaaagagaatggcactagcagagatatgacttttacctgttaccaggtggctacacctggggtttatagagcagagaaatagttctgtttgtctggagtttgtgacgtgactggaaagggtgagggatcagacaggcaggagctaaatcagacccagaggcccagaagtcctgcctgggagtgacacggttgtttgtctgttctagaaaggtccctgtggctgcagagtgggaaagattggaggagctcagacagagaggctggccccaaggctggggaagtcatccaagctctgagtggagagcggcagctggaaggagatgtaggagggaaggaaacacacaagactgagcctcatgtgcctggcacatagtaggtgctcagtcagtatctatggcatggttgtctgaacaaatacttttgagatggtcaaagtcctttgagttccttcctctgttcctagggggatggggtctacatgaagtgggtgtctctactccatgcaggcccttgaccctgctgtctgcctcagtttcccccatttgactttgggaaagacactccagtccgttctccaaattatagggacccaggtaacagctcctcttgttgtcacagatagggtctggggagccaagataacatttatttcatgccagtgggccctctggaatgctccacatcgcccatttggagcagaattcacctgttaaagattaattccgatctcttgagataagtggctgctgttatgaactctgggtacaaggttctgtctggctttagccaaccctgggttgcattaacaactattatgatggtggcaagcctttattgagcacttactgtgtgccaagcactgagtcaagcaccctcagcacatttggatacaaaactatttttgtctctatttttcagagggcagaatgaggtctagagggtgaaatctcttgcctgggttctctcagctgagaaggggcagagctgggacctgaatcccatttgtgtgattgcaaatccatcccttcacctgtaaggtggcccgtccccatttgtctggaccctcattggggtgcctggggtcatgggggagctactctgcagtccagagataggaacctgagttggccgggtgcagtggcccacacctgtaatcccaacactctgggaggccaaggcaggtggatcggtcgagcccgtgagtttgagaccagcctgggcaacatggtgaaactctgtctctagaaaaaatacaaaaattagccgaacgtggtagcacgcacctgtagtgccagctacttgagaggctgaggtgggaggatcgcttaagcccaggagtgagaggttgcagtgaactgcgattgtgccactgcagtccagagcaagagatcctgtctcaaaacaaacaaagagcctgaactgcagacaggcctgggcttaaactgcatccgcatgtttaagacaggcctgctattccccgctggaggagctcagggaagccacctggcctctctgggcttccatttcctcctgtgtcaaagggactctcatcccactttgcagggatgacccaaggcacgtggatggggctctgaagcacagctcttctgcctcagcccgtgtcagctccccttgtccccaggcccattccagggcatgttttcttccagcttatcccccagacatcctcagagagcccctccatgccaggtgggtgggtggaaggtattgggggcaaagctagacttgcatttgggcaaataatgatatgttttcagcaatgaaatatttatgagcattgactgagtgccaggagctgtcaactttttttactttcctgatttaatgcttaaaaactagggctggagcccagctgcccaggttcaaatcccagcttccaataagttccattattcctttggcctcagtttcctcatctggacaatggggataaggtaatgcctgccttgctgggaggttgtggacagtcttcagcacaaccttgagtgtttagtttaaaaccagcatctattgcctgttgttcacttttttttttatttattatttttagagacagggtctcagtctgttgctcaggctggaatgcagtggtgtgatcatagctcacagcagcctcgaactcctgggctcaagagatcctcctacttcagcctcccaagtagttgggacacacccagcttattaaaaaaaaaggtttttttcagacaggggtctcactatgttgcccaggttggtctggaattccagagctcaagtaaccctcctgccttggcctcccaaagtgctcagattacaggtgtgagggctgatgttcattttgatggtgtcacagcttccccactgccgggggtgggcaggggcaggaatgctgagccccattttacagctgaggaaatcgagactcagagaggaagcaatttacccagggatgcccagctggctcatggcagagctggagctggaagccagatctgagtgacactggtgtccttgggtccacgaaaagcccagtggccagcttagcttcttgcgtggaaagctacgctaggctcacccaccttggcgtctgagccaccttagcttacctcccagctccgccagttgctgctctgtgacctcagaaagtggcttaagctctctgttcctgggctttgctgaggtcagagctctgccaacttgaggagggatttgggttattctggctgctgctcttgttctggcctgggctccttcaacctcgggtgcccttgcagcccatgagctggcaccccagtggccggacaggaatgaggaagggacagggcctcactttcaatgtgactctgacttccttcccacccctagccccttcctgagcattggtttcccctttctgccccgagccctggccactgccggctgtgtgaccccaaggaggttacatcacttctctgagcatgtttcctcatcggtgagggaggatcacacgagaccacaccaggcgcacaggaagcccttgccggtctccagatgaggtcagggcattggaaaggccacagaaggaggcgggggctcaggggacagacaggcgggccattgaccaaacgggaatatccttctatttctttggttagtgagtaacagcagcccctcttgtccacccaccctgccccttgcacaaagagctcctcagtctcaccaggcgcccgttttcccctgagggtggagtggcctgggttccacccggttgaccgagtgggctggccaccttctgggaccattccctgtgtgtgtgtttgtgtacgtgtgtatgtgtgtgtatattgatgtgcgtgtgtatgtgcgtatgtgtgtctgtgtgtgtatgtgtatgtgtgtatatgtatgtctatatgtgtatgtgtatatgtgtatatatgtgtatgtgtgtatatgtatgactatatgtttatgtgtatgtttgtgtatatatgtgtgtatgtgtgtatatgtatgtctgtgtgtatgtgtgtgcatatgtgtatgtatatacatgtgtatgtgtgtatgtgaatgtctatgtgtgcatgtgtgtatgtgtgtgtatgtttgcgtgtatatgtatgtatgtgtgtatattgtgtgtatgtatgtgtatatgtgtgtaatgtgtatatgtatttgtgtgtagtgtgtgtgtgtgtgtgtgtttatggagggtgggttccatgggctttgggctgagaccccagcaggtgagggtgggacagggggcatggggttgactgacccatgggtctggctcactcctgtccctgcttggcacacaggaggggctcaggaatacctgtagatagagtgaagggatgaatgaaggaaggaatgagtgactggacaagccagccaggcagggcatcagaaggaagcacctgctcagatacaggctctggctctgagaccaagtgtgcttgagtgagtgtcctggtcttgttgagcctcaatttcttcatctataaaatgggctcacgatagttgtcctcatgagaggtgttggtcttataggccagaaaaccccacacatagcaggtgctccgtaagctgtctgttaaaaaatggatgggaggaagctaattagttagctgggcagaggttcgctttggagacctgtctgccctggagagaatgactaagcccgtctttcactcctttcctctgttcattcattcattcattcattcatccagcaaatacatcttgagcagctgctatgtgccaggacctgttccaggcatctgggcctcagcagttaccagaagggagtccctccgccctagagcttttgtccgagtgacatcattccacacgcagtgctttgaggccactttgtgagactctgatacccacaatgacaagtaatccagcagtgggaactgtgatgagctcccttttacaggtgaggaaactgaagctcggagaggtcaagtgatccgtctggggccacgcagttactaaatggcaaagtcaagattcagactccaagcctgtcaccactgtgccatcttgtcctgctgagttccaagggatatggcgttgagaaggggggtcctagggagagggcatggtagcccccaaagggatgaatgaactcaaatggatttaaaagcagatggttggaagtctagccacattcacttcctgtagcgttgtggactcagttaaatctcattctttctgatcttcagtttgttcatctgtgaaatgataacaataacaccgacctcaaatgagagagaaatgtgaaagtgcttagcatatgataggtattggataaatgtcagcccttacctcctttcccccgggactgactttatacatctgggaatggagacaataatatttaatgtctatagttattatttggattaaaatagatagaaggggccagccatggtggttcacgcctgtaatcacaacactttgggaggccaaggtgtgtggatcacgtgagcccgggcattggagactaacctgggcagtagagtgagactccatctctacaaaaaataaattttaaaagtaggaatggtggtacatgcctgtggtcccagcttctggggaggctgaggtgggaggattgcttgagcctgggaggtcgaggctgcagtgagctatgattgtgccactgcactccagcctgggtgacaaagccataccctgtctcaaaacaaaaaacaaccaaatgggaggtgctgtgtgaagtgtgccatggagggtaggcattactgatggtacattgcaggcattagcctcagtcataattccaagcagttaacccctgaggcagcagcttactgttggcacagactggtgttgaggtgggctgggacagaggaaggatctcaaactggttttctgctgccttgggctcccttccccgactcctgccccatccactcataacgggcacctgccctcttccccctcctctgatttggcaaactcgggacttttgctcctagaagtggggtagaggaacgtatgcatggacgagtgtcctgtcccttctggtccttagtctcccagctgggaggcagcccttgtcctgacagccttctaaaggtgacagaagatggaaatgaggtggcgaggaaaccctttccaaaggtgaggtctctgcagtcacgagccctggttttggagccgggaagtctgggttccagtgcctgcccagttctgacctccctggacctcaatgtcatcatcccccacctcccactgcaaactgagggaatgttagcaagaatggcaaagcagccattgaacatccttatctgtaaaatgggggtaataattgctacgacctgggtggggttaagctgtatttgctccatagttatttggtatacagtacattcatgctttaaactaaaaaataagttcaagttcattgaacacttggtgtttgttgggcactgcactgaaggcttgaattatcacatttaatcctcacaatagctctttggggtaggagctgttattttattttttaatattttaaaaaataaataaatttatttattttttgtagagatgggatctcaccattttgcccaggctggtctcgaactcctgggctcaagcgatcctcccaccttggcctcccaaagtgttgggattacaggtgtgagccactgcacccagccttattttttagtttaaagcatgaatgtgctatacaccaaataactatggagcaaatacggcttaaccccacccaggtcgtagtaattattactcccattttacagataaggaaaccaaggcccagagatgagatgtgacttgtgcaagaccatacagccagtgagtggcagatgagatgtaaagcattgatcaggcaacgttctcagactatagaatcctctctggagttctccgtggctgtgaccatcctctaggagaggggctaggccagagagaaggcgggcctaaggttttgttttgttgagatggagtctcgctcttgtcgcccccgctggagtgcagtggtgctatctctgctcactgcaatctctgcctcctgggttcaagagattctcatgcctcagcctcccgagtagctgggattacaggtgcatgctaccacacccggctaatttttgtatttttggtagagatggggtttcaccatgttggccagtctggtcttgaacttctgacctcaagtgatccgcccacctcggtctcccaaagtgctgggattacaggcgtgagccactgcgcccggccggactaagaatttgatgcctccctcctcctgggctggagctgagtagcatgttctcaagcagggctggctgagagggtggaatcctggggctatgctctgatgggaaggaagcgagataagggaagaaggacctggagcctcctggggtagtgactttgtatccttgagctcctactacgtgccagaccttgtttgaaaccctttatgtggctgggcacggtggccgacgcctgtaatcccagcattttgagaggccgaggcggtcggatcacctgaggtcaggagttcgagaccagcctggccaacatggtgaaaccccgtctctactaaaaatacaaaaattagctggcgcagcggtgggcacctgtaatcccagctacttgggaggctgaggcaggaggattgcttgaacctgggagacggaggttgcagtgagccaagattgtgccacttatactctagcctgggtgacagagcaagatcctgtctctctctgtcacacacacatgcgcacacacacacacacacacaagaaagaaaaaaaagaaaccctttatgtgtgcttaatctccatgacattcccatgttgcaacaaggaaactgaggttctgggagggaagtgacctgcctgaggtcactaagcctggaagggtcatttagatgtaattcacatactcataactcagtcttttaaaacgtacaattcagttggtttcttagtgtattcagagttgtacagacatcagcactatctcattccagaacattttcatcaccccaaaaaaggactctgtacccattagcagtcaccactccccactcccagcccctggcaacaactaatctgctttctgtctctgtggatttgcctgttctgggcatttcatataaatggaatcctgcaatatgtggccttttgtgtctacaaggtgcatgctcttaaccattaagccacaccgcttcttggtggctcctacccaggggccgggacccttggaaatgacttggtccctgtgaaagctcagaggggcatctgtgtgtgctgtcagccggcctccctccagccaagggcttgcagaatgaccaaatgactgccgtggccacgctggccttgccctccgtggggcgcggtgagtcaccccagacctgccctgcctgggtggtgtgagtgcatggggtgggggcccagcaggacactggggctctgtctgtcctggacaggcggccactgtgcagcaaacaggaagcgggctgggccgagacctgctaggtaaatacaggctggccagggaaggtgctgggcatggcatgatgcccccctactgctgccgcctgccaagtgcctgggagccgtggggtagcctggcaggcagtaggtttcgcctggccaaggagttgagctcccagccggctgttcccagcagccgccacttcgaggtggctgccagagtctacctccaaggctctggatctggccgctctgccttctctaggagtcattgccttccttggtcctcagtccttttgttcatctgttcccctaatgatactaataaatagtacactgatactgatgattccaacagcagccatgcttgactgaatgcatgctctgtaccaggcactgggctcagtgttttgcatgctttatctcatgtaaccctcacgacagttcccttggggtaggtgctaggatcattgccatttttcaggtgaggaaaccgaggcatgggcaggccaggtgacttgcccagagctggtgaactggtggttcgtcagggactgcgacccatcccccactccattctttctccagcttctccctcccagagttcccttgtctttgtaaagtgtccatcaaaggcgcaggtcccggggatgcatgggttctaatcctgcctccccctttctggagcaaggcaatgccagacaaatgacttcgcctctctgagcctcagttttcttacctggaaggtggggagggggtggacaggtctgggattttctctctagtaacagcaaagctcagagtccttgtcttcctagtaccttcctatccacatgtccccggcaagactgatttggaatggcaggcactcacagttgtgtttatttgagggtaccacaggaagtgggggcccccaaattggctaaggagccccagggtggagggaggtagaagcacactgggtctgtctgggagcctgagcaccttctctgtgggctccttcctacccatggattccaacccccacccacctccccactgcccacccactcacccatctcttctgctttccttctccctgtgccccaggccacaccattcctctgtgcaccctgcactttcccctctacacctttgtccttgacacctcctctgccctttatcttcctcctcctcctcctcacagcctttccccctccccatcaggattctggctgcccttgctctgcaaccctgcctggaacttcaggtccctgatcttacagcctaaaaaaaccaaatattcattgacacctcattttgcttcagcaccatgctgaatgctggggacacaggggacacgaaatagtccctaccacatggaactaaaactctggaggtgaagagagaagatgaatcaaagaataatatataggccgggtgcggtggctcacacctataatcccaacattttgggaggctgaggcaggtggatcatctgaggtcaggggttcaagaccagactgaccaacatggcaaaaccctgcctctactaaaaatacgaaaaattagccgggtgttgtggtgcatgcctgtaatcccagctactcgaggaggctgaggcacgagaattgcttgaacccaggaggcggaggttgcagtgagctgagatcatgccactgcactccaacctgggggacagagcgagactctcttgaaaaaaaaaatacatatatagaaaagtttaatcgtgggaagtgctgtaaaggaaggcacatgttactctaagagtaaagagcaggggaaacaggagggcttttcagaggaagtgccctttaacatgaggcctgaggagtaagtgggagccagccagcgaagggaagggcattccaggcggagggaacagcctaggcaaaggcctggaggcagagagagccatcagccttccctcctggactgcgagttctctgaggttccacacttttatgtctcccctgtgccctgcaaacaggtgccactgcattgatgcctggtggaatgaattgattccagaagggagggaaccgggagaaaccagctccctggattcctccccgctggggcggagcaggtttgcatgcccaaacttgcccccagatttaagcagctttccttggtcacgtaatcaggaggatgggatttgacaaatgtttgccagggtttccatgagatcaggcaaagccgcgggtaaccccgaggatgggcccctttttccaccctccgcaagttggggcatggggacggagccagagacctccaccgcctttgaatccgggattctcagagagaagccatctgttgtgcaatctgctgtttattgaggctttctttatgccaggcacttgactcaaggtatatacctctcacaacgaccctattacgatcccttaatagggcagctgagggccgggcgtagtggctcacgcctataatcccagcactttgggaggctgaggcaggcggatcacgaggtcaggagatcgagaccatcctggctaacaccatgaaaccccgtctgtactaaaaaaatacaaaaaattagccgggcgtggtggcgggtgcctgtagtcccagctactcaggaggctgagcagaagaatggcgtgaacccgggaggcggagcttgcagtgagtggagatgcgccactgcactccagcctaggcgacagagggagactccgtctcaaaaaaaaaaaaaaaaaaaaaaaaatagggcagctgaagaaagtgaagatcagagaggttgggtaacttgctcatactcacccagcaagtgagctgtgggtctgggatctgaccctctggtctgcctgacgtcaaaatgtgccccaccggctcagggggccatgagagcagaaagccaggtttctggaaagcctggggtctctgtctagggcagaaaggaaggtctggggaccctggctcagccctgtatctcatcaccctactcaggactcctgcaccccttaacttgcccactcctgagcccttctggtctatgcagttcttaacaccatccgacatgactctgctgcttgatttgtctagtttattgtttccccaccagaaggtctgcccccaaagggattgatatctgttctgttcacatctgtgtccctagtctagcacagtgcctggcacatagtaggtgctcaataaatgtgtggaataaataggtagctggcttctactgctgccccttgggccctttccagaggaagatgcagattctttgtccatcctacacaactgccatctctgtgtggaccaccattcagtatatatattctaaagaagagtttgaatataaacctgcttttgaatatataggatttaaaaccaacatattcaaaaaccgctactttggctgggcgcagtggctcatgcctgtaattccagcactttgggaggccgaggcgggtagatcatttgaggtcaggagttcaagaccagcctggccaacatgtgaaaccccgtctgtactaaaaatacaaaaattagctgagtggtagtggcatgtttctgtaatcccagctacttgggaggctgaggcaggagaattgcttgagcctgggaggaggaggttgcagtgagctgagattgtgccactgcactgcagtctgggtgagagagtgagaccctgtctcaacaaacaaacacccgctgctctgaatgaacgctgttgtgaagatgtcagtgtgtgaggatgttcacagtcgtgcaggaacgttcttgggtgcctccctgatgcacacctggtgcagctgggagcttccccactgtggaggggctcctggtaggaggcattgtgagcccgtgcgggaacgaagggcccaccatgcctgctcacagtgggcacacacacatgcacacgcccatggaggaaggtgggaagaaatgtacatgacagtcacacgcagaggagacacatgtggactcacacccaggctctcagcctctctccctgcctgcatccccgacttccctccctcctaaaactggcatgagtttggaatgtgtaataacagcctttagggcaaattagaacagggagtaaactctttctctgaccacagagaacaggacagtgtttggggagggaattgccacagagcagcagagccgggtgtgtgtgtgtgtgtgtacacatgcctatgtgtatgtgtacacgtgagctagtgtgtacacactcctgagtgctgtgatgtggaaggagcccagggctaggagtctagaggttttcttcaaagccatttgctccctagctggcctctcagagcctccgtttccttagctgtaaagtgggagcaatagcctagctttgttcaggttcttcgggggattgaatgagagaggggcttggtggattttagcatgggctataaaatgtcaggctgtagtgctggcacgtgtgtgcatgtgtgttttggggaaggggagtaaggaggacaggtaaatcaggaccatatcatagtggtgatgatgataattaaatgtgacaagatccaacatttatcaaatatttcttaggtgcccaagaaacacttgacctgccttatctcccagaagccctacaagggaggtgctattattgcaatccccattttacaagtagagaaaccgaggctcagagagatgagaatgggcggcagtaatcatcccttcctcctgggggtggttgtgaagcttgaaggagacactgtaagcgctcgggtggtaccctggtactccatcactaacctgctgtgtgacctcaggtaagtcgcttagcctctctgagcctcagtttcctcatctgtaaaatgggaatgattgcaatacctacctccagggcagattttctcaacctcagcgctgttgatgttgttgactgggttattctgtgtggtgcggggctgtcttttgttttggaggatgtttactaccatccggcatggcggatcccagcaaaggcccctgtgcaggcctggtgaggtggccgagcttcctggtggggaggccttccccctctcctccctggtcaatctatttgagggtgaggatggctccccttcaccctcacctggcacccaggacatccccagtccatggagggattcaatctgggctctgcagccagctgcccgcatttcagtcctggctctgtcactaacctgctgtgtgacctcaggcaagtcacttagcctctctgagcctcagtttcctcatctgtagaatgggaacgatcgcagtacctacttccagggcagatgttctcagtctcgacgctattgacattgtgggctgggtcatttttttgtggtgtggggctgtcttttgctttggaggatgtttagtgccatccctggccttgatctaccagatgccagtagtgctccctctcctgtacagttgtgacaacaaaacatgtcatcagatattgccaaatgtccttagaggaggagcagaactgtccttggttgagaaccactggtctggagtcatgatgagggctggatgaggccctgtgctgggcacagcctgagctacgtcatcaggcgaggatggtgatttagttcataattattatttcatcctaattagaatgctaatcatgatcgcggcgtgacttgccgaaggccacacagcagccatacaggttgacagttgctgggagaggatttgaacctgggattggctggcaccagagcccccattttggagtccccaggaacctggggtgctgtccaggcttaggggagggctatcctcctgaggggaggagggtgcaggcatggtgggggatggaaggaccttcttggctgccttctctggccttgggagctccctgggatggggttccattagcccctgaggtgccatggtgaggggtgcagtggatagaagggtactggaaacacagagggtgcgcctgatgcctcgtctccccctgacctcagggcccccagtgaggtggacagggccatgcccaggagagtctaatccacctcccgccaatgcctgtgcccctgcagatgcccctcctgcctcagcaaccccctggcccccattcctgcagagcaaagcccaaatgcatgtggcagccatgagggactagggatccagatccccctctcctgtctggccagtcgaaaggacttcgtgtctccagaggtcctactaggtgctggaactgagtaggtgcctcacatgctggaggaccctaggaggaggcgtggtcactccagtcttacaggtgggaaaaccacggggcagacagaggaagtgatttgcccatggtcaaacggctaatgaccagggccaagagaggaactgggtctcatttcagaacctggcctcctaacttctctttcttcgtttggttataataactgaaagtcccactctatttacagatgaggaaactgaggctcagagaggctaagcaacttacctgaggtatttatttttagatagagtcttgctctgttgccctggctggagtgcagtggcgccatcttggctcactgcaacctctgcctcctgggttcaagtgattctcctgcctcagcctcctaagtagctgggactacagtcacgtgccaccacgcctggctaatttttgtattttttatagagacggggttttgccatgttagccaggctggtctcgaactcctgacttcaagtgatccacccgcctcggcctcccaaagtgctggggttacaggcgtgagctgctgcactgagccaaaaccccactttaatcccagaagtggcactggatatatctgacctcacttcccactgcctgcaaccctatgaagaagtgactacaattgtacccattttgcagaggaggaaactgaggcttggggagctcaagtaacttacctaagatcacactacatgtaaatagcagagctgggattagaacccaggcctgaatgactccaaaggccaggctgtctctcccttttggtgtccaaagggaagcccacccccagtgggagctctgaccctctgtgtcctgctgcgcccactaagggaggcctcttgctgtgtccccacctctctggtccaagtcttccctcctggaagccacagaacaaacaaggtgggaactagtttatttgtttttctacgtgcgtattgggtgggaagggtgagatgtacaagagagggcttttcagacatgcccctgcctcccgggtggggtggtaagagttccaggaaactcacccttggtgcccagccctgcctggctggcaccatgctacagagagcagggcactgacagccaaccagtggggccttgcccctcccttgccctggctcctggctaagcactggacccgggagccagagagacatggttcaagtccagctcttcttcctgcaagctgtttgctgcctttgaaagctgcttcctcatctgagaaatgggaacaaatgacatctttgtcataaagtttttcatttgtgtgaggactcagggatggacaagacagatacatttcctgcctcctggcacccacagcctgggaacgaaccatcccgtgaacagctgggataaagcttctgaggagaggagcatggatcctgggagcgagtgtgtgcaggccagggagggctttccagaggagcccagttgagctggaacaccagtggggaggagttgaccagcaaaggtgcagggagggatcagcactttgcactggggagcagagtttgtgcactggggaagtcaactcaagtattggagcctcagtttcctgttctgtaaaatgggttcatcatgacagtgtttgatgaggaaaaggactgccggcctacacagcaagtccacatggattttctgagcccctcctgtgcctgaagcccacggttaatggttctgccttagcaggtgcttaccacgtgccaggcactgcactgcactggccactggactgcatgttctgtccatgaggcttggatatccccatcttacagatcaggaagctgaggctatgaaatgtcgacttgctcaatgtcatggaatgactaagtgtggagcctggatttgaacttggctctctggggctccaaagctggctttcttggtcagcagtagggtctgggatccaagtatggggtcccagcttgaccctgaagtccaccctctttcagctaatgcccagggtagttggacctggggccaatttgtgtttccaggttcgtgaaagaggctcctgttgcagttcccgcctgaggctggcggccaaccacatctgggagtggcctccctgtgcccctgtcattacaacggtggctttgaagcagctggcagcactgctgcttgtccacgtgggagggggcttcctggagcccccgcccctggccgggttctgcctgactcccctttcattcccttgcaggctgagcagtgcagacgggcctggggcaggcatggcggattccagcgaaggcccccgcgcggggcccggggaggtggctgagctccccggggatgagagtggcaccccaggtggggaggcttttcctctctcctccctggccaatctgtttgagggggaggatggctccctttcgccctcaccggctgatgccagtcgccctgctggcccaggcgatgggcgaccaaatctgcgcatgaagttccagggcgccttccgcaagggggtgcccaaccccatcgatctgctggagtccaccctatatgagtcctcggtggtgcctgggcccaagaaagcacccatggactcactgtttgactacggcacctatcgtcaccactccagtgacaacaagaggtggaggaagaagatcatagagtgagtattgttagcttcctggcctgtggtctcctcctctgtatccattcacccattcatcatccacccctctatctattatccacccatccgtcgattcatccatccatccatctgtccatccaaccatccatacatctatccatccatctattcatctccctatccatatatcatccgtccatccatccatccaaccacccatctattcgtccatccatccaaccatccacacatctatccatcaatccattcatctctccatctctatatcctccatccatccatccaaccatccatacatctatccatcgatccattcatctctccatccatatatcatccatccatatatcatccatccatacatccatccatcatccagccatctatcatctatccatctatccaaccatccatcatccatcatccatccattcatctattcatttatacatcatccttccatctgtccatctattcatctatccatcattattccatctgtccatctatctactatccatccatctatccatctacccatcatccatccatccattcatccatcatccttccatctgtccatctactcgtctattcatcattccatatgtccatctatccattaatctatccatccatccatatatcatctatctatccacccatcatccatccatccatctacccatctatccatcatccatccatctattcatcatccatctatctattaatccatcatccattactctacccatttacccctctgtccacccttccataggacatttgtctgttcatccattcatccatccacccactcatttatacaatgcatccatccacccactcatttatacaaatgcaaatgcatttatacaaatgcaaactcagccatttacccatttacccattcacccttccacccactcatttatacaactatttactcatctaactctccattcattcatctgctttttttttctttttgagatggagtcttgctctgttgcccaggctggagtgcaatggcatgatctcggctcactgaaacctccacctcctgggttcaagcaattctccagtctcagcctcccgagtagcgggattacaggcacccgccaccacacccagctaattttttttgtatttttagtagagacaggttttcaccatcttggccaggctggtcttgaactcctgacctcgtgatccacctgccttggcctcccaaagtgctgggattataggtgtgagccaccgcatcccgcctcatctttttttattcacctacatatccacgtactcatctgtcccccattaatctacttgtctgtccatctcttcacctacacatccagccttccatttgtttatcttcttatttatacatctgttcatccatccatccatccatccatttatccatctatcatctactcattcatttacccatctttacacttttttgtccacctatccaatctatagatccattgtccactcattaaaatatctatctactcatctacccatctgtcagccatctgtccagccatacacccatataaccaaccttccattcatctaccattttctcatctgaatgtcatttcatcttctcacctacccactgtttctagtcatctagccattcagctatcaaactattcatcattcattcatttattcattcattcattccatttctcatgcttgattgctcacctgcctgctgtccttctttccttcctctccttctctcttctaaccaccaattcattcacccagatctctgtccatccatttgtccattcactcttttgtttgcttagtcactgactcatttattcatttgctcatcttttcttccatttttgcatctattcatccatccatctccctaccttctcttcctggcacacatccagctgcccctcctgggtcttcttcaatcatcacctccattcctggccatccagtggctttcctgaggcttagaaagagctggaaaccccaaggcattcaaccttctttcccataatgacagccttgctgaaagaaaagacagactggagagaagccctggatggggccacagcatgtggcccctatgacgcattccatgccaggcctagctggggacagggagcctccagcccccttgaccaccttgtctggtccccatcctcccccagtgtgttatgctggcatctgcatgtggtttgtgtggcactctgcaaactcagacatcccgggttctgtttccagcatgactctattgtctgtcacctgcagactccctgctttgtgaggttgagccctccctcctggtcctttaggaagcccagggacttccacaagcttttggcagtttggaggagggagcagggcttgcagtctcctagccagctcctcctgagcctcagcaggccctgctgaactgtatcctttctatgtcccggccctgctgtccctaatgtgccctgaattgaccctttcctcaactgctccatgaaatctcctctcggtggcctgtgtgtgtgtcctggaggatggtgctgaggtctggagatgacctggacttgcgtgtcctcctctgtccccctgctggccacagattcatttatctcttggatggagccgattcaccttcacagcccttgcttggtcaagagccgccccctttatttattcacagtcattgattcattcagatgtctctttttcttttttttttttttgagacaggttctttctctgccactcaggctggagtgcagtggcgctatcttggcttactgcaacctccacctcccaggttcaagcaattctccagcctcagcctcctgggtagctggagctacaggtgtgcacgaccacaaccggctaatttttgtatttttagtagagacagggttttaccatgttggccaggctagtctcgaactactgtcctcaagtgacctgcccacctcggcctcccaaaatgctgggattacaggcgtgagccaccgcacccagccagtggatgtttcttgggtgcccactgtctgccagtcagtggggttggccctgaggcttcaggctgagccagaccagatccacttctactcaggcggcactttccgtttagagggtgagacagacaagaagcaagtagctgagcacatggatgtgccatgtgagttgggggaggtgctgaagttagagagtgggtggatacaagaaaggtaatccaggagggcttcttggaggagttgacatttaagcccaaagctaaaggtcatgaaggggcagtcacagagagggagggaagggtgttgtaggtggagagaagtgtgagtgcaagggcctaaggctggagaggctctgcagatgtcgccaaggaatagggcctcacagttgtctgtgctgaaaaatctgtacaacctctgctcagaggtggaaactaagggccagagcagcagagtgcccagtgttcccatccttctgtccccaagccttcccaggtcctgttgaaagctggtgggctctgtatctcccattcccctcccgcaagccctcctccccacccctaccccaggaagtccaggctggtggagtaagtggggcacggctgagccctgaaggctgcctcagtgagatctggtgggggcagtattgctttttattttttggctcaaaggtcaaagttcaggaagaggtaaagtgggggctgcctaagtgccctcattagaggctgtatctgtgcctgtgcccctgtcaacaggagagcacgtcttaccctactgtggatgctaatgatcccctttgccagtacctgccctgagatggaaaatctcaacccctggcgaagaggaagggaggagagtggctgtccccttctcatggcaagacaggctgggtacagccagatgccagctttgtccacccttgcaaccccgtcccacctgcttccacaacctgccctggcctcagtttccccaactgcattccccttcccctctggccctgctgcctcttgttagggttttctctgttcccctactctcccctcttctccctcccagaccctgtgcctccatcttcctccttctctttagtctcttattcattgaacagagtcttactgcatcccaagatgtgccaggcactgggccaggtaagaatgtgacagagagagcattcctgcctcatggtggccctgggctagctctttctctctcagaacctagcacataataggtgccgaaataatgtttgttgaatgactgaatgagtgtctccaagccctccagctcttagtgtctgtttccttcctttctctctctatctcttctcttcccagccctctctgtgccacacccttccgccatctgcctctgtagccccacatctctcccatgcacatacaagctccagacacacagtaggcactcattaataatggtaatatcaactaacatttattgaatgtttaccgtgtggtgggccatgggcaggtacatatgagcatggcctcatttgtctcaaatgtttgttgaatgaataaattaatgggttagttatggaatgaatggatgaaatgcctcatcttttagtctgctgtttctttattttatctttgtttttgtctctttcagtttctctgccttagtaagtactcaataaatgactaatatatgagtgggtgggtgagtggatgggcagttggatggatggatggatggatggatggatggatgggtgggtgggtggataggcagatggatggatagacgagtgatggatggatggatggatggatgggtgagtggatggatgggcagatgggtggatggatgagtgggtggatggatggatgagtagtggatggatgggtggacagatggaggagtgagtggatgggtagatgaatggatgagtgatggatggatggatggatggatgagtgggtggatggatggatggatcagtgagggatggatggatggatgagtgatggatggatgaatgggtggatggatgatgggtgggtaggtggatgggtggatgctgggtgggtggatgtatggatgagggatggatggatggatgggcgggtaggtggatggatggatgggcgggtagttagatgggtggatgaatggatggatgggtgggtggatgggtagatggatggatgagtgatggacggatggataagtggatggatgggtggatggatggatgagtgatggatggatgagtgatgaatggatggatgggtgggtaggtggatgggtgaatggtgggtgggtggatggatggatggatgagtgggcagatggatggatgagtgatggatggatggatggatgggtgggtggatgggtagatggatggatggatgagtgatggatggatggatgggtgagtggatgggtagatggatggatggatggatgaatgatggatggatgggtggatagatggaggagtgggtggatgggtagatggatggatgagtgatggttggatggatagatgggtggatgggtagatggatggatggatggatgagtgatggatggatgggtggatagatggatgagtgggtggataggtagatggatagatgagtgatggatggatggatggatagatggatgggtcggtgagtggatgtgtggatggatgggtggatagatgtatgggcagtctgtgcatttctttctgtttgtctccacccaacacacagtaggtactagctatagtttgttggataaaacattacttagtttttacatctgccccaactacctcaccctgttccttgtaaggcttcagctgcctgcccgccaccacagtctctgggtccctaaggccagggacagtggggcaggcaggggatgagccctcccatcaacttgcctccctacctcctccaggaagcagccgcagagccccaaagcccctgcccctcagccgccccccatcctcaaagtcttcaaccggcctatcctctttgacatcgtgtcccggggctccactgctgacctggacgggctgctcccattcttgctgacccacaagaaacgcctaactgatgaggagtttcgaggtgagccacccagatgggcatagccagtgggacagccaggggtgtgggggaagcctggcattgggggccccctttcccctcagcttctttctttgggtcggtggactgcattggcctggaaagtgcactggacagggagtctggtcctgtgtgtccttcaccatgttacttaacctctctgtgcctcagctacctccatttattcattctttcattcattcagcccttatgtatgaaaaggttagtgtagtgggtaagcagagtccacctacctgggttcagattctacctttaccagttaagcgatgtgtgacctctctgagcctccgtttcctcatctgtaaactggggaataatcatagcatactcctggctctcatcccacagagagcccagcgcaggcagctggagtcctggagctcctgctcccctgagggaaggtctggagggatgggcaggtgtctgggctggtagtcctgattctacttcttggggtctgctccaccccagcctagctttagggctccacttcctaggctgaagccccagcccagagagctaacccttcagccttgtccagattcaaaacacccacctcaggacaccggcaccctccacagccccaggccttacctgtgaacacctgcacccaaatcagccacctgcaatgtgctgggttctgggtaagccattattaaactggccgtgatctcacaagtcaagataccatgtcaagaagtgtgacaccaaggctgggcatggtggctcacacctgtaatcccagcactttgggaggccaaggcaggagggttgcatgagcctgggaggctcaggctgcagtgagctgtgatcatgccactgcactccagcctgggtgacagacaggaaaaaaaaaaaaaaaagaattgtgatacctgctatgaagaagggcccatcttggaaggcggaccatggttggtctacagcctaagtctgaggaggcttcagggatgtcagaagaggcttttttttttttttttgagacagagtttcattcttgttgcccaggctggagtgcaatggcatgatctctgctcactgcaacctccgcctcctgggttcaagtgattctcctgcctcagcctcccaagtagctgggattacaggcatgcgccaccacgcccggctaattttgtatttttagtagagacggggtcgctccatgttggtcaggttggtcttgaactctcgacctcaggtgatctgcccgccttggcctcccgaagtgctgggattataggcatgagccactgtgcccagccagaagaggacattttttaagacttcagttactttaagtaaattaagttcccaaacagggtgaacaagtctgtgctacatcatccacatatacctttatcaacctgttttttttttttttttcttttttttttttgagatagggtctcattctgtcacccaggctggaatgctgtggtgtgatcacagctccctgcagccttgaacttctggcctcaagcaatcctcctgcttcggcctcgagagtagttgggactacaggtgcaagctaccatgcctggctaaatttttttttttctttttttttaagagacaggtctcactatgttgcccaggctggtatcaaactcctggcttcaagcgatcctcctgcctcaacctcccaaagtgctgggattacaggcatgagccactgaggctggcctcaacctcattcttaccctgaaacaatacgatgcagtatcattgtgtccatcaggagacaattactggggccgggtgcggtggctcatgcctataatcccagcactttgggaggctgaggcgggtggatcacctaaggtcaggagtttgagaccagccttgccaacatggtaaaaacctgtctctactaaaaatacaaaaaaaaaaaaaaaaaagccaggcttagtggcacacacctgtaatttcagctacttaggaagctgagccaggagaatcacttgaacctgggaggtgggggttgcagtgagccgagattgcaccactgcactccagcctgggcgaaagagcgagactctgtctcaaaaaaaaaaagaaaatacaattgctggatttatgaaaaatattcattcatggttcctggccacgcgacgtggcctcgtttggaggcacaagtttagagctgtgggaggacggggcttctctctgctcctggagtagctcagtgatggcatgagtaatctcattcggagataacccatgtttaagccctggccaaatggcctctcctggtccaccaagtacgtgaggcaaaagtgcggaatcttggggtagagcgaatcctgggagatggatgctggcacctgtgccttcagcaccaggctagcttgtcaaggcctctggcttcttctgaattcaggactgagttgggggcttctagcatagtccaggaacccagatgcatgtgtgtctgtgcatgagtgtgggtgggggactctaagataggctttggaggtgggtctctgaaattgcagaggctagcgtatgtgcatagagggagacttactgtgaggtccatgatactaattaagtgccagggcccctggctaaggccctttctgaggtcctcgacctagtctacgtcccacaaaacctggatccgtccctgcatggctaaaaggtcatgagctcatctgattatcagggaagtctgggacgccctcctgtgcccccacctcccctccgcagagtttcacaacctccaatttggcaattgtcaatttagagcccctggctacagcaccccaccctgggcagagccacttcgccacctggtggctggttcctggaactgcatgttccacctcatctctgggaagatgctgctcctgacatcttctcccaggacccaggcgtcccctccctgggtctataacctgtgtctgaaagcccgaatccagggtctctagttccactttgggtcacctatggtttggaattacctggggtgcccagctctcgccttcattcaatgtgtgttaactcagcaaatggttgttgggcacctaccacataccaggcactgtgcttggcagaggccgaatgatagtgagcaaagcagacatcaccctgccctcaaggtgcccacaggctcctggacaggaccatcattgaccaagcaaccacataaataagcacacagttatgaactgtaacaggtgtcaacaaaaggctgtactggaggatttgacctagtcagggaaaatccaggagagcttcctggaggaggtaacacttgagcagagtctgagtgagttgcagttaaccaggtgaaaagaggagggaagaatgtttcagattggggtgggggttcagagacagcaggtgcaaagaccctgtagttcaccgtggtctattgcagtctgaaatgaccattccagctgctatgtggaaagtggataaaggaaggccagagaggctgggggaaatgagggaaataaaggaggtgtcttaggcatgtgagagggatggtggctgggccacattattccatgagaggtttggtgtcgcctctgagctgggcgccaggtggacagcgggaaagcaactgggaacaagacttgtcccaaacaaccctgctcctggaagggctgagactagaattcaggtctcttgagtctgccccactgattcccggcatttagggagacggttcctaaatcccgtctcatggattgataacagcaacagtaatatttatcaaagactgctatctgcctggtactgggctaatcaacaaacactgattagctctttgatttcccttcatagctttaatttagccagaaaggaccctaagcagagaaatggtcatacagctgtggggagcaaagccaggcctcaaacctgaggtgcctggcttcagaacgggcacctgaacccacacctgcgtctcccaccctctggccattcctgagcccctggctgattttgccctgtccttgattcacaggggagttttcaacttactcttttgagatataaatcaactcaggtaaccataaaaatagctacaacagaaagaaacttgcaaagagacatcagcaagcgttagtgagaggtgttaaggacccgctagtaccaaacggagagttgacttcatgagaaagattcgatagtggatgaaaccttcagggttattattgttgcaccccctagaacccccaagattctctcctggatcccctaaggtcagttcacatccactgtggcacacagtcccacactttggggaacgctgcacccctccactcccttctaggggcaccagtgtaaatgcttcatgggaaaaggattcgatgctctgacaggtgggtgaatgctgcctagtgtgtcttgcttttacaggttcacagtccctgttagtgtatgaaaggctctgagaagtcctgtagtaaggaattatgattggctttgtttaacccagcattctaaccatttatttgtttatgaagcactttacataaatcttttcgagggccaggtgtggtggctcacatctgtaatcccagcactttgggaggctgaggtgggaggatcacttgaggccaggtgtttgagaccagcctgggtaacagagtgagatcccttctctacgaaaataaaaattaaaaaattagttgagcatggaggtgcacacctgtagtcttagctgctacttgggaggctgaggtgggaggatcacttgagcccaggaatcggaggctgcaatgagctaggattgcacaactataccccaggctggatgacagagcgagaccctctctctcaaaaaaaaggatattaataaataaaaataaatacaaaatcttcccaaataagattaattaaataaataccaatctgtaggctgaagcctctcacatttcaaagcacctaaccccatgcgtttattgtaccctctcagcaccactggaggcagaaagatagagtggccctgggtccccactggacagatgaggaaacaggcttggagaggagatgttgacagccaggacatctgaccccctacccagtgttctgtaccccgatgcctggaagttcaaggtcatgggctggagcactgcgtcatcttgtgtgtctctcttgctagagccatctacggggaagacctgcctgcccaaggccttgctgaacctgagcaatggccgcaacgacaccatccctgtgctgctggacatcgcggagcgcaccggcaacatgagggagttcattaactcgcccttccgtgacatctactatcgaggtggggccccgggctgggcaggggtgccacgggggctgatggagacgctgtcctttgcttgtctgactcctgagacttttgatctgggcctaagtgccagcatgtacccaggacctgacaaatggatggatggatggatggatggatggatgcatggatgcatggatagatggatggatgaaggaacggtaactaccccttccaactttgtttcgagtttcagaatagaagattccactgggtgcggtggctcttacctgtaatcccagcactttgggaggccaaggggggcagatcgcttgagcccaggagttcaagaccagcatgggcaacatggtgaaatcctgtcttgacaaaagatacaaaaaaaaaaaaataaaataaaagaaggccaggtgcggtggctcacacctgtaatcccagcactttgggaggctgaggtgggcagatcacttgaggtcaggtgttcaagaccagcctggccaacatggtgaaaccctgtctctgctgaaaatgcaaaaattagccaggcgtggtggtgcgcacctataatctcagctacttgggaggctgaggcaggagaatcgcttgaacctgggaggtggaggttgcagtgagccaatatcgcgccattgcactccagcttgggcaacaagagcaagactcatctcaaaaaaaaaaaaaagatgcaaaaaaagccaggcttgttggtgcacacctgtagtcccagctacttgggaggctggggtgggaagatcacttgagctcagagggtcaaggcttcagtgagctatgattgtgccactgcactccagcctgggtgacagagtgagaccctgtctcaaaaaaaaaaaaaaaaagattccaagattctgagatgcagcgagtctagtgatcatgaactcgggatctggccctaagatgctgtggtggcggatactctaaggctctatgataataagtcctgagttcacaagttctaagaggcaaaggcagcagggggccaagaactgggccaatccccagttgagattctgtaaatcagagttgaccttcagatgcctggatattaagattcaaaatccatgaatattatatcttgagtccaaaattctgggaggccaaggtactgttgtttcctctaggagttttcttttttttgagacaaggtcttgctctgttacccaagctggagtgcagtggtgtgatcatggctcactgcagccttgacttcctgggctcaagggagtctcccacctcaccctcccaagtagctgggaccaccggcatggaccaccatgccaggctaatttttaaaatttctgtagagacagggtctcactatgttgttgtattagcccgttctcatgctgctataaagaactgcccaagactggataatttataaaggaaagaggcttaattgactcacagttccgcagggctggggaggcatcaggaaacttacaatcattgtggaaggggaagcaaacatgtccttcttcacatggtggtaggaagaagaagtgccaagcaaaagggggaaaagccccttatagaatcatcagatctcttgaggactcactcactatcatgaaaacagcatgagggtaactgcccccatgattaaattacctttcacagggtccctcccatgatacatggggattatgggaactacaattcaaggtgagatttaggtgtggacacagagccaaaccatatcagttgcccaggctggtactgaactgctaggcttcagcaatcctcctgcctcagcctctggagtagctgggaccacaggtgtaagtcaccaggcccagctaatttttagcatttctatagagatgggatctcactgtgttgcccaggcttgcctcaaacgcctgggctcaggtgatctccctccttggtctcccaaattgctgggattacaggcgtgagcctgcgcctggcctcctctaggatttttaaagcatcttatgaatctaaaaacttctcacattcaggattccacaaactaggtatccttcaggcttgagattctgcttctgcgatggatcccagggaatatccaaggacctatttgctgcccttgggtgtcgctgggcaggactctgcctgcatcccccaccccccaatttctacgtcctgcaccctacccccacccccagcaagcctggctaggtctctgctccgccaggaccctggatgaccgtcccctgcccccaggtcagacagccctgcacatcgccattgagcgtcgctgcaaacactacgtggaacttctcgtggcccagggagctgatgtccacgcccaggcccgtgggcgcttcttccagcccaaggatgaggggggctacttctactttggtaaggaggggcctggtgggggctgacagcatgctggagaagcatggcgggagatagcatgatactggttggtgtctgcagccctgaccatcacccagacacccagggccactctggccatgagcgcaggcagcactctggaccacaggctgcacgttggtcttggtcacagggccgttgcctctgaggtgtaagtgccatggggagtaccatggacctggattcagatcctcactccagccaggcacggtgtctcacacctgtcatcccagcactttgggaggtcaaggcaggaggatcgcttgagggcaggagtttgagaccagcctaggcaacatagcaataccctgtctcttttaaacatttaaaaaatggctgggcacggtggctcatgcctgtaatcccagcactttgggaggatgaggcaggtggatcacctgaggtcaagagttcaagaccagcctggccaacaagatggtgaaacccatctctacaaaaataacaaaaattagccgggcatggtggtgggtgcctgtaatcccagctacttgggaggctgaggcaggagaattgcttgaacctgggggacagaggttgcaatgagccgagatttccccattgcactccagcttgggtgacagagtgagactctgtctcaaaaaataaataaataaataaataaataaataagttagatggcatggtggcatgtgcttgaagtcccagctgcttgggaggccgaggctggaggatcacttgaacctaggagttcgaggctgcagtaagccatgattgcaccactgcactccagcctggaaaatagagcaagaccccgtctttaaaaagcaaaaagaaaagaacaaaaaaaaagccaaatcctcactctgcactttccaggcatgtgacctcacttccctgagcctcaccttccccagctgtgcagtggggatcacgagaggcccttgggctgtgatgtcagcgcccagctctgtattgtctgtgtgctttaatctggtttatgctgggaccaacagccccatcaccaggcccaaagcccaccactgccgttgtcatcactggactcatgaaatattttgaattttgcccctgcttaaaggcattcattatgtgcagctcagggacaaagtcacacaaagaattccatcatcagctgggcgcggtggctcacgcctgtaatcccagcactttgggaggccgaggtcggcggatcacttgaggtcaggagtttgagaccagcctggccaacatggcgaaatcctgcctctactaaaaatacaaaaattagccaggtgtggtggcgtgcgcctgtaatcccagctactcggctgaggcacaagaactgcttgcacccgggaggtggaggttgcaatgagccgagattgtgccactgcactccagcctaggcgacagagtgagactttgtctcaaaaaaaaaaaaaaaaagaattccatcattggatgtgtccagtccctcacagcctccaaatcgcgtggctgtgcccttaactagccacaccccatctccctggcatcacccagagaaacgtgcagttcatatccactgctggtgctgtctccgtcattatcctcagagcgccacggtgtccgtcccccgagtgtctgcaggcagagtcccaccctgggcccccttcgctgacctcccacccttcaccctggcccgcaggggagctgcccctgtcgctggctgcctgcaccaaccagccccacattgtcaactacctgacggagaacccccacaagaaggcggacatgcggcgccaggactcgcgaggcaacacagtgctgcatgcgctggtggccattgctgacaacacccgtgagaacaccaagtttgttaccaagatgtacgacctgctgctgctcaagtgtgcccgcctcttccccgacagcaacctggaggccgtgctcaacaacgacggcctctcgcccctcatgatggctgccaagacgggcaagattggggtgagtgtgcggctgggggcacagctgatccacctactcgtacccctctgcacacacacacgagggtctgctgctggtattcattattaatacgtgcatgcacctcccaacatgccaaccccagtgtgcagatgtcccagctcaagaacctgctatggctccctagtgtccagccaagctccttagcttcatccccgagcctctcgcctcatgtcaccctactggatgttcaccactccacccccaccagccaggatgagccactgataagaaactgagtccccgggccctagcccagcggtgctcccagcctcaaacctgttgaatggccctgccccagttccttcccttttctgggccgcgcagcatggggcctggagaagggtttctcaacttcagcatgattattttgggcggcaggctctttgtggtggggaccgtcttgtgctattgccagacattgatctgcatcccgggcctctacccaccagatgccaggaacacctccccttacacttgtgaccaccaaaaatatctccagaacattgctgaattgtcctctggggggcaccatcgctggattgggaaccaagtctggagtatgctagaggcaggagcacctgtccaagccctggcgctaccacttcccagtgtgtgacctcagacatctcatttcccttttctgtgcctcagtttccttgtctgtaaaatggggatataagagtgtcctctggtgtggtgttgtgacaaatgcggtgatccacataaggctcttaggaaggagcctgggagaagcagtaagtgtcacttacatgtctgtaatgccagctagttgggaggctgaggtgagaggatcgtttaagtccagcctggattatttgagatcccaaataaataaaaaccaaaataaaaaaaaatgtagcaaaaattactaaaattgcaattataccatggccctgaggcagtagaaaggctccagtttaaatcctggctttggctaggctcagtggctcgtgtctgtaatcctagcactttgggaggctgaggtgggaggagcacttgagcccaggaggttgaggctgcaatgagctgtgatagtgccattgcactccagcctgggcaacagagccagaccctgtctcaaaaaaccccaaaatcctggctgtgcacagtggctcatgcctgtaatcccagcactttgggaggccgaggtgggcggatcacctgaggtcaggagttcaagaccagcctggccaacatggtgaaaccccgtctctactaaaaatacaaaaatattagctgggtgtgatagtgggcacctgtaatcccagctactcaggaggctgaggcaggagaattgcttgaacctaggaggagagggttgcagtgtgctgagatcgcgccactgcactccagcctgggtgacagagagagactctgtctcaaaacaaaaaccccaaaatcctaacattgcctgaccttgggcaattcccacccctctctgtgcctccgcttccctgtgtgtaagccagggaaggaggagtggtaacaggaaggaccgcatgtgatcgtcagtattataattcacatgtcattaagatggattcattgctattttaacggcatgaagaagatattcattacaattaagatgttgaaggctcatccaggttctgtctggctccagctgactggttaagtggcttctggaacacccttcgtttttcccagcctccattctttatctgtaaaccaagataataagagcaagaattaaacaagatgaggaaagggtcctccagcagccggtgcttagctgttttctggggaggcgtcatgtgctgagctgggcccagccctgggggtctttccagtgtgagccccctgaccctcctggccccctgtgcagatctttcagcacatcatccggcgggaggtgacggatgaggacacacggcacctgtcccgcaagttcaaggactgggcctatgggccagtgtattcctcgctttatgacctctcctccctggacacgtgtggggaagaggcctccgtgctggagatcctggtgtacaacagcaagattgaggtgggctccaggagggggcatggggtgtgaggaaggaggggcagggctgggagtagggacagggccctggggctgggctgggggagacagccccagcctctaggacccaacgtggtgggtctgttggctgaatgcaagagaaggtgccaactaagtgcccagaacagtgtctgccatgtgaggaaatgagcaagacttgtgggaagatggacttttggggcaggtaggactgggttgggatcctggctctgtaacttacatgctgtgtgtctcaggacaagtggctccacctctctgggtctcagcttcttcatttgtaacctggggataaggatcatggatatcccatggggttcttgggaggaccaaagaggttaattttagaatggcttggcacagagtaaacattatgtcagcttttactactcatggttgttatatgaacttttgaaagctcttttttttcggtcaggcatggtggcttatgcctgtaattctagcattttggggagccaaggtgggcggattgcttgaagccaggagtttgagactagcctgggcaatatggcgaaaccccgtctctaccaaaaaaaaataataaaaatgaaaattagctaggcatggtggtgcgagcctgtagtcccagctacttgggaggcgaggtgggaggatcacctgagcctggggaggtcgaggcttcagtgagccgagatcatgccactgcactccagcctgggtgacagagtgagatcctgtctcaaaataaacaaacaaacaaacaaacaaaaaaccaagcttttttttccctacttagcagtattttgtgaacgtcgttctgtacttttaaatattctttggtaatattgtcgctgcatgtaaacataccatattcaaatgaactgttctcttattgctggtcgcttgggtttgtttctgcctttatcaggaataacactataagagcatctctgtggctgctttattgcacaaatcatgattatagagaaactcaagttaataaagggctaggaagctataaaaatggagcagaaaatgctggggactgggtgcaggtggtcttccttctagccctgccctgtggcttactggtctgtgagcttggcttccttgcaagacctcatttccctcattttttgaattagtgaccatcttgatttaaattagtggtggcaggaggtttagcatctcaggtgcaaactgattgattagtagtgtctacccagggaactgtatgaatacaattgtgcagggctcaattattgatgtctgccctgggttcagaattggagaattgtggtgagtcaatcatttatcatctttgggcaaaatttctcaatctttctctctgaatcagaatttctgagagcggaggccaggatttatacttgcagcaagttacataaattattttgcggccagcagcttggtactatccacagattggagtttgggaaccatgagaataaatgtctttttttcttttttgagatggagtctcactcttgttgcccaggctggagtgcagtagtgcgatctaggctcactgcaatctccgcctcccaggttcaagtgattctcctgcctcagccttaggagtagctgggattacaggtgtgcaccaccacgcccggctaattgttgtgtttttagtggagacagggtttcaccacattggccaggctgatcttgaactgctgaccttaggtgatccgcctgtcttggcctcccaaagtgctaggattacaggcatgagccactgcggccggcctgaaaataaatgtcttttaagggactttccagttccgagttctgtgatgctagaatagggtggaaaggtacattgaggcagaattgggcagctgaatccattcatgaatccgtgaatgcagctgaggaatggatggaaagagaaagcgctgtccgggtggagggtgggggaaggcacacccgaggcagcctgcctggaccccccacccatctcaggaaggcagcccccgaccaccctgcctctcttagaaccgccacgagatgctggctgtggagcccatcaatgaactgctgcgggacaagtggcgcaagttcggggccgtctccttctacatcaacgtggtctcctacctgtgtgccatggtcatcttcactctcaccgcctactaccagccgctggagggcacagtgagtgcccggggaccgggcaggggctggggcaggcactgggctgagccatgcaggactggggcacaacctcatccttctgggtcccctgtagggggacccggagaaggtttaggaacaggttggggaggcgccctccagcatccacgggtggccctgagctgggaggaggaagactcaggaggaagagagtgaaggaggaggctccatgggatgccgatgtttcgggcctgggggaacatctggattgggggccagatgttggaggggctgggtgacgacctgtgtgcccttgctgctccccagccgccgtacccttaccgcaccacggtggactacctgcggctggctggcgaggtcattacgctcttcactggggtcctgttcttcttcaccaacgtaagtgcctggcccccgtgccccccaccctgcctgccctcctcttctcttcctgcacctcttttctctccctctttttctcttctctctcctccaaatggtccttctcctttccttcctccttttattttcccatttctcttctacctcctccaatcccacgttctccatctctgcttttttctccttttctaacaggaaagagtcctttgtcttttctctgtaccagcctctgcctccctctcttctatccctttctctgtctcctctctcctcctctcctctcctgctggccccacccctttcacgtgccccctcctgtcttccagatcaaagacttgttcatgaagaaatgccctggagtgaattctctcttcattgatggctccttccagctgctctagtgagtagaggtccctgggccggcagcttctgggtgaggaaggtgggtttgggctgctaggtcgtccagattcaggagagaggtgattctgttagaaatgaatgcacccaacctgggcagctctaacccaaagtcaggacaaagccacaaacaatagggtcttctggttcaagaaaaattctgattgctagggagttatcatatacaacatggatagaaataattttaacctcttatgctggtgaatgattgctaatgtctgcctgaagtgccatgttaagaattttgcacctgtgtctgtgtttagtgggaaagagttgggattgattaatgatgtctgcctgggacagagaatgagagagttactgagtgtgtgttacctctttcacatttcccttagagttggagaatgatgaaattcacttagccacaaaatctccactgaacaccactaaatctttctttagcaattccaaggggcatcacttcaggatcctgtgggacctcaggattaattgccagctaattgaatgttcttgttaacagaatgctggggaaccctgctaatccactttgtttcttttctgggggtctagaaggcattgggaagtcctgataccctggagggcttggaggcgtgtcttcccctccagagcctcattgtcccctctcccctctggcctctcttgtggtctctgctgcactgcagcttcatctactctgtcctggtgatcgtctcagcagccctctacctggcagggatcgaggcctacctggccgtgatggtctttgccctggtcctgggctggatgaatgccctttacttcacccgtgggctgaagctgacggggacctatagcatcatgatccagaaggtacgggctgggaggaccctctggactcgtgtgttcctggagggagtcacacacacaccacatgcacacttatgcacctgcagacctgaggatgctgggtaccgtgggggcaggaggcatggtctggacactggggtgggaccagggtggagatggaggaatggggaaagtgagaaaccatgtgtctcctctttgcctccataatcccgctggggtctttagattctcttcaaggaccttttccgattcctgctcgtctacttgctcttcatgatcggctacgcttcaggtgagctctgggtgctcaggtggtcctggcaggggtggtgcaaggacgggaacagtagccatgatgtataggggacaatagcagccttgctgagttcttttttttttttttttttttttgaggtggagttttgctcctgttgcccgggctggagtgcaatggcacaatctcagctcactgtaacctccacctcccaggttcaagtaattctgcctcagcctcccacgtagttgggattacgggctcctgccaccacgccccactattttttaatttttttttttttgtatttttagtagagatggggtttcaccatgttggccatgctggtcttgaactcctgacctcaggtgatccaccctccttggcctcccaaaatggtgggattacaggtgtgagccaacgcgcctggccactgagttcttatttgtgtgccaggcaccagactaagtacgtttccatccttgcctcccaacaagcctgtaagctaagtgcctttattatcccctattatagaaaaggaaactgaggcttaggagggttaaataactagcacaagttcaaaagccagtgaatggtggccgggcgcagtggctcacatctgtaatcccagcacttcaggaggctgaggcgggtagatcacttgaggtcaggagtttgagaccagcctggccaacatggcaaaaccccgtctctaccaaaaaatacaaaaattagacaggcatggtggcgcgcaactatagacccagctactcgggaggctgaggcacaagaatcgcttgaacccagggggtggaggttgcagtaagccaagatggcaccactgcactccagcctgggcaacacagcgagactctgtctcaaaaaaaaaaaaaaaaaaaaagctggtgaatggcaaaactggagtattagctattgctacaaaggaagccacctaaagtggggcttaaaatagcacccacttattattattattttttttgtggcaaggtctcactctgtcaccaaggctggagggcagtggtgctcttggctcactgcaatctctgcctcctgggttcaagcgattctcttgcctcagcctctcgaatagctgggattacaggcgtgtgccaccacgcatggctaagttttatatttttggtagagatggggtttcactatgttggccaggctggtctcgaactcctgaccccaagtgatccacccaccttggcctcccaaagtgctgggattacaggcgtgagccactgtaccaggccaacttactattgcttatgagtcaatgggtcagctgggtggctgtgctgccctgggccaggtttggctgatccctacaggctcttgtgcctgtggtcagctggcaggctggctgctggctgactggtctagctagtatggacttggttagagggggtttgctatctatcttccacatggtcactcatttctggacagctagcttgggcttgtccacatggtggccttagggttccaagaacatgagcagaagtgttcaaggacacctcctggcatggcatcactgctgccttactctgttggccaaagcaagtcacaaggccagcctcgattcaagggatggggaaatagacgccacttctttttttccattttttttttttggtggaggcagggtcttgctatgttgcccaggctggtcttgaactcctgggctcaagcagtcctcctgcctcagcctcccaaagtgcaggattataggcgcgagccactgcacctggcctagactccacttcttagtgggagaagctgtaaagccacattgaaggaggatggatacatggaaggataaaatttaataattaaactagcagcccaggtattttcttaaagcccaacatcagctcccttgatataccttcttcgtgatgtcatgatgccactaagaagcattctgggacctcagtggcatgggtcatgggagaaggaccagggaccagggctggagaaactgaccaagtccttgggctgatccccgaggtgtgggtaatctgacatcaatgcccagcatccaaaggggaatggccaactcaggttagacctggacacatacacatctgagcaggttcatctggggacgagcctggcacaggaatctgacaagggtgatattttaacccacgatagtggccaagtctctaggtagattattggtgggaagtggaattgtagttttcactggggagatagggacagggtacagctttcccttcccagggatcacactggacaaactagacagtgtcaagggttcaacaacagtttgggattcaggtcagggatctagccctactgcagtcctagttattgaaactaaggagaaacaagggttagagtagcagcttagcagtcagcttggttgcaggtcttctccttataggatgcactagatctcaattctgaggctgacatgacataaacaggacacacatgcttctgttcccacactttggtgtccatagcagacatcactaatggatcacagaacagtttttccggtgagtccagacaaggtctcagaatccttctcaacacagtgtttcaccaggtactatacaactgaagaacattagcatatgagttgaaatctgcatactctaatccctggttgcaggcagtatgacattctgtgccccactgactgatgggactgagtcttcttcatgctcccctccctggctggtttagggacaggttgttgctgccaaactgtgttgagaaggaatctgaagctccacctgggcttagtaggaaaggagaaccatgatgagtttgagatgtctagagcaggagaggccccttagagaacacggctttggggacagtcaggactgatgcctggtttcagcccccacttttcctctctgggttggggtggagtgggaaactgtcagagagagagtctacccctgcgaataggggcattccagagcccccaagacctctaagaatggtaggccgcattaggatttcccaacactattgacatttgagaccagatcattcttcgtggcggggaccatcctgtgcattgtagggtgtcaggcagcacccctggcctccacccacctgatgccagtagcacccccacccccagttgtaacaaccaaatatgtctctagacattgtcaaatgtcccctggtgggaaaaactgagaccctccctggactagatcctgaaaaccttttccctcccggtagcagggaaccaccaggttgtgtaaggaggggtgaactgtcccaggttggaaacagagcaggtcaaaactcctacgcttatcagtagtgggattgagcctgtgagtagccactgcactccagcctgggcaacatagcaagaccccatctcagaaagaaagagagagagagagagataacctcttccttatcagcaagagtttatggaaaggcttcaaaggttttgggatcaggaggacctgggtctggtgtggcttggctgatgtgtagggtgacatgggtcagcgtgtgggccagcgtgctccgctcactaggcctcagctttctcctccagcaaatgagaatgacaccctccacctctctgtgggtgtgctcacactcagtgagtgccacccctatcctcccacagccctggtctccctcctgaacccgtgtgccaacatgaaggtgtgcaatgaggaccagaccaactgcacagtgcccacttacccctcgtgccgtgacagcgagaccttcagcaccttcctcctggacctgtttaagctgaccatcggcatgggcgacctggagatgctgagcagcaccaagtaccccgtggtcttcatcatcctgctggtgacctacatcatcctcacctttgtgctgctcctcaacatgctcattgccctcatgggcgagacagtgggccaggtctccaaggagagcaagcacatctggaagctgcaggtgaggccccagggcccccagccccactctaccagccaccctcgtccttccgaggagacccacccgactggcttcctcggccttccactctgagcaagcagtgtcttctcattctccctccacttctctgtcggtaaaatgggcatcagaggctgctgctgacttcccagagctgcctagtgaattttgaggtggcttcttgcctggctgccagcagtgggctcagattctccttgtggtccagctcacaggacacagtcggctccacctagcatgactgagtgacttctgccggctcagaaagtgctccgtgggcatcagcgtttcagcaggggtcccacgctgagcccaggggcagcttttgtgctctagcactccagcacagggatgtcagcattctcatgggggtctttttctagcaactgtgagcatgcttcctagaggagaaaccaatggggacaggggccgccttggcccggggagctgcagaaagtttttacttaccaaaagctttctatgcaatcctggaaagaacaggccctgggatcacagccctcccaggccaggtgcagcctacaaacctggtgtcctaataaacagtgctgccccacggcccaggaatacagcacccgtgtttaccttgactgtgcatttcaggaaaatggtgcagtgagaaaaaagggcccaaggttgtcctcccaggactgggtctgagggaaacagctctggcctgctcttaacctttatctatattgcttacttcattgggcctcagtttccccactgggcattactcacaggatgcaaactgggcatcctgtgggctggagtgcaatggtgtgatcttggctcactgcaacctctgcctcccaggctcaagtgattctctgtcctcagcctcccgagtagctggggctaaggtgtgcaccacctcacccggctaatttttgtattttttgtaaagatggggtttcaccatgttgcccaggctggtcttgaacttctgagttcaagctatccacctgccttggcctcctaaagtgctgagattgcaggtgtgagccactgcacccagcatcagaccattatattaaaaacaacaacaacaacaaaaaactgcaaaatttaaaaattaagagattccctatgaaaacccagatttctggcttttcttgaaaagttggaagctccaggcagtgcagggtccggattcctgcctggcagccctcaggtggggtgagtggcagctgcccccttacacgtgggcatttgctccctgttctccccagtctctacccctccctcactgagaggcaactgctgtgtaagtgtgatagggcttgggcggcagcctttctgcacctgatcctgtttcacccatttgttttcctgcctgccacctgtgggtatttgagtttataaaccctgtgtctagtggggagtaggagtctaaatgcctagttctgggcccaccctggcccgttgtctcatttctgccaccagagcggcaggcgcaggctgtgaggctcaccgatgtccctcctgaccctccctccccgcagtgggccaccaccatcctggacattgagcgctccttccccgtattcctgaggaaggccttccgctctggggagatggtcaccgtgggcaagagctcggacggcactcctgaccgcaggtggtgcttcaggtgaggctggggcagtggggccaggatggcagggcggaactgtccccactggctcggggcccctgctgctccagcgtcgtctacccattgcaatttctggagccactgaggccccaagaggcccgagcagagttcatttccaccaggcgatctcaggcaagtcagcccacctctctcagcctcagtttcttcatctgtggaatgagacaatgatctcacgggctcctaggctggcggtgcggattagacaggtcagcacgtgagaagtgctcagccagtgcccgacgcgcatcgggacgccacaggctcccctgttcttgctcagggggaagcagagacttggatggtgggttcattttagagcatcaccctgtatctaccaaacagtggggtgagctctagtgccctcggtgaaatgggaagctgaggaatgtgcagtttccagggctggagacctcacccagcccatctgcagaatgactccgtgttccagaggcacagggagtgccagcttcttaggggaaccccttcatgaatcttttctttccagttgattcattcattgtaaagtggttgtcagcatggagcataagcagaatgtttggagtcagacaaagtcagtttcttcatctgtgaaatgggaacaataatagaacccacctcctaggccatccgatcagttcaattccattttttgtttgtttttagaggcagggttgctcaggctggagtgcagtggtgtgatcatagctgactgcagcctccaactcctggtctcaagcgatcctcccacctcagcctcctcatgccaccatgtccgaccaatttttaatttttttgtagagatggggttcttgctatgttgcccaggctggtctcaaactcctggtctcaagcgatcttcccacctcagcctcccaaaatgctgggattacaggcgtgagccaccacacccagcctctgttcagtttgaatccaaagctcaaatcttggctgggtgtggtggctcgtgcttgtaatcccagcactttgggaggccaaggtgggtggatcacctgaggtcaggagtttgagaccaccctgggcaacatggtgaaaccctgtctccactaaaaatacaaaaattagtcgggagtggtggcatgcacctgtaatcccagctactcgggaggctgaggcaggagaatcgcttgaacctggtaggtggaggttgcagtgagccgagattgcactactgcactccagtctggcggacagagcaagactctgccttaaaacaaacaaacaaaaatgaatagataggataaaaaattaaagataatatgtaaaaaaaaaagataatatataaaaaaatgagtggataaacaaaatgtgggctatgtgtacagtgaaatattatctgggccaggcgtggtgactgtaataccaacactttgggaagcgaggcaagaggattgcttgagcccaggagttcaagaccaacatagtgaaaccccatctctacaaaacgtttttaaaaaattagccaggtgtggtggcatatccctgtaatcccagctacatggggggctgaagtgggcggatcacttgagcctgggaggtcaaggttgcagtgagctgtgatcgtgccactgcaccctagcctgggcaatggagtgagaccctgtctcaaaagaaggttaaaaaaaataatttctgcttgggggaatggaagaattttggaaatagatagctgtgatggtcacacaatgtggatgtgcttaatgccactgaattgtatactcaaaaatgattaagatggcaaattttttgtgtgtgtatacacacacacacacacacacacacacacgtctttttttttttttttttgagatggagtcttgctttgtcccccaggttggagtgcagtggcgtgatctcggctcactgcaactgcctcccaggttcaagtgattttcctgcctcagcctctcgggtcactgggactataggcacccgccaccatgccccgctaattttttttttaattttttttaatttttagtagaggtggggtttcaccatgttggccaggctggtctcgaactcctgacctcaaatgacccacccacctcggcctcccaaagtgctgggattgcaggcatgagccaccacgcccagccttgttatgtatatgttaccataataaaaaaataggagggtgtgctggggatggtggcatggagagcgtctctgaggggttccccatgaccctctgcttgggccctgccagggtggatgaggtgaactggtctcactggaaccagaacttgggcatcatcaacgaggacccgggcaagaatgagacctaccagtattatggcttctcgcataccgtgggccgcctccgcaggggtgagtggaggggcgggtgcggaggggagccccagtccattctcatcacgaatttgctttgagcagtcctgcttctttccgggactcagtgtccgtgtctacagaatgagagagtgtgcccctgagcttcctctgctgcttgtgaatgcctggggcacctcacctacgtggcttcatcctggccctccctactgttgacataagctggcctggggagggaggacgagctcctcagccatccctgtgtggagaaaaccttcctgtttgtccagtaagccatgagcacgcgagacgcagctggagaggacacaggcactcagggcattcggctccaggcttgaatcctggttcctccattctctcctggggaggcaccttgacctctcttgagccccagtttccacctctgtaaaatgagcatagtcacatccccccttcagaacactgtggagtgcccagtacacagtaggcactcaatatacgcacgctctctctccaccaacccccacccctccctctgatgtgctctcggtgcagatcgctggtcctcggtggtaccccgcgtggtggaactgaacaagaactcgaacccggacgaggtggtggtgcctctggacagcatggggaacccccgctgcgatggccaccagcagggttacccccgcaagtggaggactgatgacgccccgctctagggactgcagcccagccccagcttctctgcccactcatttctagtccagccgcatttcagcagt

SEQ ID NO: 15870 - DNA, 31176 bp, Homo sapiens; identical to SEQ ID NO: 15867

SEQ ID NO: 15871 - DNA, 31176 bp, Homo sapiens; identical to SEQ ID NO: 15867

SEQ ID NO: 15872 - DNA, 58163 bp, Homo sapiens
acagtgtccgccgcttcctggttgcgggtcagcgcccaggtcctgggctggccgccgggatgttgccctacacagtgaacttcaaggtgtcggcgcgcaccctcacgggggccctcaacgcccacaacaaggcggcggtggactggtgaggacgccgagcttccaggtcgccaggatcggccaggaatgtgtgagggggaagggggaaggacaagaggtttcaccccctggttagtttggcctcgctaaggcagggagccgccctcacgcaatgagcttgctttcagttggtggatttttgttgttacaaaagtgataatagccccgtgtgggaaattcccccatgcaaatacatttcccctctttctcgcgtatttctctgctgttttctctgcacctcgcccttttgccgttccattcctctctcttttcctctcctccagcttccaggcttctctctctccaccattaattccctgtgcactttctctttcccatcctgtcttttctttttcgttgtcttgtattcctgttgtctttcaacaatgtgccagaccctgtgctaggcgcctgttctttcacctgtccttttcacctcttttcgggctcctcctgtgtagaacattcctgccttcaacaggtcgtctttattactctctcctttcactataaattactactgcagctctgaaaactactcattagacaaatgtaaagcaaaattctgtggctgtgggatgttgttaggaggactgaaacgtcttgtgcagtgtttgtcgttttatttagttggaaggactaggattagtcgcagtatccccaggcacattgtggatactaaggattagaaatcggataagcgaaagacgtatgcctacaagaacagtcagagggcacaagttcctttttatgtcctcgggtctctattttcatatcttttagaactttttttatccgaatgaaaagtgaatttcaacaagcattttaagcttagccagatcttttatttaagtgggataatgataaatactggcctttgggtttaaatgattttattaatggtggtacatatgaattagacttatcatttatttaggcttggcaagaaagaagtcgtcctgctttgttctgtacttaaactttaacattactgttttgctaggggctggcaaggtttaattgcttatggatgtcattcacttgtggtagtgattgattccattactgcccaaactcttcaagttttagaaaagcataaagctgatgttgtaaaggtaagtaaaatcccactttgacgctaacatgttgtctagtctaaagtttaatactgtgtatcactaagctctcattaagtcttacgtgtaagtgttgaatagcttttaaatataacaacctatttggggtagcctagaattttcatatatatgacttaatgtcaatacagggtgagttattaaatgctagttgttagatcattttaaggcagatgaaagttctaccatttacaagaccactcagtcattccttagttttgagcacttaccatatgctatggatatggagatgaaagccctcagataattctccatcttataaggaagactcacagcgtgatagtgtgataagtgagacttgcgtaacacgctgtgagaaaacagaggagctgcatattgcctggttgtgaggagagtcacagaagtctacagtttcaagactagtagacagtagttagccaagtaaaaaattgacaaggagcattgcagggaaaagcaagaatatacacagaagtaagtagcgtgccataaagatggctaaagatgggacacttgtaggagtgatgaaataagaggcagccagagagattcagctgtctgtcctgaagttttgtaagattacgaaggagtttggattttttttttttttagacagaatctcactctgtcgcccaggctggagtgcagtggcatgatctcggctcactgtaagctccacatcctgggttcacgccattctcctgcctcagcctcctgagtagctgggactacaggcacccaccaccatgcccagctaattttttgtatttttagtagagaccgggtttcaccatgttagccaggatggtctcgagctcctgacctcgtgatccacccgccttggcctcccaaagtgctgggattacaggtgtgagtcaccgcgcccagcaggaatttggatttttgagtaggagattgatgtgaccatattcgcgtcttagaaaaactctggcagcagtggaggatctgctgaagaaatgcaagactggaggcagtaagatcatttaggagatttctgcagtaattttggtgggaaattctaagggcctaaaataaagctggggcatggagaagtcatgtttaagagcagcaaagaggtaaacctgatagcctttatagtgatcagtataaaggagagtaagagaatagagtgactccaaggtttcttttggtgtaattgaatgacagtgtttccagttatcagaggtaagcatctgtgaagtcagtgaatttttaagttttcaacatgcaaaatctgagatgcctgtaatatattgcattatagtgatccgggctttaggagataggtcaggattagagatagagatttggagtctttttcttttttaaataatagctttattgagatactcataccataaaatgtactgacttaaaatgcacaattctgtggcttttagtatatccacagttaatgcagccacaattacaatgaacttttttacctcaaaaagaaaccctatatccactagcagtcatattccatttcccccatttccctcatcctttggcaaccactgacctactttctgtgtctgtagactggcccattctggggattttatataaattgaatcatataatttgtggtcttttgtgcatgacttctttcacttaggataatgttttcatggttcatctgcgttgtagcatatatcaatactctgttactgatgaataatattccactgtaaggatgtatcacatttattttattgatggacatttggatattttgtactttttgcctgttacgaataatgctgctttgcacattcatgtgcaagttttgtgtgaacctgtgttttcatttcccttgagtatgtttctaggggtggaattactgactcatatggtaactctgtttaactttttgaggaactgctggactgttttccaaattaacattctcattagtagtgtatgaggagtctaatttgtccaaatcctcaccaacgcttgctgttctctgttcttttgattataaccatcctaatgggtatgaattgattctcattgtggctttggtttgcatttccctgatggctaaaggtgtggagtatcttttcatgtgcttattggccatttgtatatcttctttggagaaatgtctatgcaggtcctttgcccattttaaaattgtattatttatctttttataattgagtcgtaagatttctttgtatacagtagtcctcccttatccagaagggaaatgttccaagaccccagtggaagcctgaaaccctggatagtactgaaccctatatatattgtgctttttctcatacatacttacttatgataaagtttataaaccaaaccctgtatatactgttttgtctcatacatacttacctatgatcaagtttataaattaggcataataagagattaacaacaataactaataataataaaggagaacaattataacaatacatcagcattactactcttgcactttgggggcattataaagtaaaataagggttacttgaacatagcactgagatatcacaacagttgatctgataatcagtatggctactgagggcaggtggtgtatacagcatggatgttctggacaaagggatgatttatgattaaggcaggatggaacaggacagtgggagatttcatcatgctattcagaaaagcgcataatttatgaattgtttatttttagacttttttgtgtcatatgtttggattgatacatgatttgcaaatattttctctcaatttgtgggttgtctttttactttcttggtggtgtcttttgaagaacaaaactttttcattttgatgtagtccaatttattattttgtattgttgttgcttgtactttttgtgccatatccaagaaaccattgctttctccaatatcaagaagatatatacctttgtttttttcttagaattttagagctttagcttttaatccattttgagttaatttttatatatgatgtgaaatagggaaaaatactattaatttttgtttattgatcatatcctgtaatctagctaacttcacttagtagatctatttaatagtaattttgggtaaattttttttaagtagacagtcatgtcactgcaagtgactgcagtttaatgttttcattgataatctgtgtgtcttctatttttcttgccatgttgcattggctaggacctctactacaatgaatgggagagtagtgagaggatactcttgtcctgttcctgagcttagggggaaagtattcagtctttcatcaagtctgatgtaaggtatagggtgttttgggaaaaatatatttaccttctctttccctctctgtttcctttcccctacactgccccttggcatttctggagcttttatttctttatgtaggtccaagtttcagtctggtattatattcccatcgactgaagaatttactgtaagttcttaaagtgcctgtctaatattggttgattctcttagcttttatttctctgagaaagtatttcacctttgttttcgaaagataattttcaaaggatatagaattctgggtttataatttttttttctagtagtactttacaaatatcattccattggccaggcatggtggctcacacctgtaatcccaacactctgggaggccgaggtggatggatcacctggggtcaggagtttgagactagcctggccaacaaggcaaaacctcatctctactaaaaatacaaaaattagccaggcgtggtggtacacacctgtaatcccagctacttgggaggctgaggcaggagaacagcttaaacctgggaggtggaggttgcagtgagctgagatagtgccactgcactccagcctcggcaacagaataagactctgtctccaaaaaaaaaaaaaaaaaaaaatccctccactatcttcaagcttacatagtttctgatgaaaaatttttgtttttgtttctctgcattatatcttttttcctccgattatcttcaagatttccttaaccttggttttcaatagtttgattattaaaatatatatatatatggcttggagtttacctaaatggaattcaacatatacatatacaaatatatacacatatacaaacatatatatacacatagagacagtcaattcttgttatttgtggtagctatattctgtaaagttgttgtatacactgaattagtgaatactgaaactttgtttgctcctaggggttaggttcttgtgaggctctggtcacaacattttcatcaactgatcaatagataaccttgctttatatgtgtttccgtttaaagacatattaatatgtcagttgatctattaacattgaactcatagccaacaacacatgcctgagcaaagattatcacatatatatatatgtatgtattttttgcaagacacatcacaacttctcatacttagaaacggtaggcagtatgcttggggacctatttaaacagtgaagtcaccagcaaaaggaacaaaaatgtgaaaaatgtggtactaaataaatcatgagatgaacacttgttttgccattggaaaagctaaagcaagaattcttgtttgacttcagctgggaacacacatgtatgttcggtgacatttttttcaccattctgcacttgtccacaaaagcactgcaagtattgattttgaggttgcaaattatagtgagtaggtaaattgacaaatacagaatctataaataactagaatggactgtgtacacatatatacactatacatattctattcatacacattctatacctatgaacttaaacatatacacatacaaatatgcatacacacatacatatgcatatatacacatacctcatttaaaaatttttgcctgagcaaaagatctattacaggaaaaccttaaggcctgttcacgctcattttcagaaaacgttgtttccatctttttcatgaatactactgcaattggttggcttactttcctaccttagcattatatatgagtgtatttatatctgtacacatatataggtatatacatttatatgtatttatagatttgtggtatttaaatctacttattaaacagaccttggacactgtactaagtctgagaatagaaatgcaaacaaagaccacatggtgtgccctatggaacttacagttgatggactcatgaataggcaaaaagaatgtaaataaaataagtacaaattgtgtagtagtaaatgctttgaagaaaataagcaggatactgagaagagaggggtggtagtgaccagggaaggcctgactcctagtgaggactatgaaatttttcccttattctgtcagtattcattgttcaagaatttaatcagatttgccctggagttcatgtgttttttattttaaaaattctattgttaatcatgttgctataggcatgaagcatttttttttttttagagaaaaacttaatgttttgtgaaagagagagacagctagagttttttgtttgactttgccttctcctgactttccctctgcaaggtttttgtgtttctaagttgtcttcttttagttaggagactagaatacagaaaaacattctgctaaatatgattttaggtattttgtcataaattagatcttaggaaaactgattttcaaggcatcctggggttttaacctaaatttcccaaaatattaaggctgtgaatcatttttcatcacaggatctttgtgatgtgtcaaagaaaacaattttgtaactgcagttaaagatatctaccaaagtaacacaaatgctgccttcaaaatgaaaaccagttttctgtttattcttgctaaatgtttatgtaatataaatgtagtatgggttctggttgatgttttgtgaaaattatgttctgtttcatccagcgcaagtatttacttgatctgatttcttcttgatacaggttaaatgggccagggaaaactatcaccataacattggctcaccatattgcttacggttagcttctgctgatgtcaatgggaagatcatcgtctgggatgtagcagcaggagtagctcagtgtgagatccaagagcatgccaagcctatccagggtgaggaaagtctgctcagctaagtgtgtatattgatacacttactcttggagtggttttttggttttgggggttttcccccattcatttaattttatcaattccaagttagctcttgattgtgttttgcctattctgctgatctaaatctggctttctgtccttactaatacacttctaggcatatttcttcaaatctcaactgatttgtgctttggtaaaactcattaattgcaatatcagcctcattcaagcatgataagaaaaagtaagtggtacaatcttgtaatctaagctacaatataaggaaaattggccactgctgttaggaactagccatcagtgcttactctacattaagtaatttgttcattatcagagatgaacaaaattttattctcattttcatatagattgcttgtttgttcgtttcatgttactgacctaaaaccagtacggtattctttttttttttctttttttttttttgagatggagtgtcgctctgttgcccaggctggagtacagtggcgctatctcggctcactgcaaactctgcctcctgggttcacgccattctcctgcctcagcctcccgagtagctgggaccacaggcacacaccaccacacccagctaattttttgtatttttagtagagacggggttttaccatgttagccaggatggtctcgatctcctgacttcgtgatccacctgcctcgtcctcccaaagtgctgggattacaggcgtgaaccactgcgccctgcccagtacagtattctttagacttaagtcctccagtggctctcttgactgaatgaattttttaaatgactatttaaaaaatatttattaaatacttactgtgtactaggtactgaactagatctttgcatattctgtttattttttgaaaaaccatgaagaactgtaaagttccattaagtaattccacagaaacattaggaaagtctgacatcttggttgtggctaagagagtttcatattgattttatagttttaagtaatgattagggcaaattgccttttattttctttgaagtaatatttcagattacttcaaaatttttaccttgagagtttaaccagacaacttatttttatatagaattagttttttctctggaatattgatacacacacacacacacacacacacgtcacatttggggctggtggttaagtttttaaagattatattttaaaaactaaatatcaaggacaagttagccaaggactttggagagtgtggtttctgaattttgcctttctttatcgggtctttccagatgttcagtggttgtggaatcaagatgcttcccgcgatttactgcttgctatccacccgccaaattacattgtgctctggaatgccgacactggcaccaaactatggaagaagagctatgcagataacattctttctttttcttttgacccttttgatccctcacatttaacttgtgagtaacagttgcttgtggaaaatgagttaagtgagatatttataatatagtaatgctatgtgcatgagatatacacacacattatacatctataatgttaaaatgactgagcgaagtggagaagcatgtctagtccatatatctgcagctcctaatacacatactcaatcataagttcatatcattgcaaatatgataaaaaattaaatcagcaagctacaccttcactgtgttgaatttgtgaatagtattagactagccagggacagagagttactttgacactccagacttaattagttcttctaagaacatttaaataacttgaatcaagggtttcattcagtctgtggccaagttaagttcttgctttttaataaattgtcctaattcacgccattcattttgagtgccataaacagatgcatgtaaagaagaaataagcctaagcaagttttttcttgcagagatagtttttgctaatatgcttttaatgttttcctgagctaatgatctaaaaatgagatgtgctttaggtatttttgtggctaaattgtttagaaactatttaatcatccaacagatatttcttgagctattgctactcttctgggaaccaagatgtctcagaacccaaaaggcaggagccttcacagagtttgcattctagtgagaagaagtcatatcataaactgtgaccacaatgaattaataaattctagtgtagtaagaggtgacaggtgatataaaggcaggataaaggggatgcagaagaatgggggatgagggcatgcaagttgtatgagataaagtggtcaaagtaggcttcactttgataatgatcagaaatgtgaaggaggtaagggaattagctatggtaaggaatgtttttcctggatttgaatgactcaaaattgttttacccatcaacttttattgaggggtgtgtgtgtgtctgcacgtgttaaaggaggaagagaaaggcagacaaaattgaaattataataacatgggaaatgtggctgtgtaaatacactacagggtgcttaggcttttatgtatgtaaatgtttgtatatggacgtgtgcatacatacactcacttggtcaccagtttacttactcacataggtgcagtgctggggaaacacctaggagggctggcccagttggcagagtcagggaaggagggcatcacaaaagaaggaagcaaaggggaccttgaaggatgagttctggaacctgaaaaggcaacaaggctttcagctaacttgattgcatcagctctttacatctctgtaatttggttgatgaaagcattgtgtgttccagagtgtcagttgacctaacatctttgatttactcatattgaatgtgctagggttgtcataactcttgaatgcatcctttttccctgtgtttagagcagccttgctaagggctgggacccagggtagtaaggtttttctgctcatgtcttccagtattaggcccattgttgagggagattattttttcagtcataaaaaggcataatttgtattgctaaatatggtgctccctccttgactatttttgtttcatgtacacttagtaagtcactgtgggcccactactgttttctaaatattaagggaaaagaatattccttaatcatcttaaggttcgatctgatgcttgagaagaaaaagggaatatatttagactgagtagctcaggataaaaatttggtatcatcaaataaaatatatgaacttagctaattgtgatatgcagagcctcttaagtatggttttttgtttttttaagttatgggatatgttaaagtttttttgtttgtttgttttttgtttttgtttttgttttttttttttgagatggaatcttgctctgtcacccgggttggagtgcagtggcactatctcggctcactgcaacctccacctcccagttcaagcgattctcctgcctcactctcctgagttgctgggattacaggtgtgtgccaccacgcctggctaatttttgtatttttggtagagacggggtttcaccatgttgatcaggctggtctcgaactcctgacttcatgatctgcctgcctctgcctcccaaagtgctgggataataaggaaagatttttaatgaaagtccgtgccctgaatttatttagaagaacaaacacttgttctttctgccaataaccttatgttatctttttaatataagacataatatagaatgccaagcttggaggcctctgatgaattgtaatggaccacctgtttctcttcaacttagagaacattcccattatgttatgaatgcataacattgccagttatatattattaaaattatcactatattgctctcaaaattgtattggaataaaactgtatgctaaacttcattaaactttaatcagagttttgcttttctcaatatagtgcttaccagcgagggtattgttttcatctcagacttctccccatccaagcctccctcaggccctgggaaaaaagtttacatatccagcccacactctagcccagctcataacaagctggccacagccacaggtgccaagaaagctctaaataaagtaaaaattttaatcactcaagagaaacctaggtaagttacaagtgtaaaattaacattcatctacttatctggtatgaaagcatcatttttggagatgtacaaagactgatgtttttcttcatctcactttttctcatttctaattttgaatttattagaggaaaaaaatatttatttttgtcccctgccctaagaggagattcagcatttaacattgcctttgtttccactagctgtgctaaacttccccactgacttttatagattaaaatttttgaattctgatttttacttgtgaaaatcgcaatgatcctaaagttcaggcaattgaatgcattaaaaatttgggcacaaaagctggatactcattttaaatacattttcctgacttaggtgctgtgcattctcattcagcagtaaaatcggagtgtttttcttatgcaggtgaagatgtctcccatcctggttaagagccaaggctccgggggaagctttagctatgagactgagaaacttctttaatcttactcaaatttctctctcccagtctctaaaataaggctttaaagtatttcatagggttgttttaaagatcaatagatccaataatgtaagtaaagcatgtaatgtcattgatacatagtaatttatttagaagatgtcggctgttattaagaaattacaactgaataaaagtttattttaagtaatttgatgtattcaaaataggtttctttctttttcctatagcaataatctgtatattattgctttggcaggcttttttgtttgttttggcattcattttcagatagcctttatttttaatatgccaagattactctctctaggcttggtgagtaactacttgaaaaatatgtggtaaaaatataaattgctctacaaatacattttgcacttgtgtgtaagtatcacttctatatattaagccataggctggttaagttcactagttaatttatctctcaccctgtgccaaaatgacttaagattacttcttaagtatcttaagagaactttctattttttatgtattccctctcataaacaagaaattatttggcagtctgaatagttttataagttatgttttatatttcttaagttttctctcatatgaattatatgtatatcttgagtattggggaaatacattatttcttcaagtagaaccgctctgggtgctttcacatctattaattcctggactcttactacaattctggcagtagtaatattcccattttacaaataaggaaaactgagtcccacaccaatttaaataaagttactcaagctcacccaactaggacatggcagtcgggattttaatgcaataaaaattcctctttctagtcttgtgaactaactttattttaaatttcaaagccttttaataaaattatgtttgtaaaatgaaatgtaaaatgaaaatagtacataattgtatgtctattcctattgaaatatatttaatatagaaaaggtcattgaatgtatgcaacaatcacaaattattaaaatgatttttcagaccctaacaatctcttaaaatccttatagtttcacctgttttatttacacacaagaaaatgctgcaatataagtgaaactttgtttcaaaaaagatttaagacagcttaaaagtgaatgaaggcagccaaggggaagttacttgcccaaagccatacagatagtccagtaactcctggtccaggggccctaattaccctaaatgttgatgtttttcatcctgagtcttgattttaacagtttgcctagtacttttaatgacaaagtaaaagtaaaataaaactgtcttatgcatgccagctattattatattatcatttaccatgtcttgtgtaatattaataacttaatattctactacttaatatttcaaaaacttagaaacactgacatttctacccatcctatacaatattattagcatttggattttggtacatagtagagatctaagttttggatgccaacccatgttggtcacttcagggaatagttgtacatttttattgtcaatttttatgtgtaaagtacaaaattaaatcttttattaggtctgatataaatgaagtctttgacccaagtgaatgtttacttttttcagtgctgaattcataactctcaatgattgccttcagttggcatacctgccttcaaaaaggaatcacatgttgttgctctatcctcgagagattttaatccttgaccttgaggtgaatcagacggtgggtgtgattgcaatagaacgcacaggagttccatttttacaggtatctacaattcataaattatattccccaaaattattaagaatgttatattaaaagaaggccataatcttgcataagtcttgtcttcagttctccactttctcttttcaatttatcaaaagactagcaacactattttagattgttttttttgtctgcacttttgattggtttgatttaccctagaaattgtgactgatcctgagatatttattgaactatttaagtcacatgggtaaagacaaattattttaggattataaatggatattttaaatgtacatttagttttaaagtttgggatttgtctatttttttttcttttgcccatattatctaaatatgagtttgagtttcacagtatatactttattaatctattgtgttttaaaaaataaatatatcatctatttaaaggtaataccctgctttcagcgtgatggtttattttgtctacatgaaaatggttgtataactttacgtgttcgaagatcttataataacatttttaccacttcaaatgaggaaccaggtgagtttctgtctcacaataatgttatatttttcttcaaaattattttataaagcttgatgtggcaaataccagccaaggtatatagttaatgatactccttgctttgaggaagtttaaaatatggttataataagaggcataaaaagtataagcccaagattaatctcttgatgttaaaacagtgcacctcctgtatacatcaaagagagtaaaattttgtgtttcttgatcatatccatgagccaagtagatattattttttggaattttttttttttttcagtacaagtccaaccttgtgtgcctttattattatacccccttgacttgttggctgtaagaacttccattgtaaagtgacagaggttattaagtctcagttgtcaagtcagtcttatcttggagaatggaaataatgtttttgtgaaattatatactgtgtaaagatcaaagtgattttcacatcttttggaaagtacagttattttcaggcttatagactactacaaattatgatggaaatttattcattaattatatatcactgttgatcctttttcaaagtatcgtctttattttaaaatattgaaaaaagatatcttgattatagttgttattttggaaattaaacttagtacagtcattaagtaaattatatttggaaaaaatttagtagtaattgtaaaaagtgaagccatgcttgacattgcattcatgaaggagtgatgcccaaatttagttgaggttttatttaaattgaaacaaacagtagtggtatcgatatggctgctttctgatatttaaaacaattttatgtgaagatccagatccagttcaggagcttacctatgatttacgaagccagtgtgatgcaatcagggtgacaaaaaccgtccgtcccttcagtatggtgtgctgtcctgtcaatgagaatgcagccgccctcgtagtgagtgatggcagggtcatgatatgggaactcaagtctgcagtttgtaatcgaaattcacggaacaggtaaatgaatcaacaggatcatggttttgttttttgtttcctgtttccttttataaaaaatttccataatcataaaaataggagggctggttttctataaaaatatttttaaggtaataattaaggctttagattattagggaattatgtaaatctgctagagctatttcacctatgggtaagatgaatgaataatataaaaatagatagaatgccataatctggacttaatactttgaattcctaatacgtaatgcagattttaagtatgtaaaaccttctaattattatgtctttgcagtagttctggtgtgtcacctttatattcaccagtgtctttctgtggaattcctgtaggagtgctacagaataaactcccagacctttccttagataacatgattggtaagcttttttcccctctaactccatgttaagtattctttctgaagggcaaaattaatagaatcactcacttgtaattattttaaagtcaaaaaagttaatacttgagaaaactagaacatggaatcattctttcctaaataaatcagaggggtttaaaatacttaggtagaaaagtgcctgaagtagcacgggtttgcattatagttgttagaaatagaaaacgttcattcgtgagagactgatgtaaatgaaagcaatgacattaggcatctggattttggacctagagccgatgctgagctatgccatgccaactcagggccttgctgtttgctggttcctcagcttggaatgaagtacatgcttcctttctgtctgctactcctaattcaaaattcaactcagatgttgttttctttaatctcccaagtctaatttaaatgctcttcttttgtttttcctaacagttatcagcatattttaattgtgggtttttttcttctgtttcatctcatcaattgtaagcatcacaagggtggtacagtgtttgattctattttgtctttcccagcactcagcacagtaccttgtgcatgcctgttttgtagtaaatatttactgaaggaataaagtaactgagcagtattagaaaagattattttaactttttgacatgaattatttttatgttggggattctttcaaaaaatcatttttggagataaagtgttcaaagttatttaattatgaggccagtatgtattaaaggaagaatgagagtttgtgatttcaaattttatgctacttgaaattataaggctttgtaaatatgccaagcaatttggacatctaatttttttacagttgtggctatggtttataaaggattttctgttttattatttattctaccataatataattgaaaacgatattatttaggagggtttttttgttgttgttgaaacgctaaataagtgatgcactagaaagagcattggccaggcgcagtgactcacgcctgtaatcccaacacttttggaggccgaggcgggaggatcacttgaggtcaggagttcgagaccagcctggccaacatagtgaaaccctgtctctactaaaaatataagaattagccaggtgcagtggcatgtgcttgtggtcccagctacttagggggctgaggcaggagaatcgcttgaacctgggaggcggtggaggttgcagtgagccgagattgcaccactgcactccaacctgggcaacagagcgagactcgatctcaaaaacaaaaaaaaagcattacattattaattacattaattagatcacatttattgggtacttcatactgtgttaagtgctgtgctaaatattctacatattaccttggtacagctttgcaatgtaagtaatattatctccatttgatacatatgagaactgaggcccagagagattaaaactttaaaccacacagtcacacagtcacacaatggaagagcccaagtgtgacccgggtaatcctggctccagagcctgctccttagcaatggcctccagtcctgacagctccactgtcatcttgggtaagaccatcattcatctctaggcctcagttttttcacgatttctgccagttatgaaatccttttgttcagtgatacttactattatatctaaaattatttctctccactatctattctaccagacataaatccatatgaggaagcctggacacatgttttgcaaaatttattttatcagtaacacaattttttgagttaattcaccttgtctactcttaatatgaaaacttaaagtgaaaagaattataaacacacacaagaacagcactaatcagttatatggagcccataggagtttgaaattttatgctgtttaggtatctaagtgatataaattacaggttttttttttttttttttttttgagacggagtcttgctctgtcgcccaggctggaatgcagtggcgcgatctcggctcactgcaagctccgcctcccgggttcacgccattctcctgcctcagcctcccgcgtagctgggactacaggcgcccgccaccacgcccggctaatttttttgtgtttttttagtagagacggggtttcactgtgttagccaggatggtctcgatctcctgacctcgtgatccgcccgcctcggcctcccaaagtgctgggattacaggcgtgagccaccgcgcccggccaaattacagtttttaagagacaaatggatacggattgtatagcagttcttgacaatgtagttgattttaaagtgttaaataaagcttcgtacttgaaaacattttaatttaaacttttaattaaacttttaatttgaaattcactgtgttcttagtgaaaattcaaagcaattcaggtaaataaagaggctgatttatattcactggataaatgctgatacttattaaggcctaatttgccctacattgtgaattgcctcttatgaaaaatacttgaagaaaaatgtggcattccctggatgtcaactcaaagccaacatatgtatgtgtggcacttacatgttaagcttcccattccttcatatttcatcttttttattttattttattttttttgagatggagtctcgctctgtcaccaggctggagtgcggtggcgcaatctcggctcattgcaacctccacctcccgagttcaagcgattctcctgcctcagccccatgagtagctgggattacaggtgtgcgccaccacacccagctaatttttgtatttttagtagagacagggtttcaccatgttgaccaggatggtctcaatcttctgacctcgtgatccggttgcctcggcctcccaaagttctgggattacaggcgtgagccaccacactcggcctccatctttttttaaccaaagttatgtagagagattgatattgagtatgtggctaatcctaagggatcattttaataggattaaaatgctattttttctatatattttgtggattttaaaataacattattaaaacaactttacagcttcaaaaggttgtatttatcacccactcttagtaattatttatacttttcctttcacactatatacatgtttgtgtttatgtgtgtgtagacatgtatgtatatactcatgcatattctttctatttttggcaagttaatcccaatattctgtagtggtttataggaaggaaatttgtatacctttttaatgaacagtcttgatttcattgtactgtttagatttagcttttgttagaatgatttttattggagtcatctttttagtttgagacttgctaacctaagtacgaatggtatatgtgaaaataatgccattgaagtcttaactattgacagtgatggtgtatatattatacacgtgatttatgaatatatatatttgtatttgttttatatttacttataaaacattttgtaattacactgacacattaaggtttcttattagaaattatgaataagttatttaaatctgtttttcatgaataccaattttgtatgtactttacagagtacatcagattgaaaagtaaccctttcaaaaggcagtaaaatgagaaaaatgtggtacagtagttcactctgcagaaactgttctctaatgcaagttctcttgctttgttctgaagcctgtgtagtgctttaataccaggaacattgactgaaacagtgtttcttagaagacataggtccctgcattctggatagcaggactcgggagtaatctatcctttgaggtgttagttgatgcaatttaagtcctatagccaggtacagagtcattgtgtccttaataactacagccactaaagtactacattaactacattatacttttagacctgaagagcatttctactgaaaattttctttagctttttaagatcagcatacactgtagttaatatatttgttatttttattacaaatcagggcaaagtgcaattgctggggaagaacatcccagaggttcaattctgcgggaagtgcacctcaagttcctgctgacgggactgctttcaggactgcccgcaccacagtttgctattcgtatgtgtccaccgttgaccacaaaaaacatcaagatgtatcagccactgctggctgttggtgagtatttgacctggtctttttttttttaactcactttataagatgtttaggttttctagtttctagaagatcctttattctttttgaggatgctttaaaaggagatagagactaagtgaaactgtaaatactcatcctggaacttaaaaaaaaaaaaatttctgtccttttattccaactgtcttatattgaattggaatgctgagtcttcatccacctgagactggacagtcgagtctctgacgctgtccattcatctcggaaataccaggaggctcatccctgcagtgctgaatcccaggctccttgtctgtaattggaccaccccagtctttatgtcatgtcagttttcgttgggtctttattgactaaaaatatagtcagggttaatagcttaataatagcagggttcttcttttgccaagagttatatattaaatattatttaaagtggctatggtccctataaattaagatttgccttttggtgtgaaattgtgtatttgtatgttataggtagaaaaatttatctgggttccaacttgctgtcacattgatttcatagtaatgtgatgaacctaattttctttacagcatagagaaaaaaacaaaatttagtttgctattaagtacacattattaaaatacatttctccaaaacttctgaaaaacagtgtatttgtttgaaactcaacatttcttcttaagatgctatcggctggcttctggctttctcccccagtctattaacatgtgatttgtggtgaaaacctcaccatatttattctgtggccaacatggctgacttctcagtgttaaagactcatttgggtattactgtttggtagtacccttctgtttttttctgtgcctatcttttgaaagcgatttgatttttatgattcaattgtctatatatgtgtcccgatttatataatgcagataaatgtttaatttttgctttagaaactgttgattaatatttcaccactaatagattttaattaggattcatcagtgtgcttcatatgtgcatgtatgtattatgtcagtgttcctgatttgtcagttaggattttgtcaatttcttggggaaaactacttcttgggatagctatgtaataagagctatggcaaggtctgagctttccattgtagaataagctgtattggtatgtagtgaatatcatttactgaatttagtataacaaagtaaaaatataagtacctaaaagtttgtctagaggtgtcactaagaaagataaataagagttcagctatggaattaattctccttgtggtgcccctagtgcattagatcataggttcagcattgttaaaactttcagattgcagaaatcattggattattatgaagttctgttaattgaaaaattttagtaatttagttattttctcagtgccaaaaggtattattatgaaatagatgataaatgtaaacaactgtacaatgtgtttttctagaatagttttgcaaaagatttctggagttttattcagcaaataagataatattggaatttgcccagcatttttacttccactctgttgctttgcatgaattcattaatctttaaatcatgtgcagtgcaaaagtgattgtccatatagactgttcacttttcttgcttaacttataaaaacactatagagactgaagctttactttctcatgtatgtccgtgtcctttacatttaaactttagacatactacctgagaccatgaaaagctttagaataatacctgtaaactattaattatagtgatgacagaatactaatagttaaccaagtgcttactttgtgccaattactgtgcttagtgctttatgtttccccatttaatctccaacaactagattttctactcttcccattttaaagagatgaaaacacagatttagtgtgggcaagtaattcatccaagagtataaggaagagccagggcttaagcccaggtttctttaattgcagaaaccacagttaaccattatactttactctcttgtcaggatttatttaataaaagagacaaaacaaaaagaaaactttggaaagaaaaatggataaccctggttagtgagctctgctagattgcttatttgaggaccagctataataaaccttctgagtctcaaaaagtataaattcccatgtgtataaaagcttaggaaagtgtttcttcaaattgtatgtgtattaatgtaagttttaaggtctttctgtgaaaaatctattcctggaattaggcaaggcttttgagcacgtgaggttaggcccattttttttataaggaagtggaccagagaaattcattcttctttgtgtgtttgtttaaacacatagtttgggtttcttttataaaagataaatgtgttaagtgattaaagtcttgagaaaagacttttcttgcaaagtgctggaactcccactgaattaatgctcttccatgatgtcattttgaaaggtacaagtaatggttctgtcctggtgtaccatctcaccagtggtctgctacacaaagagttaagcatccactcatgtgaagtcaagtaagtatgtcattgtgatgatgacatcacaaacatcatatcagaaaaaaaattctcatagacttttctacattgagtactctgtaatatctgcagtggtgattatttgaaaagtttgaataatattcatgtccaactaatggctatgttaatcaaggatgataactaattctttgctgtgtaaagaacataagcagtagagaatgttttctcttttattaggttggtgcaaaagtaattgcggtttttgcagttttttttttttttttgttgttgttgttgttgtttgttttgttttgttttgttttttttaaatggcaaaaaacacagctatttttgtaccaactaatattgttgcacctcatttatttctcctaagggccaggctgttttctcactggatatccttacgttgccttgttcaggtttattttatttatttattttgctcaaaattattattttttattattttaaaattttttttactttaagttcctggatacatgtgcagaatgcgtgcatttgttacatagttatacatgtgccttggtggtttgctgcacctgtcaacccatcacctaggttttaagctccacatgcattagctatttgtcctgatgctctccctcccctcacatgcccccgccaacaggccctagtgtgtgttgttcccctccctgtgtccatgtgttctcattgttcaactcccacttatgagtgagaacatacagtgtttggtttttctgttcctgtgttagtttgctgaggatgatggcttccagctccatccatatccctgcaaaggacatgatctccctttttatgactgcatagtattccatggtgtgtatgtaccacatttcctctttctttttttttctttaattttactttaagttctgggatacatgtgcagaatgtgcaggtttgttacatagatatacatgtgccttggtggtttgctgcacctgtcaacccgtcatctaggttttaagccccacatgcattaggtatttctcctaatgctctccctccccttgcccctcaatccccgataggccccagtgtgtgatgttcctctcgctgtgtctatgtgttctcatcgttcaactcccacttatgagtgagaacatgcagtgtttggttttctgttcctctgttagtctgctgagaatgatggcttccagtttcatccatgtccctgcaaaggacatgaactcattcttttttatggctgcgtatttttcatttctataacgatccatcagtaggactgcttatgacaaattcaaataaagtcattttaattgttaatttgtcttatttattctttgtttaaacatcatcagaacgctgcatagcatttatttgatttttaggacatgatctgcttatgagttctgtgtatgcagagctgtccgagggaaagctaaattgacggaaaagtgcttcttgctttctgttccaaaatgcctacctgtgctgtccatagcattatttcgctgaatgcaaggctattttccttttgtgtcctatcagtgatagatcgtagagttacatatataaaatatgaatttccacttttttgtttgttttttgatacagtcttactctgtcacccaggctagagtgcaatggcgcgatctcagctcactacaatctccgcctcctggtttcaggtgattcttatgcctcagcctcttgagtagctaggactacaggcacgtgccaccatgcccagctaaattttgtatttttagtagagacggggtttcaccatgttggccaggctgatgttgaactcctcacctcaagtgatccatccacctcagcctcccaaagtgctgggattacaggcatgagccaccacccccagccagtttccagtttttttttatgatctttcagtgaaagcataagaagtcattttctgttttctgtacattaaataattgtaggtcttgtgtataaaaattctcagtgaacccttagcaaacacattatcctgagtacatgcattttcttaatggagaagggttaaccttttttttctttttttttttttttttgagttggagtttcgctcttgttgcccaggctagagtggaatggcgctatcttagctcactgcaacctctgtctcccgggttcaagcaattctcctgcctcatcctcccaagtagctgggattacaggtgtatgccaccacgcccagctaatttttgtattttttagtagagacaagatttcaccatgttggtcaggccggtcttgaattcctgacctcagatgatctacctgcctctgcctcccaaagtgctgggattacaggcgtgagccaccgcgccaggccaggttaaccttttaagtatcacagcttctgattgtgatggaaatctctgaaaagtttgcattgtcttactgtttcaagtgcattgttgtgtggtgcagcccaggtgactgtttattgccaccttacgctgttcctatacagcatctccccagatacatttacgtggaataataatgtctttaaaagctttgggcttttgaggtgcagtgacacaggtatctgtttggactctttcaggctgttattcatctcttctcttctgttgcagtgtctgtagcttgccattctggcacttctagtagtctctgcttacactgctgaatcttctctctctctctttcccatctcctcttctctcgacatttcctttcaccctgccttgtgtgtctggtgtttccttttatggtcagcactaaccaatcgaaactctccatttaatcactacttattctagggattatgttaactattaatacttcacacgtatcatttcattgaatccccactacaatcgtatggggcaggtattgtatttccagtctacagagtaagaaactgaaaattacagagtaatctgtgaaggagctagatggaattcactctgggcctttgaagcctcagaacctgaactcttcacttatacttacagtgcatgtgctgcatctcctgctaaaatacgcacataggttagtaggaatcatgttggcagtaaaattaaaatgttggctgagccaagatttgtgctaagaatttcacacatgcttctgaaaaatcaaacatgttgtcttttcaaacacagaaagttttaatagctaattaatcagagaggtattaattttaagtaaggtttattatcctggattagtcaggttatagatgtcactaaatacttgacttatacatgttaagataatatttatggttgagtaacattgaaattgattataagtgttacttgggatactaactctgagggatatactacttatcagataaatgtgaatgatcatacaaagatactccatttttatatgaatttttcctcttcattgccattttgaaaataatttgtattttatattcagagatactgcccaagagaacactaaaatcctgctttgtgtttcagttaatgcaattttagtattataatcaaaagccattaagaaaatttcacagaaatacaaaaattagctgggcgtggtagcatacacctgtaggctcagccatttgggagcctgaggtgggaggatctcttgaacctgggaggcagaggttgcagtaagttgagattgtgtcactgcactccagcttgggtgacagtgagaccctgtctcaaaaaacacaaaacaaaacaaaacaaaactttcacgatgtattataaaaatgtctgaatttattagcagtaaactcaaaacattttagattttcatgtccaaataaggttaacttttagaaagttgtttttctaccttttattaagtgtgtttttaaaaaatcataatctaaagcacttgaaggttgtatatactgtgccggggactcatgacagcagatagcacaaagtgtgtgtgtttttaaaaccatgatgttttaacttgtgatgctttatgaatatctgttgaatatcttctctatgcttataaacagagaaagcctttgaagcttataatgcaatggaagatacttagaagtaaacaaaatagagaggtatatgtagattttcttaggtcattagtttgtgtctttgtctggtaggctgaaactactgtcatatgactctctccctggccagattttaatagtcatactaatactgatgtgaatcctgataattaaactatcttgtcattacatttgtagataaagttttggttagaaatgattttgtatgtgttaggtatggtaatacagtctcaaataaaaggtcatgttaagataaaaggtcatgcttactttttaattaatttgtgtaataaaatttaggtctttggaaaacttatttttcaaataaatgaacctttcaaataaaaaagagaattagtttaacctttatctcatttcctattataggggtattgaatggacaagtttgactagttttctttcttttgctacctcaacaccaaacaatatgggattagtgagaaatgaacttcaactggttgatcttccaacaggtttgtttttaaagatccaaataggtttgtcatattgaataaacatgttgccatttataaaacatgtttgaaagtacttctttcaccttggaatttttttttatatttcatgcttatatatttattcttttattctctaataattgccctagaaaggcctcatcattgtttacatggaaatgttgttggcacaaatacatggtaaaatggaggaccattagcctgaacagacagattcattaaaaaataggataccggttctacttttaagtgcattgttatatgtaaccaactttaaaagatcgatttaaaaataactctgtcaatggactttattagagtctgtgctggaaattttggcttttataggaaacacttagaaaatttataggttaaggattgtttttaaatgctcaaatttaaaacttgtaatagtctctggctgaatgaatagagaaacttaatttgggattttgaagattctacagtaggaaacgtcccaataaggtaactttttcagaattgaaagcctaaacccagtgaatttcaaaataaagaatttgaaaatataataaggaaagagtttcaaattattttctggtgtatgcagtagtttcaaagaggtttttttaaaaataaaattgtgatgagtttctttaaaatggtatagcaacacgaatcatatgtagatgatcttaaccaatgagagcatgtgtatgtatgtgtaaaatgaattaaatcaaataaatggttgtaaatcaagtaagttgtaaataaatgaagtacatggttgcttttttatgttctccatatgtattttcaagctctcaaagatccagttgttcttacttctcagggtatgttgctgaacttccaggaatcattcccgtctttagtccagtgttgctgctctagtctcattggaagtgacctgtccactgactctcatccccaagttcctaatttgccagcagaatggtactggccctgtgtctagtgatcccagggataaaatgctgttgtctagtatcattgacttaaaaaaaagaaaaaaaatccctgttttatttgttttggtcagctcaagttcaggactgttagataacttaaaatctgctttgcacagatgtatttttaaggaacaaacatctacagtaacagttacagatttccttaagtgggatatttgagttcatagatggtagacttttatagcctgggcttctaaggagggcagcagactagtgcagtcaggacaggacatgggctgtttggggtataataatagtgagtatagtgagattccacatgatggaatctcaacaaagagtaggaaggcgtttaggccttcagttgtccttgaattgagtatgttctctcttttgtttaatgtagataaaaatctaacacaagatactaaaacatacaaggtagaatttatactttttttattcacagaaaatcatgtaacttcctttgcgggtaactcattctttcacagcatacatgaacaccgtagttattccctagtttccagtttataaagatgttttgagaggaacatgttcaaaatatttaactagtattttgcacatgggacaagaagatcttaaatacatgtttcaagagtttttcccccactagttagtatttggaaacatgggaatgtttgtattaaatattactttaaataagtagttttcgcaccagacaattgctgtaccataaatatcttaaaacttaacattgtttttttaaatttctaaaattgaattatagaattcaagaaactgtgtgacaaatgaaaatgcctttttacaaaataaatatctgaatatgtgatatattattgatcattagtttgtaacacttttaagaatattctttgaacttacattattagaaacagcttagaaggaactgggcgccgtggctcacacctgtaatcccagtgctttgggaggctgaggcagatggatcactagaggttaggagatcgagaccagcctggccaacatggtgaaaccccatctctactaggagtacaaaaatgagctggcgtggtggcgagcgcctgtaatcccagctactcgggatgctaaggcaagaaaatcacttgaacctgggaggcggaggttgcagtgagccaagattgcgccattgcactccagcctgggtaacaaagtgagaccatctcaaaaaaaaaaacccgaaaaaacagaaacagattagaagcaaatggaagaatgaataggagaacagagggtaggatgggtaggactgatcaaattacattggcgtggcttcttgtttttcatacatgttttatgcactgttctcacttttttaaatatttgcaattaaaggtaggagcattgcttttcgtggtgaaagaggcaatgatgaatctgccatcgaaatgattaaagtatctcatttgaagtaagtgtcaacctaaaaaaaaatctatggtgttatcacaatgaaatctcgtggatttttttaatctttaagaaaatgggaatgtgctggaatgcatatggaatctttttagtgatagcaaatggtgatatgcagcccaaagaaaatattttgattacaaaattaagttgctatcacttttaattctctacttctaaaaagatgaagtaacttttgcatgaatcgttatttactttcggataaagttcttatgtacttctatctaagcatggagttactgagtgaaagaactcattttctttatgtataatttaaactcattttgcttccagaaattgagtttttttgtttcaggggaaaataacatgtaaagcagtattattaaaaatagaaactgaatgaaaatcaatcaaaattacaaagaaagagtaagctttctaaagtagttttcaaacttgttttggcttttctaagatctttgcatttccatataaattttagaatcagactatcagttttatcaaaaaatcttcctgagattttgattgggattgcattgaacccatcaatcagtgaggggaagaattggtatcttaacaagttttgtaactcatgaacatggtatgtctctccacttatttaggtcttttaaaatttcagcaatattttgtagttttcagtgtgtaagtcttacatattatttgtttattttgtgttttctttgatgcttttataaatgacatttttaaatttcaattatttattatttgtatattaaaatacagttaattttctgatattgaccttgtgccttgtgaccatgctaagcttagttattacttctagtataggtgcttttgttaattctttaggattttctatagagacagtctcgtttgctagtaaagacatctttacatcttttcgatctataggccttctttttgcttgcactaattaggacctcctgtatagtgttgattagaactgagatgtcagctacgagctgacatctttgctctgatcctggaccttatggagaaagcattcagtctttcaacattaagtatgatactagctgtagattttttgtatatttcctttatcaagttgaaaaagttttattcctagtttgctgagcctttgtattatgagtaggtgttgaatttatcaaatgctttttctgtattcattgatatcatcatatggtgtgtgtgtgttattttgtttttctttttgaagttcactaatatggtgaattacattgattgattttcagatgttaagccaacatgacattcccggaataaactctagttggtcgtgatgtattactgttttgacatattgctggatttgatttattgatatattattaagagttttatgatatattattaagagtttttatatctatgttcatgaaggatattggtgtcgtttttatgtaatatcctttgttttggtatcagggtaatactgaccttgcagaacgtgttgtaaagtattctctctcctttttttttgaatgagtttgtgtagaattgatattattcttactaaatgggaaaaatttattaggaaacccatctgaacctaaaattttctttgtggcaaagtttttaaatacaaattcagttttgtttttttttttcataaatataggactatttagattctctttttttgagctttggtaattggtgtcttccaagtaatctgtccattttgttgaagttgctgagtttattaatttattgaaataagcttgttcatcatggatctatgatcagtgattatctttcccactcctaatatcagtaaattatatcaaccaattttatttattgatcttttccaagaaactacttttgattcatttgattcttctctatgatttttccattttcaatttcattgtctgtcatgcttatcttttgttcttctgcttactttttaaatatgctctcctttttttacatagttttctaaaatagaaacttagataattgaattaagttgattctctaaaatgtaatgtaaacagttaatgctatatgagcaccagttttcctgtatcctacaatttttgttatggttatatgttttcattttaattcacattataatctttaaaaatttccatggggtgttattcagaggtatattttttaacttcaaactatttgggtgttttgccaggtatctttctgtaaatttctactttctgttggggtcacacatggtcctgagtggaagaatctcagtcctttgatacagggagtacagggatcttcctactctgtcacatttcctctatgtcagccatcatttgctgataatattttagttcctcataatgcttattgagtaatcagtgctcaaattatatttgttgaattgcactcgttgatgtcattcagtacttctttcaggcttaacagaaagtgaataaagtggcatttgttgaataccaactgtagtagaatgatagaaactttacatactttttcattgaatgtttaccataatctgtatatcaattaattgaggtacatgatgagattctcctgtcatgtgtgagaagttgagcctcaggagggttaacataagttgtggcatcagggtttgaatctatgccactctttcttccaagttggactccttgcctaattgtgtgagactgtatgttctcttacaggtcacttagagctttaccttcttatgactgttaatcatggtgctaaatggtagtttaaattgtctatatttagaatgcgtcagctgagtttttcaatttactgaactttttatttgctctaattcatggtgaaatttttgcaaaaaggggcttatttagtaattttgtttattttaggcagtatttggcagtcgtattcagagataaacccctggagctatgggatgttaggacttgtacccttcttagagagatgtccaaaaacttccctacaataactgctttggtaagttacaatttaagaatttaatagcttatttaggtatatatgtatgtggtgaatgttttgcttaagcttgaatcaaaatcattactgccaatgtcatttttttggttaaaaatgtgtgttcagagaagatgatctaaataaatggagataattcttattttcttggataaatcaacctaatatcatattagtgcaattccaattcaagtttcatttggatattttgaggaatatggtaaacatattcaaaaatgtttatgaaagaataaaggtcctaaatagctaagtcatccttgaataaagaggagtaaatgtgggaggtgtgggtggggttggcccttcctacctgatattagtacatcttacaaaaccatggaaataaaatcagtattgtattggcacaagaatagaaagtgagtcaacctaataaagagctcaggaacagacccatgaatatttggggacttaatatacagtaaagtagcacaaatcaaagaggatggacagactgtgtagtagacggtgttgggaaaactgtctcactttatggagaaaaatacttgatctctacttaataccgtatagagaagtgagtgtcacaggactaaagacctaaatgtaaaaatgtaaagctataaaattgaatataacaaaatacaaaatattgctgtgacctagaggcaggaggagacatcagaagctcaaaccaaaaggcaaaaaaaaaaaagaaacaatgcatttaattaatcaagattaatgctttttgtttgatgaagatgtcaaagttaaatacagaagacattttgggaaaacaaattttccagtgtctaaatttaactagaaactcctgcaagtcaacagtgaaaaaaagcgggaaccctagtgagaaaatgaacaaagtctgtgaagagctaatgagaggcagagaaacctaaaaggccaacaagccatataaaggaatgttcaaactcatcagttttcagagatgttcaaaccatgatatggatctaccgtttagactaacaaaaactggacagccatatagtgttaagtacgggtggaacatagggtatgggaatccttgtgcattgctggtaggaatgtagaccaatgcagccattctgtaaagcacgctggcagcacttgggcaaacacagacatcttctgtgtccgctgagctcttggtcgtaaatgaacttttgcaaggatattgactggtgtgttttgtcatgatgtgagtttggagaccatctgtgtgtttttactgagagaggagacagattaacaattggctgatgcacccatggagtattacgtagcatgcagaaacaggaggaagaggacttaaatacagtggaaagagtaagaaacaggatgaagtatatatatatatatacacacacacacacacacacacacatataaacacaatactatttaggtaaattagataataactacatgttaagaacttatacatatgcgaggatattggactaaaaggctttacaataggtggaatataaaagaatatataaataaaacaagtgattttggaggaatctatggatgataaaggaccctggttcgagaactgtgattgtcttatcgtgtgcacataagagatgggggaggagacgaggaataggcaatactatcattgaattcattattttcattttgtaagtattttataaaaacatcaaaaggtcagaccttttggaagtttgccataaaagctccaattaaaatgcattcatttagcctttctctaagtaggtaaaatctaaagaacaaatgtggattcatgtgtagtaataataaatgatactgggcagtggtgtgtgtgcccagctcttctggacgattctttgacagaaggaaacctagcacttctaggtttgtctgcatttgctttacaggagtggtcaccatctcacaacttgaagagcctgagaaagaagcaacttgcaactcgagaggccatggcccgccagaccgtagtctcagacacagagctgagtattgttgaatcatctgtgatcaggtacagtacagtgtttcttgacactgtcatttgtgccattagcatcatgtctgggaagttgacaagtatcatcggaaggtgtctatggtagcaagttggactctgcttttgaacatacttagtttcatctttcagtacatacccagattactaaaaagataattttatcatttttagtattgtactatactgtttgttataactaataacatatgcagtaatattcacccatcagcatctagtagtaaatgtgctcattccgagtgcccttctactccatacacttcagcttctgaaattcaaatgaacatagcatagacatacagatagatcatattatcatttatacacaccaaagaaaatgtgttgggaatcctaaatttgtgtatcatccccatccataccaatcttacagataaaaggcttcagagataatgttgggtcactgtacagcctcccttctgttgagcacagttctatagccaaaatctctatgaattttatttttcttgtgttaagtttagatcaccatttctctctgtgcagggtaaacttcctctgatgttgtggctgttaaggagtgattcatgtttacccataattagctgggcaaatattagtttcagacttttaaaaaaatagttttggacctcctcttaatgcgtctgtactttgggcaagttaattaattatgagtatcactctaggggaaaaaaaaacatctttatcatatgtttcactatcccaaagcttgctgcaggaggcagaaagtaaatctgaacttagtcagaacatctctgcccgggaacattttgtatttaccgatattgatggccaagtgtatcatctcactgttgaaggaaactcagtaaaagacagtgctcggattccaccagatgtgagtacaaccttgattaaatcttcatcaagaagattttgttttgttggttccatatccagtgaaggcatagttaagttggaaacttcagaaaagcctaatgtaaataaactttatttaaggagatattatcgattaaacttgttccatactgctagagaataacgctgtaactattttgattaaatgtttactgtgtgctactcatttttatccctgtaataatccatgaggagttatctccattttacccataacaaaactgtgggagaataagtaactttcccaaagttatccagcttactcatatggcagagcagtgttttaaactcaggcctgtctgacttcagtatctgtcttctttccatttcaggcattaccctgaaggatttgacttacaatctagtattatttttggataatagtaatcaggttgtaagtgtaatagtattattaacatttactaacttacatatattcttatggccttgtggaatctgtaactaaagttttgccattaatcatttgtgtcagcatgcatctcatagatagtttttaatagatggatcatgaaaatgtttatgttaattaatgcaggctattataatggttaaatgaaggcatgaggggattttttaaaataggtatatttattttaaattgctatctaaaaatggaatgctctagtagaatgccaacccccataattttataggtggctttggggtctcataaagttacaatctagatgttggctgtggctacagtcttttgaagtgtaatgggacagaaggatctatttccaagttggctgcctcacaggctattgcacattaatgctggctgttgacgagggaccttagttcttcatgtcgatctttccataaggctgcttgagtgtcctcacgacatgacaactggcctcccctagagtaagtgatctgataaagcaagaaggaagttgcagagtctattatgacctggtttcagaagtctcttcaaaggcaacttcttaattaaacattctattttatggctaggaaagtagatatcttaaaatgttgcttcatattatatacagaatttcatttctttaatatttttttttattaatggactttattataatattgatttttaaatccagtttttgttttgtttcttgactattaccagagtttttacggtattcagtgtgtgtgctagtccactaatggtcaattattcaaaccactagagttttcttactttttaccatggataccatttgaatttttatgttgtacaataaatgcaaaaataaaatttcttttaataaatagagaagtaattgagcagtaatattatttaatagctaacatgtattgactatttactgcatggcaggcattgctttaaggcctttgcctttataaatttattaatactagcaacaactcaagtttcatgaacttaccctactttatggacaataaatccaagacagaaaggttaagtaaacatgcctcaaatcacataccagtttcaagctgggattcaagcccaggcagtgtgactgcagagcccaggctgctgagccctccatgataccacctctgagcatctattagaactgcaagttcctttcttcctccaagttagattgactacagcagcatttcattcttatgttgtgcttctatatgtaacttctgagcaaagctttctgtgaatttaaactgcatatgcctttagtaaacagcatctcttcaccttcatgattccacaatgttccaaaacgtgtcagtgaagctctggatccttttttcaatagaaaaatcacggcacaattagttataaaagagctttaagtttcccttggaatggatttagttatccttttgcagtgagagataagtttgagttggctctctggaaaaccttccctttacttctctgtttttcttactttaatttcccccttttttttttgaggtatttgttcctcaaaagacatcccctctctttaaatctagttccagtaactacttaatgtctatgaagttgaaatctcctatttcttcatagttgaaattgataggcaatgtagctctttgttagtgtctaaagtctgttttaggatttgatgactaaaagcatactaaagcacagccctttaaattaagttttattaaaatatttattataatgtcttatacagcatagtgaaatttatatttgtttgttgctgttgttttctagggaagtatgggtagtattacctgcatcgcttggaaaggtgatacattagtgcttggagatatggatggaaatttaaatttctgggacttgaaaggcagagtatccaggtataagccaagaatgaaatcttgttatttcattaaaaaaaagaaatgaaatctttttgttttgttttgttgagatggtgtcttgctctgtcgcccaggctggagtgcagtggtgcaatctcggctcactgcaagctctgactcccgggttcatgccattctcctgcctcagccacccgagtagctgggactacaggcacccaccaccacgcccggctaatttttttgtatttttttagtagagacgggatttcaccatgttagccaggatggtctcgatctcctgacctcgtgatccgcccacctcggcctcccaaagtgctgggattacaggcaggagccagcacacccggccaaaaaatgacatcttgatatggttccattagaggcttgtgacttggcaagaaggatcagtaaactcgtggaggtgtagcttggacccttgggtcccttcacctaaacttgggaggatgggccttgagccaagcattcttaggagatagttatctgcaagtggcccctgcagaagtcttagctgaccttaaagggcaggccctttctgtcagatgtggcccccagtcccagcaagtaaagggttctcccatcatcagacctgttagaaatggaaatagtgagagatgttagacatagcttctggtgaccagatctcactctacattgtattgatgtttttgtttctttgtcttcagaggaatacccacacaccgaagttgggtgaggaagattcgttttgctcctggtaaaggaaatcaaaaattaatagcaatgtacaatgatggagctgaagtgtgggatactaaagaggtaggccctctccatgaggataaaacgtaaataaattgttagccataggaactgtgctttgttaaaaaacttctttctgatttagaaatgaaaagtacttaatgagttcgtcaagtttcccataacaaattattttctttactttacagtatttgtgttctaaaggtaacaactcaagatttatttatttatttatttatttatttttattttttattttgatatggagtttcactcttgtcgcccaggctggagtgcaatggcgcgatctcgacttattgcagcctccacctcctgggttcaagtgactctcctgcctcagcctccctagtagctgggattataggcatgtgccaccacgcccggctaatgttttgtatttttagtagagacagggtttcgccatgttgggcaggctggtctcaaactcctgacctgaggtgatctgcccgcctcagcctcctaaagtcctgggattataggcgtcagccaccgcgcccagccgatttatttattttttaatattatcactgtctctgagacctttaaaatgctgcctatttgtggaagatagattgccagaggctgttcagttctaaacttgaactgggcctttgccacagactgtcttccttgaccatttaatctagaataataaagatcttccttttctgtctggaagtgatgcccaaattcactcttgaaggttcagatggtgagcagtttaagaagtggcagaaatgtgacctttcgtatattggatgtggactggtgtacgtcagataaagtgatcttggcctcagatgatgggtgcatcagagtcctagagatgtctatgaagtctgcgtgctttagaatggatgaacaagagttaaccggtatggaatcctaatgatagggggctttgaaacctgtctttactttgccacaagctcttgtattttggggagagagctgctgcttctgtttcatttcagtcttattttcttagaatctgagtttaagaaaatatattaacttgaagcttgagtgtttttactgctgagatgctgcaatctttgtaactatagatgtcaatcattctcaattcaggttttttaagtgccccttttgactcttttctttggtttgttaacaagataaaagatgtttatgtttataaaaatggcttactcagaatttaggcaaactcatcagaggacataaatctagtgataaggctgctggctttttaataatggccttatgtcttttgcaaccatatatcattgaaaagtcactttagaaagtgttctgagtattatgaattttgatgccaatctgtgactagtaaaatgaccagtcaagcaaattagcagattgcagtatcttgctctgttttgtatggttgttttgacattgctttttaccagaataaaaagcattttagtagaatatactccatatatgacttctaaaaaaaaaaagaatgggacaattgtgaatgcatccatttatcagtttaaaaggcagcttttggctgatgcaatacagtgttcatccttggaagatacttgatcctacttggagtggaggagggaacttcttgcctgagtattctcccagcaaaactttggtgcacactctaggctgatatgtagaaaatttcatgagacttttctgaacctttgtagagtcaatatttggcacttcagacacagtaaggttttaaaaacctggtttttcactttgtgttcatgcttgaggcactactgagttgctgctaatgttagcagggctgcctttaacttagttaggtatgctttggtttttgtcactgcccacccctgcccactgcatttgggcaccaccacttcttactatgtaactgactgccatcaggtgaagccagaattcaagacctacattcccatgtctgtccttgtgtcgtttgccagctctggggaagcaccaggatggcctcctaggaaagggcaagcattggtattcattttaaacctaaaggtattgaggacattgaaggaacttcaagggtggtttttgaaaaaattggttactaattctagataaagaagtgtggaactgctatctaaatgtttgaagagcttttccttcacttttaatataaaatttgaatctaaaaagctccaaagtcaaggtgtagcttgttcttaaattaaactgactacagaaatggagtccattgtattaacccatgttcaataccatacttgaacatctggcctgtggccagattttagatcacatgtttcttttaaaatttttctgatttttttttatattcttttcaatctctaatgttacagcctcagccagaaagagaaaactaaatagcaattgggaaaggtcatgcaattgtgtattcattccacaaattgaacttcaaattcagaacaacccttaataaatgttaaagaatgaaaactatggtagtgtaaatgtggagtgaggaaaaagacatctgtgtgttcacctccagattcatggccgatttggtcttgaggaaaaaaagtttgaggtagtatatttctattctgaggaattagaagtatatttggggcttactgacatgggataaaaataaaataggtcctaacattggtgtttcctatgttttcttcaattctccttgaaaacaagtagagaacgtaaaatattgattcacatctgtacattttcttagagcagcttagataggccacttcttcctccaataaagagggggcagtcagacaaattagaagattagaattcctgtttttgagttggagaacctttcttatcggctgcctaatatgtcagggacacaaagagccatcaaaataaatcttaatagtctttttagcagcatctaaaaggaatgcaagaatatgagactgtttaatagcattctggtatcatgcagtttccacaccctttaaatagtattgacttgatatcagggactgttcaacctaatttcctccccagtgttttttttttttaattttattattattatactttaagttttagggtacatgtgcacaacgtgcaggtttgttacatatgtatacatgtgccatgttggtgtgctgcacccattaactcatcatttagcattaggtatatctcctaatgctatccctcccccctccctccaccccacaacagtcccaggtgtgtgatgttccccttcctgtgtccatgtgttctcattgttcaattcccatctgtgagtgagaacatgcggtgtttggttttttgtccttttgatagtttgctgagaatgatgatttccagcttcatccatgtccctacaaatgacatgaactcatcattctttatggctgcatagtattccatggtgtatatgtgccacattttcttaatccagtctatgattgttggacatttaggttggttccaagtctttgctattgtgaatagtgccgtaataaacatacatgtgcatgtgtctttatagtagcatgatttataatcctttgggtatatacccagtaatgggatggctgggtcaaatggtatttctagttctagatccctgaggaatcgccacactgacttccacaatggttgaactagtttacagtcccaccaacagtgtaaaagtgttcctatttctccacatcctctccagcacctgttgtttcctgactttttaatgattgccattctaactggtgtgagatggtatctcactgtggttttgagttgcatttctctgatggccagtgatgatgagcattttttcatgtgttttttggctgcataaatgtcttcttttgagaagtgtctgttcatatccttcgcccactttttgatggggttgtttgtttttttcttgtaaatttgtttgagttcattgtagattctggatattagcccttcgtcagatgagtaggttgcaaaatttttctcccattctgtaggttgcctgttcactctgatggtagtttcttttgctgtgcagaagctctttagtttaattagatcccatttgtcaattttggcttttgttgccattgcttttggtgttttagacatgaagtccttgcccatgcctatgtcctgaatggtattgcctaggttttcttctagggtttttatggttttaggtctaacatgtaagtctttaatccatcttgaatgaatttttgtataaggtgtaaggaagggatccagtttcagctttctacatatggctagccagttttcccctccccagtgttaaaggccactgctaagcacatttttcctaagtaagcatatatagaaagaagctttctgaaatcagatttctgcacaaacctttcctcttcatctgccacagctttccacagtcattttcggtaatcttggggcattcagaaatgtctcacaatgacttgccgatgtggggaggtctggggatgctaaacaacctggaacgatctggcgcaatgaagaattgtcctgccccaaacgccagtagtgttccttagctctctttttcaccgttcattgaatcacactgaacaaaatcacaaaatatggtcctttccttcccagacttccagctcaccttaatgttgccatttccaagtggtggaggaataacttttttctactgattttcttcttggctctttgcttactgattttctgcattcctgtcatgtaggtagctaaaaacctgggtgttatgattcatacctcacataactttagcccagatggagcagaatccgtgacaaacagcaatgatgctaactgcttttgcattctaattgtgtaattttcagaggtgaatgagctcttgcatgtgagtttctccagatgtgagatgatctcctattactttttcatggctgatctttacctttcagaagaaagatttcaattcatttgagggagggaagtagttaagggtcactttcagtttgttcatgctcattgggatgctgtcaacaatattttgcttttggagaaataacatatttgttttaaaaaataaggtatttccctccttttattcagacttggtaaatgttgtcttgcttgcatgatgtaaacactcgatgctgccttctacgtggattctcttgtatcttttcgtttgttcattgattaagaaattaccacacagcatgagaactttccctgaaccattccaagattattatgtatagttaatttttttccctgacatttaccatttccaaacatactgtgatataataccaacaactatctacatgaatctacctaaaacatatacatatgctatctaaaatatgaatggggctgacttgagaattatatagattgtcgtctatgaaggatgaatagaaagaaagttaagtaagctagccacctgcatccctttcagtgttaagtgttcagtgcttctgtaggtagttagataagcctcatttttccaagatgcaatccttcctttatagcccagatgtaaaagaaaagatgactaagtggaaattaaaaaaaaaaattcaaagcaaaagaaaatctttaataagaataaacgaaagtgttcaataagcaaagccaaatacaaatgattacctggaggaaagtaattcacaagtcacagactgtctacagaggggcaaaacagataaacaaatgatgcttcaacatatgaaatgatactcaactttatttataataagaaaaatatttgacctcctactggtaaggataaaagaagaaaataattttaaaaagtaaatttttaaaaagagaaaaatacaaattaaaattgtttcttacctatcagattcaaaagcttgaaaatatactctgttggcaaggctatgaggaaacaagcactctcatccattgctaacagtaagatccctataggaaggaatttggcaatatctaacagagctacatgcacatttacctttttacccagcaatcccagcgctaagaatttatcttaagatgtacattcataccctgtgaccaaaatgcacacaaagttattcatagcaaaattttgaaaaaagccgaactgcttagccgtaggagattggttgaataaatctggggacatctgcagaatggagtaatctatgcagctgtaaaatagtgaggaatagctctgtgacctgatgtagagtgatatccaggatatgtgtaagtgaaaaatgcaagtgtaaaagagcacgtatagcctgcttgtgtacaaaggcggattttatacataggttcatgcacacgtttgcttactaaaacacacaccacacatacacagaataatccagaaaccaatgagaatagttagaagatgtagatggaaaaatggagagtatggggatagcagtgaaacttctctatctttgttatacagtttcaagttttgaaccatttatatattttatatattaaaaatacacagtgaaaacaagagtgaagaaaaagcaaaccctaaaattgaatgcaagacacagttgaaccaaactgtgtaacaacaatattggtaacataaccacacacacacacaaaaacagttcaaataactaaaacacagaacttcccattcactgcacacctttagtggtttatattctaaggacagaattgctaaggaatgttgaactttaccggggtagttgatggtgacactagtaattctgaagctgttttgtgcatgttgtagtctggaacacattagtaaccaaattgcagttttggggagccaagatctgtgctgatagaaagggagatatggatgggaaatggcggtggtgggaagaaacattccaggggtggatttgggttggtaaaaaatcatgacttcttgaacatgtatgttccctggctctgctcacagagagttttcttgcaatgacactcaatggcagtgagcgcacatagcacccagattttactttgcaagttccatttccaggctaaaaggagccagagctctttggacaaaaagtttatttcaggacagaggcacaaaaggtgcaagatgggtctggggcatcttgtggtgccagaattcaagtaaggaattgaaaaaccaaggaggacctgacataagaggcttctcctgtcaaactgggggtagtctgagcatcacgaaaactaatggtggtattgatgtaagtgcagaataccaaagaaaccctcactccatagtaatagtcacagtaaggaaacgggaagtgggcaagaagcaaaagctcaggtggacagaagaatgccagctgacaaatgcggaaagaataagattagaaaatcaccactttgcagccccgatacaataattaattgtatacacaagcaaggatcacttgtggatgtcaaatcactgagtaaaaggatgtttgagaataggaaattcaatctgacaatatttcctccacatattacttactaattaattatacagtggagaaggtgccctgataagagctctggtgaataccccttatctagatgatcagatttagtgtttcctgtaaccagacagctaacatgttccttctgatgcaatgcagtgaaaagtacacagcatcctttgttcagactctgtcaaaaatgtttaacccgaatctgataatcagaaaacagacaagttagaacgtagggcattctccacagcagctgaccaggactcttcaaaaatgaaaaggtcacataaggccaaaaccaaaaaggaagaggaccattctagattggaatagactaaagagacatgacaatgcagtgtaccagccttgactggacccgatttttaaaaataatacagctgccaggacatttggggaataacaagggacttttgaatttggactgcattttaagtgattttactgaatcaatattaaaattcttgggtgtaaaaaaaaagtattattaaaaatatttccaatcactttctggcttttaaattgaaaaatccacataaaatattttgtgtataatttaatttttatttaactacatagaataaagttttctaaagcagagttttccaatagaaacataatgtgagccacataggtaagcttaaattctagtatccacattttaaaaagtaaaaagagatgaaattgattttaattaaaattttatttaagccaatatatccaaagttttatttcaacatataatcagtattaaaagttactagtgagacattttacttttttaaaattattcattcttcaaaattctgtcagtattttacatttattgtaaaatgaattgccctcaaaatttataggacaaattttcagcacaaacagttaagctctatttagattttataaaattttcagttgaaaaagtaggcatgtattcaagttgtttcaaacatatttaaaagttatccaatgactgaatcaataatcactttttaagtttaaattagacaaacattcatttccttcattatactagccatatgttaagtgactatcatattggatatcatactggataattgcacagtccagagttgatgtggatcactgatacgatttggctctgtgtctccacccaaatctcatgtcaaattgtaatctccacaggtcaggggaggcagctggtagggggtgattggatcatgggggcagatttcccccttactgttctcacgatagtaagtgagttcttaggagatctgatggcttaaaagtgtggcacttgccccctcgctggctctctcctgctgccatgtaagatgtgccttgcttccccttcaccttctgccatgattgtaagtttgcctccccagccatacggaactgttgagtcaattaaacctcttctctttataaattaccctgtctcaggtagttctttacagcagcatgaaaacagacaaatacagtcacttaaataagccaacaccatgtataagtttgtgtcattttacataattgtgtctattcaagggatccatggataaagcctcttcaggattctggaggggagttggtagtaaggccaagttgtaaaagccagggcacccctagaaatttggagctaaggtcgagtccgatagagtgtagggtggtcagagcagagctgctgggcattgcagcctttaggtcttctgcttctttgcactgaaacatgttgacaactaggcaaatcttgcttgttagtgttctaagtaagccagctgctggatgtgggggatgctagggcctagagtctaagaagatagcccctgtgttcaacagctacctttataagtgagacctgggaatgctagtgatcacaggtggcatgatcccttcagtgacatactcaaggttgataggccatgttagttgaatagtctcggaaaaacaaaagtacatacaggtaaatatatttatttttaatatttaaaaataatgaactttgttgctatttgttgaatcattgcattgaatcctttattcaagtagtaccagagttgtataccacacaggatacttaaattttaaaggggaaaagaaggccgggtgtggtagctcatgcctataatcccaggactttgggaggccaaggtgggcagatcacctgaggtcaggagtttgagaccagtctggccaacatggtgaaaccccatctctactaaaaatgcaaaaattagccaggcatggtggcaggtgcttgtaatcccagttacttcggaggctgaggcaggagaatcgcttgaacccgggaggcggaggttgctgtgagccgagatcgcaccaccgcactccagcctaggtgacagagcgaggctttgtctcaaaaaaaaaataaaataaaaaatcaaaaaagggggaaaagaaaaatatgttaatcagatttgaatgcagagactctctctgctcttggcttgtgtttcctaagcggtgactacattgaatatactctcagttgttccagatttacctgttgctctctgctgactgctctgtaaatggtttatagctgaagcttcactgtagtataaaacttcattttatttttaaaaacctttctttgttgtctagagcctgtgtggtgcccctatctccttgttccaagggcctctcttgccttgaaagccttcttattacaccagccttggaatggacagtattctttggacatttctcatgtgtaagtttttcacttttctttttctttcataatttacttggggttgaaagacacccatgaaagtcagccatggcctgtactccagcatttaaagggaatggagcctttaaagccgagagaaggcagagacactacagaattgccaggctgcctctgggttctcgggcctttgtggaagtgtgggtcagtgaggagctgtgagggcgtgtattgctctcaggtggctgtgtgcttgtcttatggtctgaacatggatgtgtcgtgatgatgaaaaggatgcgtgtgaagagggcaatggaaggcaggagaatttggagccgggcacgttctttttaaaagcagcatcattagcttcagggatatactgtgtcttaaaaatctcaatatttgcctcattgcaaaaaaatattcacagaaactattagtgtttattaattaaattcacaaatattactgaactcctgccatgtgcagcacggatggaggatttaaaaataatgccaggaagtgtctgttctccaagcactgtctcctcagaatattcattctgcagagctctaaatgagcagattcctttagtaacattgttaagttcttcattaaaaggaatctaaacctgatagattttaaagcctgcttataaatttcctggtttcttgaaagccaaggagactttctttactcattttcttgtttttgactcaataagataaaagcagatattaaagttgattggtggggtcctgagtagattgttgttattttggtctataaccaggtttctaaccaagaactacgaagaaggttatctctatattaacacaacttttttcaggtgaagaaatacgtggttttaagtgaagagataatgaactcattcaaaattttttctttacagtgactatccagaaaatgaagaaataaagaatctcctccaagaacagttgaattcattgtctaagtaagcactccatgtttcattagaagataggaatatgagaaagaaaaatgcaattcaactttaaatgcaattcaaaattaaaataagttacgttttagaaaatattagtggcccaagaagagaccattctgtttagaggtttgcttcccgttagagtctgtgttttgcagaaaaagtacttattcagtagttacagtgacagagcatctgtcttcaccaagttcatgagcaccagctgctctgatctcacatcaaggcaggactagatgcatagtgggagcatccttgtagctcagcttgcctctactacaaacctccatgaagcctcacagcgggagacgaatcgcagggtgattctgggtctgcttcccgcttctaaaatgagttctctgtgtcaggtgctggtgtgcacaggtctggctaagaaattaatgtgctccctagagccaagggcatttaacagaatgtactgggaataagaaaggaaaaaatatgggtctacaaggagttcttggggaaagcgtaacacatttttgcaatctagaatctgttacatataattatagtatttaacaaattaagcatgatattttattgacggaaaattcaaaataattagttttttctatgcaaagattaacatttatgtttaaatgggaaactatagatttaaagaatgtcttcctttctgatttgtgaatattcagtattttactattttagaaatacgaacttataaaagcacaagccattcttccttagatactttatttttggaatagtttcagaataaattacgaatgtcatcttctttaaagtatttactgttcttgatgattttttcaacaatggcattcttgttccagtagttaggcagctaatactttcaaaaactgttgtaagcctataaaccagaaatgagagcgctgcagctccctgtggtggctgaaagctgctgcttctccaagccttgagaacactctcagcccccttcaacttttataatttcagggtcatggtaaagtaccttgtcttgtgtaaattctaaacatgttatttgactggaatttttcatttcaagagtatattgatcaacccccatgctttattgtttgattgaaaacttttgtctcacttttgtccggatttcttccacagtgacataaagaaactgttgcttgatccagaattcactctcttgcagaggtgcctgcttgtttcaaggtaatattgtttgatgtattctgtataagagacaggatttcaagttaactcatttcttttaagggtttttagttagaaacacttagattttagaaaaatgtatcagttcatcctttagatttaacttaaaataattttgacagtagtaataacaaatagggaaaaatcaaattgcattttaaatgtgagatctaggccttctctctggaaagcacttcctcctacagctttttaaaatatgtgttttaaaatatcagatacaggtatatttaaatataccaataaattatatttagaagcgataacctctatatcctgacttacagtagagtttgtcacttataaaaaagactcctctccccacagaataaatagcacattactttcataccttatctagccagttatcccagaggaacttcttcctaatgtgaatcaatggcccacattgaaaggtgtgctaatggcaaaccaggtaaataattgttcttaacacagaacagaaagatgctggagtctgaaggggtcctgtgcagtcaggcccccgtattgttgaaggcccagtagcagggcaggagaacttgctgcctccccctttcaccctgtcaggccccatgccagtatcccagtggatatgtgacaacactcccttccagtccctcagtctactctaggaagccatccaggccaggtgtgctgagtgcagtcaaaactttgcttcatccttgccaggctctatggtgatgaatcggagctgcacttctggactgtcgctgcccactacctgcacagcttatcccaggaaaagtcagccagcacaacagctcctaaagaagctgctcctcgagacaaactgagcaacccactggatatatgctatgacgtgctctgtgaaaatgcctactttcaggtagtctgcttcacacagcaaaacctttagagctgtcatcttgattacttatatctttgtcaatatcttaaacttgggaaactttcaaactaagttactgttcagtaatagaaataagcccttgaaaattagctgggtgtggtggcacgtgcctgtagtcccagctactcaggaggctgagggaggagaatcacttgaacccaggaggcggaggttgcagtgagctgagatcacgccactgcattccagcctgggcaacagagcaagactctgtctccaaaaaaaaaaaaagaaagaaaagaaagaagccctcggtacatttgcattaaaaaaaaagcctgatcaagatttgaaaagctcatagacagttactgcgttgtttactaaacattaaaattttattattaaacaggcttgtttaatttgtcttacatttttaacttggcttcattttaattctgtcattaatttcctataaataacaaatactttatacacttggtttgaatttgctgttcacatgataatttctttaacctcctgcagaatccttcagtgcacataggtttttcatccggctctacttaagtgtcagtttctgtaggcaggcaggtatgcatccaagtgataatatctatcaacatttttgctgttcaaattcttattaaatgtttggggtgctgtaaagttgattatctagtaacctgaaaagtcaaagtagtttattaaaatgatcttattaagtacagtaaaatttaaataattccaaactcttataatccaggcttaatttttcttttttttccaattctagaaatttcagctagaaagggttaatctgcaggaagtgaaacggtcaacttatgatcatacaaggaaatgtacagaccagctactgctcttgggtcaagtatgtcagtttttataactctacatgcttcattaaattgctagttaattcgtatttcagagcaatatatctgtatgtatatatttcataatattttccccttgtatgtacctccttccctgtagacagtttaggctttctttcaaaataataccaataaacctcatgagaaaaaacatatggttaaccagcttgtaatttagacttccataatgcccagtggagcccagctatttgttttgttttgtttttgtgtctgaattgactggtacaaagctaaaataggcaattactcgagcacctagatacaccagcctctggctttatgtttgtctcaaaaaagtagtgtagcacctctgtttaatgtttgtatttgtaaacaaaatattcaattgcattttttgaaaatgagtgttttcctttagttttctaccttatgaattttaaaaagttatgttggaggaaaatgttctcataattagaaaaaccgtttctcttactagacagacagagctgtgcagttgctgttggaaacaagtgcagataaccagcattattactgtgattcactgaaagcctgtttagtcactactgtcacctcgtcaggcccctctcagagcaccattaagttggtggcaacgaatatgattgccaatggcaaattggcaggtaaggcacacttgatatgtttgtcatctctctgaaaaatgagaccttgttcccagcaaagtatctgattagtagggacatttctttctcttttacatatgctgaagaaaaatagaaaaattattgctacctataaatcagatgaatataattgtctaaaccagaattaattgtttacacttttcagagtgaaagggggcactgttaataattgctgagataataggcataaatccaacaatcctaggcaaatcagaacaataaaacctgtgagagaactatgctctccctacttattctccagactgtattgtgcttcctaccctggttacttgagtaataacagtaaaactcttaatattatgtttcagaatttaaatcaagaatgtcttcagtaggtataaaatgggcacgactagataaggtcaaatggggatttaactttttaatgacttctcaaagaaggagctgcagtgtcacttaaggggatgcgcttttgtctttcagagggcgttcagttgctctgcctgatagataaggctgcagacgcctgccgctacctgcagacatacggcgagtggaatcgggctgcatggctggcaaaagtaggtggttccaagtttcaataggtgccctcaacattcgggatagaaagctcagtcctgaactttggacttatgacttagaaacattttttggcctgcaaagctgctttgcaaatactgtcttggaacctttatccttttcctattctttatgagtgtaaattgcattacttatttaaaaatggatcttgcattggtagcaattaagtaaaagcagctgcctcctctttctcccagagtctgagccgaaactacagtccagaggtatagccaggccctgggtcccgtaggcacagaccgttatcattattcagagtatgcagcagcttcagggcagtgtgctagtcaagcagagcatagcctgtatttcatagaaacagatctcactttaactgaattattattttttctttatagagtgcaggatgtttttgttgttaacacaggcgtctttctcaggtccgtttgaatcctgaggagtgtgccgatgttttaaggcggtgggttgaccacctttgttctccacaagtcaatcagaaatcaaaggctctcctggttctcctctctctgggctgcttttttagcgtggcagagacgcttcacaggtaaaccgagagttcacatgggctgctcaggcctgcccgtgagcagtcacttcatgttctctcgcggttctagcaggtcatggtactcgatgtgtaaagtgaaaggagaagtatacatttcaggtttgtcaaaaaacccaaaggagaatggaactgtccgtattcattacatcttcattcggtctaggagctatgctagtttcctactaatatgctgatcagacttaacaggcacctagtaaaagggaatttaaaagtcttcagagaattggggtccattcagctttgactagagcaactgagaggaggcccagagagcagggggagaggcgacagaaggcatggtgaggtggagacatcccgtctgaaaatctggaagaggaacaaccatcactaattgtggagcatttcatttattcaaaactaagggaggtagattacggaaatatgacaaaagattacttgtcaactctggacaggggtacatgggcacttgtcatatctctgtagatttttgtgtatttaaactatttcacaattttttaaagtattaattttaaaaagcttgtgtttggagatgtgagtattcttccctccttttttcaacaaactagggcttagaaaagtgcttgtatcttaatgcagtatgcaggtttccagggaaaatgtgtaaatgtctttatacccttcgatgctgctgcccaccagtgatgtaaatcacaaagcataactcttgttttgttctgttgagcagcatgagatactttgatagagcagccttatttgtggaagcttgcctcaagtatggagcatttgaagtcactgaggacacagatatcctttgcaaggttgtttgtagtgacgaggaagaaagtgacatgcatgggttttggaatttcccttagttgtgctgcctggacaggaactatattatattgtgaaagatccatgttctgattttctgattcaccaaagccaggaaagagggagaaattagaggacaaagaatcagataagaaggtggctgcaccatgggtgtcagctttgactaggatggagggaggcaggaaggactatagaggacagggcccccaagtcttgtctgaacttaaaaagaagatgaaggaatgatttgggaaacaggtagaaggacctggtactttgaaatagtactttttcaagaccagacattccatggaataaattttatatatttatctagaaaaaatatactggaataactaaaaaagtctcacgatcacctctagtgacaatatgatatgggacaaaatacagcacttaaagagaggtgttgctcaggccagccactataatccacccatcagccagaacattttatttcttctaaatggcacttgagcaacattggtttctttgaaaagaatgaacttgagaatgcaactcccaggaccagaaaagaatgaaactgggccagtgcttgcatggtcctgctgctgctcactgcactttgcttcaaattcttacatttgctctcatttctacatggcaggtacttggttctctctctctttctccctctttctctgtgtgtgtttataatttttttttttttttaacagagaattaaaactaaactaaaaattttttttttcctttttttgaggtaaggtctcactcttctgcccagactggagtgagtggcacgatcatggctcactacagccttgacttcctgggctcaagcagtcctcccacctcatcctccccagtagctgggaccataggtccacaccattgtgcctggcttttttttttttttggtagtaacccgggtctcactatgttgcccaggctggtcttgaactcctagttcaagcagtcctctcaccttggcctcccaaagtgctgagattacaggcatgagccacccagccctgcactgaaagttttttaaaattaaactgaaggctgagcctactcaagatcatgtacctagtcactgggaaggtgactggttcagtgtatgcattttgaggatcaaagcatcagcacagagtacccaataggctgtttaaaaaaataaaaataaataaaaaaaaaccaataggacagggctttctaaaaacccaacaaccagatatagggaacattcagaaataaatatctgcccccaaactgccagcctctcagactttcaaatggaatgaggatatgcaggttaagtttctcctctcttatcattcatcttccaatcttcagttgagtgtaggttatgggaggatgttggttgggtcttctggaaggagaagctttggactcagctggtacgaaaggtaatgatggtacagactgagacatggcctactatggccgggaatcaccctctgcccgcgaaaagtctcctgtgttcatcctgtgctgcccgctgtggacaccaggtcccttccgagcagccagcagagcagacgcgactcacccttcctgcttctgggagcctgtgaagagtctcatcacagccctttttactcttcttttccttaactatggtttacagaaactcatcactgctatatatgcagattatgcccggagtttgaagaacctcggttttaagcagggagcagttctctttgcttcaaaagccggagcagctggcaaagacttattgaatgagcttgagtcccccaaggaagaacccattgaagagtgacagcttaataaatgccagggaatctgacctggaaggcagatgggagggggctggtctggctgtggccaccgtcacagtccaggatgaagaggagtacagggtcctgtgagctgtttgaccactgttctaagactatgtgtgcccaaaagcacataagcatctatgttgagagtaagtttgtatcctgcgttggtctcagaaagaacgtgaatgcttaagattttgaaagtacataatattttatactttgggagagagctttaagagtccctggaaatactttttaatttttttaacttaaaattcaagagactgaatcacttttctcattgattaaatgtaaagattattgagaaacctatagtaaatgaaatttgtgagatgttttctcaaatatatgctgtgcctgtacttatatacagtctttcaagagagatacaaacaaggcagaaacatttaaactagtattaaaggtagtttaccaaagcattttttgttttcttaccttgaaaacacagaaccgttaattccttggtttaagcagttgctaagttttgtaattttaggctcagaggaccataggaggttttaagatttatgtttagtccgataggtgaggtctttgatattttgaattttaactccttttatgatacatcacagtaacctcatttttgaagtctttctttgtactttaatgttctctctgttctaatagttgaagtatgagatgtaactattataaactgttgctgaaaacataaatgtctgtaacttacaaacatgataaataaattaaaaattccatcca

SEQ ID NO: 15873 - DNA, 56905 bp, Homo sapiens
ataaagctgatgttgtaaaggtaagtaaaatcccactttgacgctaacatgttgtctagtctaaagtttaatactgtgtatcactaagctctcattaagtcttacgtgtaagtgttgaatagcttttaaatataacaacctatttggggtagcctagaattttcatatatatgacttaatgtcaatacagggtgagttattaaatgctagttgttagatcattttaaggcagatgaaagttctaccatttacaagaccactcagtcattccttagttttgagcacttaccatatgctatggatatggagatgaaagccctcagataattctccatcttataaggaagactcacagcgtgatagtgtgataagtgagacttgcgtaacacgctgtgagaaaacagaggagctgcatattgcctggttgtgaggagagtcacagaagtctacagtttcaagactagtagacagtagttagccaagtaaaaaattgacaaggagcattgcagggaaaagcaagaatatacacagaagtaagtagcgtgccataaagatggctaaagatgggacacttgtaggagtgatgaaataagaggcagccagagagattcagctgtctgtcctgaagttttgtaagattacgaaggagtttggattttttttttttttagacagaatctcactctgtcgcccaggctggagtgcagtggcatgatctcggctcactgtaagctccacatcctgggttcacgccattctcctgcctcagcctcctgagtagctgggactacaggcacccaccaccatgcccagctaattttttgtatttttagtagagaccgggtttcaccatgttagccaggatggtctcgagctcctgacctcgtgatccacccgccttggcctcccaaagtgctgggattacaggtgtgagtcaccgcgcccagcaggaatttggatttttgagtaggagattgatgtgaccatattcgcgtcttagaaaaactctggcagcagtggaggatctgctgaagaaatgcaagactggaggcagtaagatcatttaggagatttctgcagtaattttggtgggaaattctaagggcctaaaataaagctggggcatggagaagtcatgtttaagagcagcaaagaggtaaacctgatagcctttatagtgatcagtataaaggagagtaagagaatagagtgactccaaggtttcttttggtgtaattgaatgacagtgtttccagttatcagaggtaagcatctgtgaagtcagtgaatttttaagttttcaacatgcaaaatctgagatgcctgtaatatattgcattatagtgatccgggctttaggagataggtcaggattagagatagagatttggagtctttttcttttttaaataatagctttattgagatactcataccataaaatgtactgacttaaaatgcacaattctgtggcttttagtatatccacagttaatgcagccacaattacaatgaacttttttacctcaaaaagaaaccctatatccactagcagtcatattccatttcccccatttccctcatcctttggcaaccactgacctactttctgtgtctgtagactggcccattctggggattttatataaattgaatcatataatttgtggtcttttgtgcatgacttctttcacttaggataatgttttcatggttcatctgcgttgtagcatatatcaatactctgttactgatgaataatattccactgtaaggatgtatcacatttattttattgatggacatttggatattttgtactttttgcctgttacgaataatgctgctttgcacattcatgtgcaagttttgtgtgaacctgtgttttcatttcccttgagtatgtttctaggggtggaattactgactcatatggtaactctgtttaactttttgaggaactgctggactgttttccaaattaacattctcattagtagtgtatgaggagtctaatttgtccaaatcctcaccaacgcttgctgttctctgttcttttgattataaccatcctaatgggtatgaattgattctcattgtggctttggtttgcatttccctgatggctaaaggtgtggagtatcttttcatgtgcttattggccatttgtatatcttctttggagaaatgtctatgcaggtcctttgcccattttaaaattgtattatttatctttttataattgagtcgtaagatttctttgtatacagtagtcctcccttatccagaagggaaatgttccaagaccccagtggaagcctgaaaccctggatagtactgaaccctatatatattgtgctttttctcatacatacttacttatgataaagtttataaaccaaaccctgtatatactgttttgtctcatacatacttacctatgatcaagtttataaattaggcataataagagattaacaacaataactaataataataaaggagaacaattataacaatacatcagcattactactcttgcactttgggggcattataaagtaaaataagggttacttgaacatagcactgagatatcacaacagttgatctgataatcagtatggctactgagggcaggtggtgtatacagcatggatgttctggacaaagggatgatttatgattaaggcaggatggaacaggacagtgggagatttcatcatgctattcagaaaagcgcataatttatgaattgtttatttttagacttttttgtgtcatatgtttggattgatacatgatttgcaaatattttctctcaatttgtgggttgtctttttactttcttggtggtgtcttttgaagaacaaaactttttcattttgatgtagtccaatttattattttgtattgttgttgcttgtactttttgtgccatatccaagaaaccattgctttctccaatatcaagaagatatatacctttgtttttttcttagaattttagagctttagcttttaatccattttgagttaatttttatatatgatgtgaaatagggaaaaatactattaatttttgtttattgatcatatcctgtaatctagctaacttcacttagtagatctatttaatagtaattttgggtaaattttttttaagtagacagtcatgtcactgcaagtgactgcagtttaatgttttcattgataatctgtgtgtcttctatttttcttgccatgttgcattggctaggacctctactacaatgaatgggagagtagtgagaggatactcttgtcctgttcctgagcttagggggaaagtattcagtctttcatcaagtctgatgtaaggtatagggtgttttgggaaaaatatatttaccttctctttccctctctgtttcctttcccctacactgccccttggcatttctggagcttttatttctttatgtaggtccaagtttcagtctggtattatattcccatcgactgaagaatttactgtaagttcttaaagtgcctgtctaatattggttgattctcttagcttttatttctctgagaaagtatttcacctttgttttcgaaagataattttcaaaggatatagaattctgggtttataatttttttttctagtagtactttacaaatatcattccattggccaggcatggtggctcacacctgtaatcccaacactctgggaggccgaggtggatggatcacctggggtcaggagtttgagactagcctggccaacaaggcaaaacctcatctctactaaaaatacaaaaattagccaggcgtggtggtacacacctgtaatcccagctacttgggaggctgaggcaggagaacagcttaaacctgggaggtggaggttgcagtgagctgagatagtgccactgcactccagcctcggcaacagaataagactctgtctccaaaaaaaaaaaaaaaaaaaaatccctccactatcttcaagcttacatagtttctgatgaaaaatttttgtttttgtttctctgcattatatcttttttcctccgattatcttcaagatttccttaaccttggttttcaatagtttgattattaaaatatatatatatatggcttggagtttacctaaatggaattcaacatatacatatacaaatatatacacatatacaaacatatatatacacatagagacagtcaattcttgttatttgtggtagctatattctgtaaagttgttgtatacactgaattagtgaatactgaaactttgtttgctcctaggggttaggttcttgtgaggctctggtcacaacattttcatcaactgatcaatagataaccttgctttatatgtgtttccgtttaaagacatattaatatgtcagttgatctattaacattgaactcatagccaacaacacatgcctgagcaaagattatcacatatatatatatgtatgtattttttgcaagacacatcacaacttctcatacttagaaacggtaggcagtatgcttggggacctatttaaacagtgaagtcaccagcaaaaggaacaaaaatgtgaaaaatgtggtactaaataaatcatgagatgaacacttgttttgccattggaaaagctaaagcaagaattcttgtttgacttcagctgggaacacacatgtatgttcggtgacatttttttcaccattctgcacttgtccacaaaagcactgcaagtattgattttgaggttgcaaattatagtgagtaggtaaattgacaaatacagaatctataaataactagaatggactgtgtacacatatatacactatacatattctattcatacacattctatacctatgaacttaaacatatacacatacaaatatgcatacacacatacatatgcatatatacacatacctcatttaaaaatttttgcctgagcaaaagatctattacaggaaaaccttaaggcctgttcacgctcattttcagaaaacgttgtttccatctttttcatgaatactactgcaattggttggcttactttcctaccttagcattatatatgagtgtatttatatctgtacacatatataggtatatacatttatatgtatttatagatttgtggtatttaaatctacttattaaacagaccttggacactgtactaagtctgagaatagaaatgcaaacaaagaccacatggtgtgccctatggaacttacagttgatggactcatgaataggcaaaaagaatgtaaataaaataagtacaaattgtgtagtagtaaatgctttgaagaaaataagcaggatactgagaagagaggggtggtagtgaccagggaaggcctgactcctagtgaggactatgaaatttttcccttattctgtcagtattcattgttcaagaatttaatcagatttgccctggagttcatgtgttttttattttaaaaattctattgttaatcatgttgctataggcatgaagcatttttttttttttagagaaaaacttaatgttttgtgaaagagagagacagctagagttttttgtttgactttgccttctcctgactttccctctgcaaggtttttgtgtttctaagttgtcttcttttagttaggagactagaatacagaaaaacattctgctaaatatgattttaggtattttgtcataaattagatcttaggaaaactgattttcaaggcatcctggggttttaacctaaatttcccaaaatattaaggctgtgaatcatttttcatcacaggatctttgtgatgtgtcaaagaaaacaattttgtaactgcagttaaagatatctaccaaagtaacacaaatgctgccttcaaaatgaaaaccagttttctgtttattcttgctaaatgtttatgtaatataaatgtagtatgggttctggttgatgttttgtgaaaattatgttctgtttcatccagcgcaagtatttacttgatctgatttcttcttgatacaggttaaatgggccagggaaaactatcaccataacattggctcaccatattgcttacggttagcttctgctgatgtcaatgggaagatcatcgtctgggatgtagcagcaggagtagctcagtgtgagatccaagagcatgccaagcctatccagggtgaggaaagtctgctcagctaagtgtgtatattgatacacttactcttggagtggttttttggttttgggggttttcccccattcatttaattttatcaattccaagttagctcttgattgtgttttgcctattctgctgatctaaatctggctttctgtccttactaatacacttctaggcatatttcttcaaatctcaactgatttgtgctttggtaaaactcattaattgcaatatcagcctcattcaagcatgataagaaaaagtaagtggtacaatcttgtaatctaagctacaatataaggaaaattggccactgctgttaggaactagccatcagtgcttactctacattaagtaatttgttcattatcagagatgaacaaaattttattctcattttcatatagattgcttgtttgttcgtttcatgttactgacctaaaaccagtacggtattctttttttttttctttttttttttttgagatggagtgtcgctctgttgcccaggctggagtacagtggcgctatctcggctcactgcaaactctgcctcctgggttcacgccattctcctgcctcagcctcccgagtagctgggaccacaggcacacaccaccacacccagctaattttttgtatttttagtagagacggggttttaccatgttagccaggatggtctcgatctcctgacttcgtgatccacctgcctcgtcctcccaaagtgctgggattacaggcgtgaaccactgcgccctgcccagtacagtattctttagacttaagtcctccagtggctctcttgactgaatgaattttttaaatgactatttaaaaaatatttattaaatacttactgtgtactaggtactgaactagatctttgcatattctgtttattttttgaaaaaccatgaagaactgtaaagttccattaagtaattccacagaaacattaggaaagtctgacatcttggttgtggctaagagagtttcatattgattttatagttttaagtaatgattagggcaaattgccttttattttctttgaagtaatatttcagattacttcaaaatttttaccttgagagtttaaccagacaacttatttttatatagaattagttttttctctggaatattgatacacacacacacacacacacacacgtcacatttggggctggtggttaagtttttaaagattatattttaaaaactaaatatcaaggacaagttagccaaggactttggagagtgtggtttctgaattttgcctttctttatcgggtctttccagatgttcagtggttgtggaatcaagatgcttcccgcgatttactgcttgctatccacccgccaaattacattgtgctctggaatgccgacactggcaccaaactatggaagaagagctatgcagataacattctttctttttcttttgacccttttgatccctcacatttaacttgtgagtaacagttgcttgtggaaaatgagttaagtgagatatttataatatagtaatgctatgtgcatgagatatacacacacattatacatctataatgttaaaatgactgagcgaagtggagaagcatgtctagtccatatatctgcagctcctaatacacatactcaatcataagttcatatcattgcaaatatgataaaaaattaaatcagcaagctacaccttcactgtgttgaatttgtgaatagtattagactagccagggacagagagttactttgacactccagacttaattagttcttctaagaacatttaaataacttgaatcaagggtttcattcagtctgtggccaagttaagttcttgctttttaataaattgtcctaattcacgccattcattttgagtgccataaacagatgcatgtaaagaagaaataagcctaagcaagttttttcttgcagagatagtttttgctaatatgcttttaatgttttcctgagctaatgatctaaaaatgagatgtgctttaggtatttttgtggctaaattgtttagaaactatttaatcatccaacagatatttcttgagctattgctactcttctgggaaccaagatgtctcagaacccaaaaggcaggagccttcacagagtttgcattctagtgagaagaagtcatatcataaactgtgaccacaatgaattaataaattctagtgtagtaagaggtgacaggtgatataaaggcaggataaaggggatgcagaagaatgggggatgagggcatgcaagttgtatgagataaagtggtcaaagtaggcttcactttgataatgatcagaaatgtgaaggaggtaagggaattagctatggtaaggaatgtttttcctggatttgaatgactcaaaattgttttacccatcaacttttattgaggggtgtgtgtgtgtctgcacgtgttaaaggaggaagagaaaggcagacaaaattgaaattataataacatgggaaatgtggctgtgtaaatacactacagggtgcttaggcttttatgtatgtaaatgtttgtatatggacgtgtgcatacatacactcacttggtcaccagtttacttactcacataggtgcagtgctggggaaacacctaggagggctggcccagttggcagagtcagggaaggagggcatcacaaaagaaggaagcaaaggggaccttgaaggatgagttctggaacctgaaaaggcaacaaggctttcagctaacttgattgcatcagctctttacatctctgtaatttggttgatgaaagcattgtgtgttccagagtgtcagttgacctaacatctttgatttactcatattgaatgtgctagggttgtcataactcttgaatgcatcctttttccctgtgtttagagcagccttgctaagggctgggacccagggtagtaaggtttttctgctcatgtcttccagtattaggcccattgttgagggagattattttttcagtcataaaaaggcataatttgtattgctaaatatggtgctccctccttgactatttttgtttcatgtacacttagtaagtcactgtgggcccactactgttttctaaatattaagggaaaagaatattccttaatcatcttaaggttcgatctgatgcttgagaagaaaaagggaatatatttagactgagtagctcaggataaaaatttggtatcatcaaataaaatatatgaacttagctaattgtgatatgcagagcctcttaagtatggttttttgtttttttaagttatgggatatgttaaagtttttttgtttgtttgttttttgtttttgtttttgttttttttttttgagatggaatcttgctctgtcacccgggttggagtgcagtggcactatctcggctcactgcaacctccacctcccagttcaagcgattctcctgcctcactctcctgagttgctgggattacaggtgtgtgccaccacgcctggctaatttttgtatttttggtagagacggggtttcaccatgttgatcaggctggtctcgaactcctgacttcatgatctgcctgcctctgcctcccaaagtgctgggataataaggaaagatttttaatgaaagtccgtgccctgaatttatttagaagaacaaacacttgttctttctgccaataaccttatgttatctttttaatataagacataatatagaatgccaagcttggaggcctctgatgaattgtaatggaccacctgtttctcttcaacttagagaacattcccattatgttatgaatgcataacattgccagttatatattattaaaattatcactatattgctctcaaaattgtattggaataaaactgtatgctaaacttcattaaactttaatcagagttttgcttttctcaatatagtgcttaccagcgagggtattgttttcatctcagacttctccccatccaagcctccctcaggccctgggaaaaaagtttacatatccagcccacactctagcccagctcataacaagctggccacagccacaggtgccaagaaagctctaaataaagtaaaaattttaatcactcaagagaaacctaggtaagttacaagtgtaaaattaacattcatctacttatctggtatgaaagcatcatttttggagatgtacaaagactgatgtttttcttcatctcactttttctcatttctaattttgaatttattagaggaaaaaaatatttatttttgtcccctgccctaagaggagattcagcatttaacattgcctttgtttccactagctgtgctaaacttccccactgacttttatagattaaaatttttgaattctgatttttacttgtgaaaatcgcaatgatcctaaagttcaggcaattgaatgcattaaaaatttgggcacaaaagctggatactcattttaaatacattttcctgacttaggtgctgtgcattctcattcagcagtaaaatcggagtgtttttcttatgcaggtgaagatgtctcccatcctggttaagagccaaggctccgggggaagctttagctatgagactgagaaacttctttaatcttactcaaatttctctctcccagtctctaaaataaggctttaaagtatttcatagggttgttttaaagatcaatagatccaataatgtaagtaaagcatgtaatgtcattgatacatagtaatttatttagaagatgtcggctgttattaagaaattacaactgaataaaagtttattttaagtaatttgatgtattcaaaataggtttctttctttttcctatagcaataatctgtatattattgctttggcaggcttttttgtttgttttggcattcattttcagatagcctttatttttaatatgccaagattactctctctaggcttggtgagtaactacttgaaaaatatgtggtaaaaatataaattgctctacaaatacattttgcacttgtgtgtaagtatcacttctatatattaagccataggctggttaagttcactagttaatttatctctcaccctgtgccaaaatgacttaagattacttcttaagtatcttaagagaactttctattttttatgtattccctctcataaacaagaaattatttggcagtctgaatagttttataagttatgttttatatttcttaagttttctctcatatgaattatatgtatatcttgagtattggggaaatacattatttcttcaagtagaaccgctctgggtgctttcacatctattaattcctggactcttactacaattctggcagtagtaatattcccattttacaaataaggaaaactgagtcccacaccaatttaaataaagttactcaagctcacccaactaggacatggcagtcgggattttaatgcaataaaaattcctctttctagtcttgtgaactaactttattttaaatttcaaagccttttaataaaattatgtttgtaaaatgaaatgtaaaatgaaaatagtacataattgtatgtctattcctattgaaatatatttaatatagaaaaggtcattgaatgtatgcaacaatcacaaattattaaaatgatttttcagaccctaacaatctcttaaaatccttatagtttcacctgttttatttacacacaagaaaatgctgcaatataagtgaaactttgtttcaaaaaagatttaagacagcttaaaagtgaatgaaggcagccaaggggaagttacttgcccaaagccatacagatagtccagtaactcctggtccaggggccctaattaccctaaatgttgatgtttttcatcctgagtcttgattttaacagtttgcctagtacttttaatgacaaagtaaaagtaaaataaaactgtcttatgcatgccagctattattatattatcatttaccatgtcttgtgtaatattaataacttaatattctactacttaatatttcaaaaacttagaaacactgacatttctacccatcctatacaatattattagcatttggattttggtacatagtagagatctaagttttggatgccaacccatgttggtcacttcagggaatagttgtacatttttattgtcaatttttatgtgtaaagtacaaaattaaatcttttattaggtctgatataaatgaagtctttgacccaagtgaatgtttacttttttcagtgctgaattcataactctcaatgattgccttcagttggcatacctgccttcaaaaaggaatcacatgttgttgctctatcctcgagagattttaatccttgaccttgaggtgaatcagacggtgggtgtgattgcaatagaacgcacaggagttccatttttacaggtatctacaattcataaattatattccccaaaattattaagaatgttatattaaaagaaggccataatcttgcataagtcttgtcttcagttctccactttctcttttcaatttatcaaaagactagcaacactattttagattgttttttttgtctgcacttttgattggtttgatttaccctagaaattgtgactgatcctgagatatttattgaactatttaagtcacatgggtaaagacaaattattttaggattataaatggatattttaaatgtacatttagttttaaagtttgggatttgtctatttttttttcttttgcccatattatctaaatatgagtttgagtttcacagtatatactttattaatctattgtgttttaaaaaataaatatatcatctatttaaaggtaataccctgctttcagcgtgatggtttattttgtctacatgaaaatggttgtataactttacgtgttcgaagatcttataataacatttttaccacttcaaatgaggaaccaggtgagtttctgtctcacaataatgttatatttttcttcaaaattattttataaagcttgatgtggcaaataccagccaaggtatatagttaatgatactccttgctttgaggaagtttaaaatatggttataataagaggcataaaaagtataagcccaagattaatctcttgatgttaaaacagtgcacctcctgtatacatcaaagagagtaaaattttgtgtttcttgatcatatccatgagccaagtagatattattttttggaattttttttttttttcagtacaagtccaaccttgtgtgcctttattattatacccccttgacttgttggctgtaagaacttccattgtaaagtgacagaggttattaagtctcagttgtcaagtcagtcttatcttggagaatggaaataatgtttttgtgaaattatatactgtgtaaagatcaaagtgattttcacatcttttggaaagtacagttattttcaggcttatagactactacaaattatgatggaaatttattcattaattatatatcactgttgatcctttttcaaagtatcgtctttattttaaaatattgaaaaaagatatcttgattatagttgttattttggaaattaaacttagtacagtcattaagtaaattatatttggaaaaaatttagtagtaattgtaaaaagtgaagccatgcttgacattgcattcatgaaggagtgatgcccaaatttagttgaggttttatttaaattgaaacaaacagtagtggtatcgatatggctgctttctgatatttaaaacaattttatgtgaagatccagatccagttcaggagcttacctatgatttacgaagccagtgtgatgcaatcagggtgacaaaaaccgtccgtcccttcagtatggtgtgctgtcctgtcaatgagaatgcagccgccctcgtagtgagtgatggcagggtcatgatatgggaactcaagtctgcagtttgtaatcgaaattcacggaacaggtaaatgaatcaacaggatcatggttttgttttttgtttcctgtttccttttataaaaaatttccataatcataaaaataggagggctggttttctataaaaatatttttaaggtaataattaaggctttagattattagggaattatgtaaatctgctagagctatttcacctatgggtaagatgaatgaataatataaaaatagatagaatgccataatctggacttaatactttgaattcctaatacgtaatgcagattttaagtatgtaaaaccttctaattattatgtctttgcagtagttctggtgtgtcacctttatattcaccagtgtctttctgtggaattcctgtaggagtgctacagaataaactcccagacctttccttagataacatgattggtaagcttttttcccctctaactccatgttaagtattctttctgaagggcaaaattaatagaatcactcacttgtaattattttaaagtcaaaaaagttaatacttgagaaaactagaacatggaatcattctttcctaaataaatcagaggggtttaaaatacttaggtagaaaagtgcctgaagtagcacgggtttgcattatagttgttagaaatagaaaacgttcattcgtgagagactgatgtaaatgaaagcaatgacattaggcatctggattttggacctagagccgatgctgagctatgccatgccaactcagggccttgctgtttgctggttcctcagcttggaatgaagtacatgcttcctttctgtctgctactcctaattcaaaattcaactcagatgttgttttctttaatctcccaagtctaatttaaatgctcttcttttgtttttcctaacagttatcagcatattttaattgtgggtttttttcttctgtttcatctcatcaattgtaagcatcacaagggtggtacagtgtttgattctattttgtctttcccagcactcagcacagtaccttgtgcatgcctgttttgtagtaaatatttactgaaggaataaagtaactgagcagtattagaaaagattattttaactttttgacatgaattatttttatgttggggattctttcaaaaaatcatttttggagataaagtgttcaaagttatttaattatgaggccagtatgtattaaaggaagaatgagagtttgtgatttcaaattttatgctacttgaaattataaggctttgtaaatatgccaagcaatttggacatctaatttttttacagttgtggctatggtttataaaggattttctgttttattatttattctaccataatataattgaaaacgatattatttaggagggtttttttgttgttgttgaaacgctaaataagtgatgcactagaaagagcattggccaggcgcagtgactcacgcctgtaatcccaacacttttggaggccgaggcgggaggatcacttgaggtcaggagttcgagaccagcctggccaacatagtgaaaccctgtctctactaaaaatataagaattagccaggtgcagtggcatgtgcttgtggtcccagctacttagggggctgaggcaggagaatcgcttgaacctgggaggcggtggaggttgcagtgagccgagattgcaccactgcactccaacctgggcaacagagcgagactcgatctcaaaaacaaaaaaaaagcattacattattaattacattaattagatcacatttattgggtacttcatactgtgttaagtgctgtgctaaatattctacatattaccttggtacagctttgcaatgtaagtaatattatctccatttgatacatatgagaactgaggcccagagagattaaaactttaaaccacacagtcacacagtcacacaatggaagagcccaagtgtgacccgggtaatcctggctccagagcctgctccttagcaatggcctccagtcctgacagctccactgtcatcttgggtaagaccatcattcatctctaggcctcagttttttcacgatttctgccagttatgaaatccttttgttcagtgatacttactattatatctaaaattatttctctccactatctattctaccagacataaatccatatgaggaagcctggacacatgttttgcaaaatttattttatcagtaacacaattttttgagttaattcaccttgtctactcttaatatgaaaacttaaagtgaaaagaattataaacacacacaagaacagcactaatcagttatatggagcccataggagtttgaaattttatgctgtttaggtatctaagtgatataaattacaggttttttttttttttttttttttgagacggagtcttgctctgtcgcccaggctggaatgcagtggcgcgatctcggctcactgcaagctccgcctcccgggttcacgccattctcctgcctcagcctcccgcgtagctgggactacaggcgcccgccaccacgcccggctaatttttttgtgtttttttagtagagacggggtttcactgtgttagccaggatggtctcgatctcctgacctcgtgatccgcccgcctcggcctcccaaagtgctgggattacaggcgtgagccaccgcgcccggccaaattacagtttttaagagacaaatggatacggattgtatagcagttcttgacaatgtagttgattttaaagtgttaaataaagcttcgtacttgaaaacattttaatttaaacttttaattaaacttttaatttgaaattcactgtgttcttagtgaaaattcaaagcaattcaggtaaataaagaggctgatttatattcactggataaatgctgatacttattaaggcctaatttgccctacattgtgaattgcctcttatgaaaaatacttgaagaaaaatgtggcattccctggatgtcaactcaaagccaacatatgtatgtgtggcacttacatgttaagcttcccattccttcatatttcatcttttttattttattttattttttttgagatggagtctcgctctgtcaccaggctggagtgcggtggcgcaatctcggctcattgcaacctccacctcccgagttcaagcgattctcctgcctcagccccatgagtagctgggattacaggtgtgcgccaccacacccagctaatttttgtatttttagtagagacagggtttcaccatgttgaccaggatggtctcaatcttctgacctcgtgatccggttgcctcggcctcccaaagttctgggattacaggcgtgagccaccacactcggcctccatctttttttaaccaaagttatgtagagagattgatattgagtatgtggctaatcctaagggatcattttaataggattaaaatgctattttttctatatattttgtggattttaaaataacattattaaaacaactttacagcttcaaaaggttgtatttatcacccactcttagtaattatttatacttttcctttcacactatatacatgtttgtgtttatgtgtgtgtagacatgtatgtatatactcatgcatattctttctatttttggcaagttaatcccaatattctgtagtggtttataggaaggaaatttgtatacctttttaatgaacagtcttgatttcattgtactgtttagatttagcttttgttagaatgatttttattggagtcatctttttagtttgagacttgctaacctaagtacgaatggtatatgtgaaaataatgccattgaagtcttaactattgacagtgatggtgtatatattatacacgtgatttatgaatatatatatttgtatttgttttatatttacttataaaacattttgtaattacactgacacattaaggtttcttattagaaattatgaataagttatttaaatctgtttttcatgaataccaattttgtatgtactttacagagtacatcagattgaaaagtaaccctttcaaaaggcagtaaaatgagaaaaatgtggtacagtagttcactctgcagaaactgttctctaatgcaagttctcttgctttgttctgaagcctgtgtagtgctttaataccaggaacattgactgaaacagtgtttcttagaagacataggtccctgcattctggatagcaggactcgggagtaatctatcctttgaggtgttagttgatgcaatttaagtcctatagccaggtacagagtcattgtgtccttaataactacagccactaaagtactacattaactacattatacttttagacctgaagagcatttctactgaaaattttctttagctttttaagatcagcatacactgtagttaatatatttgttatttttattacaaatcagggcaaagtgcaattgctggggaagaacatcccagaggttcaattctgcgggaagtgcacctcaagttcctgctgacgggactgctttcaggactgcccgcaccacagtttgctattcgtatgtgtccaccgttgaccacaaaaaacatcaagatgtatcagccactgctggctgttggtgagtatttgacctggtctttttttttttaactcactttataagatgtttaggttttctagtttctagaagatcctttattctttttgaggatgctttaaaaggagatagagactaagtgaaactgtaaatactcatcctggaacttaaaaaaaaaaaaatttctgtccttttattccaactgtcttatattgaattggaatgctgagtcttcatccacctgagactggacagtcgagtctctgacgctgtccattcatctcggaaataccaggaggctcatccctgcagtgctgaatcccaggctccttgtctgtaattggaccaccccagtctttatgtcatgtcagttttcgttgggtctttattgactaaaaatatagtcagggttaatagcttaataatagcagggttcttcttttgccaagagttatatattaaatattatttaaagtggctatggtccctataaattaagatttgccttttggtgtgaaattgtgtatttgtatgttataggtagaaaaatttatctgggttccaacttgctgtcacattgatttcatagtaatgtgatgaacctaattttctttacagcatagagaaaaaaacaaaatttagtttgctattaagtacacattattaaaatacatttctccaaaacttctgaaaaacagtgtatttgtttgaaactcaacatttcttcttaagatgctatcggctggcttctggctttctcccccagtctattaacatgtgatttgtggtgaaaacctcaccatatttattctgtggccaacatggctgacttctcagtgttaaagactcatttgggtattactgtttggtagtacccttctgtttttttctgtgcctatcttttgaaagcgatttgatttttatgattcaattgtctatatatgtgtcccgatttatataatgcagataaatgtttaatttttgctttagaaactgttgattaatatttcaccactaatagattttaattaggattcatcagtgtgcttcatatgtgcatgtatgtattatgtcagtgttcctgatttgtcagttaggattttgtcaatttcttggggaaaactacttcttgggatagctatgtaataagagctatggcaaggtctgagctttccattgtagaataagctgtattggtatgtagtgaatatcatttactgaatttagtataacaaagtaaaaatataagtacctaaaagtttgtctagaggtgtcactaagaaagataaataagagttcagctatggaattaattctccttgtggtgcccctagtgcattagatcataggttcagcattgttaaaactttcagattgcagaaatcattggattattatgaagttctgttaattgaaaaattttagtaatttagttattttctcagtgccaaaaggtattattatgaaatagatgataaatgtaaacaactgtacaatgtgtttttctagaatagttttgcaaaagatttctggagttttattcagcaaataagataatattggaatttgcccagcatttttacttccactctgttgctttgcatgaattcattaatctttaaatcatgtgcagtgcaaaagtgattgtccatatagactgttcacttttcttgcttaacttataaaaacactatagagactgaagctttactttctcatgtatgtccgtgtcctttacatttaaactttagacatactacctgagaccatgaaaagctttagaataatacctgtaaactattaattatagtgatgacagaatactaatagttaaccaagtgcttactttgtgccaattactgtgcttagtgctttatgtttccccatttaatctccaacaactagattttctactcttcccattttaaagagatgaaaacacagatttagtgtgggcaagtaattcatccaagagtataaggaagagccagggcttaagcccaggtttctttaattgcagaaaccacagttaaccattatactttactctcttgtcaggatttatttaataaaagagacaaaacaaaaagaaaactttggaaagaaaaatggataaccctggttagtgagctctgctagattgcttatttgaggaccagctataataaaccttctgagtctcaaaaagtataaattcccatgtgtataaaagcttaggaaagtgtttcttcaaattgtatgtgtattaatgtaagttttaaggtctttctgtgaaaaatctattcctggaattaggcaaggcttttgagcacgtgaggttaggcccattttttttataaggaagtggaccagagaaattcattcttctttgtgtgtttgtttaaacacatagtttgggtttcttttataaaagataaatgtgttaagtgattaaagtcttgagaaaagacttttcttgcaaagtgctggaactcccactgaattaatgctcttccatgatgtcattttgaaaggtacaagtaatggttctgtcctggtgtaccatctcaccagtggtctgctacacaaagagttaagcatccactcatgtgaagtcaagtaagtatgtcattgtgatgatgacatcacaaacatcatatcagaaaaaaaattctcatagacttttctacattgagtactctgtaatatctgcagtggtgattatttgaaaagtttgaataatattcatgtccaactaatggctatgttaatcaaggatgataactaattctttgctgtgtaaagaacataagcagtagagaatgttttctcttttattaggttggtgcaaaagtaattgcggtttttgcagttttttttttttttttgttgttgttgttgttgtttgttttgttttgttttgttttttttaaatggcaaaaaacacagctatttttgtaccaactaatattgttgcacctcatttatttctcctaagggccaggctgttttctcactggatatccttacgttgccttgttcaggtttattttatttatttattttgctcaaaattattattttttattattttaaaattttttttactttaagttcctggatacatgtgcagaatgcgtgcatttgttacatagttatacatgtgccttggtggtttgctgcacctgtcaacccatcacctaggttttaagctccacatgcattagctatttgtcctgatgctctccctcccctcacatgcccccgccaacaggccctagtgtgtgttgttcccctccctgtgtccatgtgttctcattgttcaactcccacttatgagtgagaacatacagtgtttggtttttctgttcctgtgttagtttgctgaggatgatggcttccagctccatccatatccctgcaaaggacatgatctccctttttatgactgcatagtattccatggtgtgtatgtaccacatttcctctttctttttttttctttaattttactttaagttctgggatacatgtgcagaatgtgcaggtttgttacatagatatacatgtgccttggtggtttgctgcacctgtcaacccgtcatctaggttttaagccccacatgcattaggtatttctcctaatgctctccctccccttgcccctcaatccccgataggccccagtgtgtgatgttcctctcgctgtgtctatgtgttctcatcgttcaactcccacttatgagtgagaacatgcagtgtttggttttctgttcctctgttagtctgctgagaatgatggcttccagtttcatccatgtccctgcaaaggacatgaactcattcttttttatggctgcgtatttttcatttctataacgatccatcagtaggactgcttatgacaaattcaaataaagtcattttaattgttaatttgtcttatttattctttgtttaaacatcatcagaacgctgcatagcatttatttgatttttaggacatgatctgcttatgagttctgtgtatgcagagctgtccgagggaaagctaaattgacggaaaagtgcttcttgctttctgttccaaaatgcctacctgtgctgtccatagcattatttcgctgaatgcaaggctattttccttttgtgtcctatcagtgatagatcgtagagttacatatataaaatatgaatttccacttttttgtttgttttttgatacagtcttactctgtcacccaggctagagtgcaatggcgcgatctcagctcactacaatctccgcctcctggtttcaggtgattcttatgcctcagcctcttgagtagctaggactacaggcacgtgccaccatgcccagctaaattttgtatttttagtagagacggggtttcaccatgttggccaggctgatgttgaactcctcacctcaagtgatccatccacctcagcctcccaaagtgctgggattacaggcatgagccaccacccccagccagtttccagtttttttttatgatctttcagtgaaagcataagaagtcattttctgttttctgtacattaaataattgtaggtcttgtgtataaaaattctcagtgaacccttagcaaacacattatcctgagtacatgcattttcttaatggagaagggttaaccttttttttctttttttttttttttttgagttggagtttcgctcttgttgcccaggctagagtggaatggcgctatcttagctcactgcaacctctgtctcccgggttcaagcaattctcctgcctcatcctcccaagtagctgggattacaggtgtatgccaccacgcccagctaatttttgtattttttagtagagacaagatttcaccatgttggtcaggccggtcttgaattcctgacctcagatgatctacctgcctctgcctcccaaagtgctgggattacaggcgtgagccaccgcgccaggccaggttaaccttttaagtatcacagcttctgattgtgatggaaatctctgaaaagtttgcattgtcttactgtttcaagtgcattgttgtgtggtgcagcccaggtgactgtttattgccaccttacgctgttcctatacagcatctccccagatacatttacgtggaataataatgtctttaaaagctttgggcttttgaggtgcagtgacacaggtatctgtttggactctttcaggctgttattcatctcttctcttctgttgcagtgtctgtagcttgccattctggcacttctagtagtctctgcttacactgctgaatcttctctctctctctttcccatctcctcttctctcgacatttcctttcaccctgccttgtgtgtctggtgtttccttttatggtcagcactaaccaatcgaaactctccatttaatcactacttattctagggattatgttaactattaatacttcacacgtatcatttcattgaatccccactacaatcgtatggggcaggtattgtatttccagtctacagagtaagaaactgaaaattacagagtaatctgtgaaggagctagatggaattcactctgggcctttgaagcctcagaacctgaactcttcacttatacttacagtgcatgtgctgcatctcctgctaaaatacgcacataggttagtaggaatcatgttggcagtaaaattaaaatgttggctgagccaagatttgtgctaagaatttcacacatgcttctgaaaaatcaaacatgttgtcttttcaaacacagaaagttttaatagctaattaatcagagaggtattaattttaagtaaggtttattatcctggattagtcaggttatagatgtcactaaatacttgacttatacatgttaagataatatttatggttgagtaacattgaaattgattataagtgttacttgggatactaactctgagggatatactacttatcagataaatgtgaatgatcatacaaagatactccatttttatatgaatttttcctcttcattgccattttgaaaataatttgtattttatattcagagatactgcccaagagaacactaaaatcctgctttgtgtttcagttaatgcaattttagtattataatcaaaagccattaagaaaatttcacagaaatacaaaaattagctgggcgtggtagcatacacctgtaggctcagccatttgggagcctgaggtgggaggatctcttgaacctgggaggcagaggttgcagtaagttgagattgtgtcactgcactccagcttgggtgacagtgagaccctgtctcaaaaaacacaaaacaaaacaaaacaaaactttcacgatgtattataaaaatgtctgaatttattagcagtaaactcaaaacattttagattttcatgtccaaataaggttaacttttagaaagttgtttttctaccttttattaagtgtgtttttaaaaaatcataatctaaagcacttgaaggttgtatatactgtgccggggactcatgacagcagatagcacaaagtgtgtgtgtttttaaaaccatgatgttttaacttgtgatgctttatgaatatctgttgaatatcttctctatgcttataaacagagaaagcctttgaagcttataatgcaatggaagatacttagaagtaaacaaaatagagaggtatatgtagattttcttaggtcattagtttgtgtctttgtctggtaggctgaaactactgtcatatgactctctccctggccagattttaatagtcatactaatactgatgtgaatcctgataattaaactatcttgtcattacatttgtagataaagttttggttagaaatgattttgtatgtgttaggtatggtaatacagtctcaaataaaaggtcatgttaagataaaaggtcatgcttactttttaattaatttgtgtaataaaatttaggtctttggaaaacttatttttcaaataaatgaacctttcaaataaaaaagagaattagtttaacctttatctcatttcctattataggggtattgaatggacaagtttgactagttttctttcttttgctacctcaacaccaaacaatatgggattagtgagaaatgaacttcaactggttgatcttccaacaggtttgtttttaaagatccaaataggtttgtcatattgaataaacatgttgccatttataaaacatgtttgaaagtacttctttcaccttggaatttttttttatatttcatgcttatatatttattcttttattctctaataattgccctagaaaggcctcatcattgtttacatggaaatgttgttggcacaaatacatggtaaaatggaggaccattagcctgaacagacagattcattaaaaaataggataccggttctacttttaagtgcattgttatatgtaaccaactttaaaagatcgatttaaaaataactctgtcaatggactttattagagtctgtgctggaaattttggcttttataggaaacacttagaaaatttataggttaaggattgtttttaaatgctcaaatttaaaacttgtaatagtctctggctgaatgaatagagaaacttaatttgggattttgaagattctacagtaggaaacgtcccaataaggtaactttttcagaattgaaagcctaaacccagtgaatttcaaaataaagaatttgaaaatataataaggaaagagtttcaaattattttctggtgtatgcagtagtttcaaagaggtttttttaaaaataaaattgtgatgagtttctttaaaatggtatagcaacacgaatcatatgtagatgatcttaaccaatgagagcatgtgtatgtatgtgtaaaatgaattaaatcaaataaatggttgtaaatcaagtaagttgtaaataaatgaagtacatggttgcttttttatgttctccatatgtattttcaagctctcaaagatccagttgttcttacttctcagggtatgttgctgaacttccaggaatcattcccgtctttagtccagtgttgctgctctagtctcattggaagtgacctgtccactgactctcatccccaagttcctaatttgccagcagaatggtactggccctgtgtctagtgatcccagggataaaatgctgttgtctagtatcattgacttaaaaaaaagaaaaaaaatccctgttttatttgttttggtcagctcaagttcaggactgttagataacttaaaatctgctttgcacagatgtatttttaaggaacaaacatctacagtaacagttacagatttccttaagtgggatatttgagttcatagatggtagacttttatagcctgggcttctaaggagggcagcagactagtgcagtcaggacaggacatgggctgtttggggtataataatagtgagtatagtgagattccacatgatggaatctcaacaaagagtaggaaggcgtttaggccttcagttgtccttgaattgagtatgttctctcttttgtttaatgtagataaaaatctaacacaagatactaaaacatacaaggtagaatttatactttttttattcacagaaaatcatgtaacttcctttgcgggtaactcattctttcacagcatacatgaacaccgtagttattccctagtttccagtttataaagatgttttgagaggaacatgttcaaaatatttaactagtattttgcacatgggacaagaagatcttaaatacatgtttcaagagtttttcccccactagttagtatttggaaacatgggaatgtttgtattaaatattactttaaataagtagttttcgcaccagacaattgctgtaccataaatatcttaaaacttaacattgtttttttaaatttctaaaattgaattatagaattcaagaaactgtgtgacaaatgaaaatgcctttttacaaaataaatatctgaatatgtgatatattattgatcattagtttgtaacacttttaagaatattctttgaacttacattattagaaacagcttagaaggaactgggcgccgtggctcacacctgtaatcccagtgctttgggaggctgaggcagatggatcactagaggttaggagatcgagaccagcctggccaacatggtgaaaccccatctctactaggagtacaaaaatgagctggcgtggtggcgagcgcctgtaatcccagctactcgggatgctaaggcaagaaaatcacttgaacctgggaggcggaggttgcagtgagccaagattgcgccattgcactccagcctgggtaacaaagtgagaccatctcaaaaaaaaaaacccgaaaaaacagaaacagattagaagcaaatggaagaatgaataggagaacagagggtaggatgggtaggactgatcaaattacattggcgtggcttcttgtttttcatacatgttttatgcactgttctcacttttttaaatatttgcaattaaaggtaggagcattgcttttcgtggtgaaagaggcaatgatgaatctgccatcgaaatgattaaagtatctcatttgaagtaagtgtcaacctaaaaaaaaatctatggtgttatcacaatgaaatctcgtggatttttttaatctttaagaaaatgggaatgtgctggaatgcatatggaatctttttagtgatagcaaatggtgatatgcagcccaaagaaaatattttgattacaaaattaagttgctatcacttttaattctctacttctaaaaagatgaagtaacttttgcatgaatcgttatttactttcggataaagttcttatgtacttctatctaagcatggagttactgagtgaaagaactcattttctttatgtataatttaaactcattttgcttccagaaattgagtttttttgtttcaggggaaaataacatgtaaagcagtattattaaaaatagaaactgaatgaaaatcaatcaaaattacaaagaaagagtaagctttctaaagtagttttcaaacttgttttggcttttctaagatctttgcatttccatataaattttagaatcagactatcagttttatcaaaaaatcttcctgagattttgattgggattgcattgaacccatcaatcagtgaggggaagaattggtatcttaacaagttttgtaactcatgaacatggtatgtctctccacttatttaggtcttttaaaatttcagcaatattttgtagttttcagtgtgtaagtcttacatattatttgtttattttgtgttttctttgatgcttttataaatgacatttttaaatttcaattatttattatttgtatattaaaatacagttaattttctgatattgaccttgtgccttgtgaccatgctaagcttagttattacttctagtataggtgcttttgttaattctttaggattttctatagagacagtctcgtttgctagtaaagacatctttacatcttttcgatctataggccttctttttgcttgcactaattaggacctcctgtatagtgttgattagaactgagatgtcagctacgagctgacatctttgctctgatcctggaccttatggagaaagcattcagtctttcaacattaagtatgatactagctgtagattttttgtatatttcctttatcaagttgaaaaagttttattcctagtttgctgagcctttgtattatgagtaggtgttgaatttatcaaatgctttttctgtattcattgatatcatcatatggtgtgtgtgtgttattttgtttttctttttgaagttcactaatatggtgaattacattgattgattttcagatgttaagccaacatgacattcccggaataaactctagttggtcgtgatgtattactgttttgacatattgctggatttgatttattgatatattattaagagttttatgatatattattaagagtttttatatctatgttcatgaaggatattggtgtcgtttttatgtaatatcctttgttttggtatcagggtaatactgaccttgcagaacgtgttgtaaagtattctctctcctttttttttgaatgagtttgtgtagaattgatattattcttactaaatgggaaaaatttattaggaaacccatctgaacctaaaattttctttgtggcaaagtttttaaatacaaattcagttttgtttttttttttcataaatataggactatttagattctctttttttgagctttggtaattggtgtcttccaagtaatctgtccattttgttgaagttgctgagtttattaatttattgaaataagcttgttcatcatggatctatgatcagtgattatctttcccactcctaatatcagtaaattatatcaaccaattttatttattgatcttttccaagaaactacttttgattcatttgattcttctctatgatttttccattttcaatttcattgtctgtcatgcttatcttttgttcttctgcttactttttaaatatgctctcctttttttacatagttttctaaaatagaaacttagataattgaattaagttgattctctaaaatgtaatgtaaacagttaatgctatatgagcaccagttttcctgtatcctacaatttttgttatggttatatgttttcattttaattcacattataatctttaaaaatttccatggggtgttattcagaggtatattttttaacttcaaactatttgggtgttttgccaggtatctttctgtaaatttctactttctgttggggtcacacatggtcctgagtggaagaatctcagtcctttgatacagggagtacagggatcttcctactctgtcacatttcctctatgtcagccatcatttgctgataatattttagttcctcataatgcttattgagtaatcagtgctcaaattatatttgttgaattgcactcgttgatgtcattcagtacttctttcaggcttaacagaaagtgaataaagtggcatttgttgaataccaactgtagtagaatgatagaaactttacatactttttcattgaatgtttaccataatctgtatatcaattaattgaggtacatgatgagattctcctgtcatgtgtgagaagttgagcctcaggagggttaacataagttgtggcatcagggtttgaatctatgccactctttcttccaagttggactccttgcctaattgtgtgagactgtatgttctcttacaggtcacttagagctttaccttcttatgactgttaatcatggtgctaaatggtagtttaaattgtctatatttagaatgcgtcagctgagtttttcaatttactgaactttttatttgctctaattcatggtgaaatttttgcaaaaaggggcttatttagtaattttgtttattttaggcagtatttggcagtcgtattcagagataaacccctggagctatgggatgttaggacttgtacccttcttagagagatgtccaaaaacttccctacaataactgctttggtaagttacaatttaagaatttaatagcttatttaggtatatatgtatgtggtgaatgttttgcttaagcttgaatcaaaatcattactgccaatgtcatttttttggttaaaaatgtgtgttcagagaagatgatctaaataaatggagataattcttattttcttggataaatcaacctaatatcatattagtgcaattccaattcaagtttcatttggatattttgaggaatatggtaaacatattcaaaaatgtttatgaaagaataaaggtcctaaatagctaagtcatccttgaataaagaggagtaaatgtgggaggtgtgggtggggttggcccttcctacctgatattagtacatcttacaaaaccatggaaataaaatcagtattgtattggcacaagaatagaaagtgagtcaacctaataaagagctcaggaacagacccatgaatatttggggacttaatatacagtaaagtagcacaaatcaaagaggatggacagactgtgtagtagacggtgttgggaaaactgtctcactttatggagaaaaatacttgatctctacttaataccgtatagagaagtgagtgtcacaggactaaagacctaaatgtaaaaatgtaaagctataaaattgaatataacaaaatacaaaatattgctgtgacctagaggcaggaggagacatcagaagctcaaaccaaaaggcaaaaaaaaaaaagaaacaatgcatttaattaatcaagattaatgctttttgtttgatgaagatgtcaaagttaaatacagaagacattttgggaaaacaaattttccagtgtctaaatttaactagaaactcctgcaagtcaacagtgaaaaaaagcgggaaccctagtgagaaaatgaacaaagtctgtgaagagctaatgagaggcagagaaacctaaaaggccaacaagccatataaaggaatgttcaaactcatcagttttcagagatgttcaaaccatgatatggatctaccgtttagactaacaaaaactggacagccatatagtgttaagtacgggtggaacatagggtatgggaatccttgtgcattgctggtaggaatgtagaccaatgcagccattctgtaaagcacgctggcagcacttgggcaaacacagacatcttctgtgtccgctgagctcttggtcgtaaatgaacttttgcaaggatattgactggtgtgttttgtcatgatgtgagtttggagaccatctgtgtgtttttactgagagaggagacagattaacaattggctgatgcacccatggagtattacgtagcatgcagaaacaggaggaagaggacttaaatacagtggaaagagtaagaaacaggatgaagtatatatatatatatacacacacacacacacacacacacatataaacacaatactatttaggtaaattagataataactacatgttaagaacttatacatatgcgaggatattggactaaaaggctttacaataggtggaatataaaagaatatataaataaaacaagtgattttggaggaatctatggatgataaaggaccctggttcgagaactgtgattgtcttatcgtgtgcacataagagatgggggaggagacgaggaataggcaatactatcattgaattcattattttcattttgtaagtattttataaaaacatcaaaaggtcagaccttttggaagtttgccataaaagctccaattaaaatgcattcatttagcctttctctaagtaggtaaaatctaaagaacaaatgtggattcatgtgtagtaataataaatgatactgggcagtggtgtgtgtgcccagctcttctggacgattctttgacagaaggaaacctagcacttctaggtttgtctgcatttgctttacaggagtggtcaccatctcacaacttgaagagcctgagaaagaagcaacttgcaactcgagaggccatggcccgccagaccgtagtctcagacacagagctgagtattgttgaatcatctgtgatcaggtacagtacagtgtttcttgacactgtcatttgtgccattagcatcatgtctgggaagttgacaagtatcatcggaaggtgtctatggtagcaagttggactctgcttttgaacatacttagtttcatctttcagtacatacccagattactaaaaagataattttatcatttttagtattgtactatactgtttgttataactaataacatatgcagtaatattcacccatcagcatctagtagtaaatgtgctcattccgagtgcccttctactccatacacttcagcttctgaaattcaaatgaacatagcatagacatacagatagatcatattatcatttatacacaccaaagaaaatgtgttgggaatcctaaatttgtgtatcatccccatccataccaatcttacagataaaaggcttcagagataatgttgggtcactgtacagcctcccttctgttgagcacagttctatagccaaaatctctatgaattttatttttcttgtgttaagtttagatcaccatttctctctgtgcagggtaaacttcctctgatgttgtggctgttaaggagtgattcatgtttacccataattagctgggcaaatattagtttcagacttttaaaaaaatagttttggacctcctcttaatgcgtctgtactttgggcaagttaattaattatgagtatcactctaggggaaaaaaaaacatctttatcatatgtttcactatcccaaagcttgctgcaggaggcagaaagtaaatctgaacttagtcagaacatctctgcccgggaacattttgtatttaccgatattgatggccaagtgtatcatctcactgttgaaggaaactcagtaaaagacagtgctcggattccaccagatgtgagtacaaccttgattaaatcttcatcaagaagattttgttttgttggttccatatccagtgaaggcatagttaagttggaaacttcagaaaagcctaatgtaaataaactttatttaaggagatattatcgattaaacttgttccatactgctagagaataacgctgtaactattttgattaaatgtttactgtgtgctactcatttttatccctgtaataatccatgaggagttatctccattttacccataacaaaactgtgggagaataagtaactttcccaaagttatccagcttactcatatggcagagcagtgttttaaactcaggcctgtctgacttcagtatctgtcttctttccatttcaggcattaccctgaaggatttgacttacaatctagtattatttttggataatagtaatcaggttgtaagtgtaatagtattattaacatttactaacttacatatattcttatggccttgtggaatctgtaactaaagttttgccattaatcatttgtgtcagcatgcatctcatagatagtttttaatagatggatcatgaaaatgtttatgttaattaatgcaggctattataatggttaaatgaaggcatgaggggattttttaaaataggtatatttattttaaattgctatctaaaaatggaatgctctagtagaatgccaacccccataattttataggtggctttggggtctcataaagttacaatctagatgttggctgtggctacagtcttttgaagtgtaatgggacagaaggatctatttccaagttggctgcctcacaggctattgcacattaatgctggctgttgacgagggaccttagttcttcatgtcgatctttccataaggctgcttgagtgtcctcacgacatgacaactggcctcccctagagtaagtgatctgataaagcaagaaggaagttgcagagtctattatgacctggtttcagaagtctcttcaaaggcaacttcttaattaaacattctattttatggctaggaaagtagatatcttaaaatgttgcttcatattatatacagaatttcatttctttaatatttttttttattaatggactttattataatattgatttttaaatccagtttttgttttgtttcttgactattaccagagtttttacggtattcagtgtgtgtgctagtccactaatggtcaattattcaaaccactagagttttcttactttttaccatggataccatttgaatttttatgttgtacaataaatgcaaaaataaaatttcttttaataaatagagaagtaattgagcagtaatattatttaatagctaacatgtattgactatttactgcatggcaggcattgctttaaggcctttgcctttataaatttattaatactagcaacaactcaagtttcatgaacttaccctactttatggacaataaatccaagacagaaaggttaagtaaacatgcctcaaatcacataccagtttcaagctgggattcaagcccaggcagtgtgactgcagagcccaggctgctgagccctccatgataccacctctgagcatctattagaactgcaagttcctttcttcctccaagttagattgactacagcagcatttcattcttatgttgtgcttctatatgtaacttctgagcaaagctttctgtgaatttaaactgcatatgcctttagtaaacagcatctcttcaccttcatgattccacaatgttccaaaacgtgtcagtgaagctctggatccttttttcaatagaaaaatcacggcacaattagttataaaagagctttaagtttcccttggaatggatttagttatccttttgcagtgagagataagtttgagttggctctctggaaaaccttccctttacttctctgtttttcttactttaatttcccccttttttttttgaggtatttgttcctcaaaagacatcccctctctttaaatctagttccagtaactacttaatgtctatgaagttgaaatctcctatttcttcatagttgaaattgataggcaatgtagctctttgttagtgtctaaagtctgttttaggatttgatgactaaaagcatactaaagcacagccctttaaattaagttttattaaaatatttattataatgtcttatacagcatagtgaaatttatatttgtttgttgctgttgttttctagggaagtatgggtagtattacctgcatcgcttggaaaggtgatacattagtgcttggagatatggatggaaatttaaatttctgggacttgaaaggcagagtatccaggtataagccaagaatgaaatcttgttatttcattaaaaaaaagaaatgaaatctttttgttttgttttgttgagatggtgtcttgctctgtcgcccaggctggagtgcagtggtgcaatctcggctcactgcaagctctgactcccgggttcatgccattctcctgcctcagccacccgagtagctgggactacaggcacccaccaccacgcccggctaatttttttgtatttttttagtagagacgggatttcaccatgttagccaggatggtctcgatctcctgacctcgtgatccgcccacctcggcctcccaaagtgctgggattacaggcaggagccagcacacccggccaaaaaatgacatcttgatatggttccattagaggcttgtgacttggcaagaaggatcagtaaactcgtggaggtgtagcttggacccttgggtcccttcacctaaacttgggaggatgggccttgagccaagcattcttaggagatagttatctgcaagtggcccctgcagaagtcttagctgaccttaaagggcaggccctttctgtcagatgtggcccccagtcccagcaagtaaagggttctcccatcatcagacctgttagaaatggaaatagtgagagatgttagacatagcttctggtgaccagatctcactctacattgtattgatgtttttgtttctttgtcttcagaggaatacccacacaccgaagttgggtgaggaagattcgttttgctcctggtaaaggaaatcaaaaattaatagcaatgtacaatgatggagctgaagtgtgggatactaaagaggtaggccctctccatgaggataaaacgtaaataaattgttagccataggaactgtgctttgttaaaaaacttctttctgatttagaaatgaaaagtacttaatgagttcgtcaagtttcccataacaaattattttctttactttacagtatttgtgttctaaaggtaacaactcaagatttatttatttatttatttatttatttttattttttattttgatatggagtttcactcttgtcgcccaggctggagtgcaatggcgcgatctcgacttattgcagcctccacctcctgggttcaagtgactctcctgcctcagcctccctagtagctgggattataggcatgtgccaccacgcccggctaatgttttgtatttttagtagagacagggtttcgccatgttgggcaggctggtctcaaactcctgacctgaggtgatctgcccgcctcagcctcctaaagtcctgggattataggcgtcagccaccgcgcccagccgatttatttattttttaatattatcactgtctctgagacctttaaaatgctgcctatttgtggaagatagattgccagaggctgttcagttctaaacttgaactgggcctttgccacagactgtcttccttgaccatttaatctagaataataaagatcttccttttctgtctggaagtgatgcccaaattcactcttgaaggttcagatggtgagcagtttaagaagtggcagaaatgtgacctttcgtatattggatgtggactggtgtacgtcagataaagtgatcttggcctcagatgatgggtgcatcagagtcctagagatgtctatgaagtctgcgtgctttagaatggatgaacaagagttaaccggtatggaatcctaatgatagggggctttgaaacctgtctttactttgccacaagctcttgtattttggggagagagctgctgcttctgtttcatttcagtcttattttcttagaatctgagtttaagaaaatatattaacttgaagcttgagtgtttttactgctgagatgctgcaatctttgtaactatagatgtcaatcattctcaattcaggttttttaagtgccccttttgactcttttctttggtttgttaacaagataaaagatgtttatgtttataaaaatggcttactcagaatttaggcaaactcatcagaggacataaatctagtgataaggctgctggctttttaataatggccttatgtcttttgcaaccatatatcattgaaaagtcactttagaaagtgttctgagtattatgaattttgatgccaatctgtgactagtaaaatgaccagtcaagcaaattagcagattgcagtatcttgctctgttttgtatggttgttttgacattgctttttaccagaataaaaagcattttagtagaatatactccatatatgacttctaaaaaaaaaaagaatgggacaattgtgaatgcatccatttatcagtttaaaaggcagcttttggctgatgcaatacagtgttcatccttggaagatacttgatcctacttggagtggaggagggaacttcttgcctgagtattctcccagcaaaactttggtgcacactctaggctgatatgtagaaaatttcatgagacttttctgaacctttgtagagtcaatatttggcacttcagacacagtaaggttttaaaaacctggtttttcactttgtgttcatgcttgaggcactactgagttgctgctaatgttagcagggctgcctttaacttagttaggtatgctttggtttttgtcactgcccacccctgcccactgcatttgggcaccaccacttcttactatgtaactgactgccatcaggtgaagccagaattcaagacctacattcccatgtctgtccttgtgtcgtttgccagctctggggaagcaccaggatggcctcctaggaaagggcaagcattggtattcattttaaacctaaaggtattgaggacattgaaggaacttcaagggtggtttttgaaaaaattggttactaattctagataaagaagtgtggaactgctatctaaatgtttgaagagcttttccttcacttttaatataaaatttgaatctaaaaagctccaaagtcaaggtgtagcttgttcttaaattaaactgactacagaaatggagtccattgtattaacccatgttcaataccatacttgaacatctggcctgtggccagattttagatcacatgtttcttttaaaatttttctgatttttttttatattcttttcaatctctaatgttacagcctcagccagaaagagaaaactaaatagcaattgggaaaggtcatgcaattgtgtattcattccacaaattgaacttcaaattcagaacaacccttaataaatgttaaagaatgaaaactatggtagtgtaaatgtggagtgaggaaaaagacatctgtgtgttcacctccagattcatggccgatttggtcttgaggaaaaaaagtttgaggtagtatatttctattctgaggaattagaagtatatttggggcttactgacatgggataaaaataaaataggtcctaacattggtgtttcctatgttttcttcaattctccttgaaaacaagtagagaacgtaaaatattgattcacatctgtacattttcttagagcagcttagataggccacttcttcctccaataaagagggggcagtcagacaaattagaagattagaattcctgtttttgagttggagaacctttcttatcggctgcctaatatgtcagggacacaaagagccatcaaaataaatcttaatagtctttttagcagcatctaaaaggaatgcaagaatatgagactgtttaatagcattctggtatcatgcagtttccacaccctttaaatagtattgacttgatatcagggactgttcaacctaatttcctccccagtgttttttttttttaattttattattattatactttaagttttagggtacatgtgcacaacgtgcaggtttgttacatatgtatacatgtgccatgttggtgtgctgcacccattaactcatcatttagcattaggtatatctcctaatgctatccctcccccctccctccaccccacaacagtcccaggtgtgtgatgttccccttcctgtgtccatgtgttctcattgttcaattcccatctgtgagtgagaacatgcggtgtttggttttttgtccttttgatagtttgctgagaatgatgatttccagcttcatccatgtccctacaaatgacatgaactcatcattctttatggctgcatagtattccatggtgtatatgtgccacattttcttaatccagtctatgattgttggacatttaggttggttccaagtctttgctattgtgaatagtgccgtaataaacatacatgtgcatgtgtctttatagtagcatgatttataatcctttgggtatatacccagtaatgggatggctgggtcaaatggtatttctagttctagatccctgaggaatcgccacactgacttccacaatggttgaactagtttacagtcccaccaacagtgtaaaagtgttcctatttctccacatcctctccagcacctgttgtttcctgactttttaatgattgccattctaactggtgtgagatggtatctcactgtggttttgagttgcatttctctgatggccagtgatgatgagcattttttcatgtgttttttggctgcataaatgtcttcttttgagaagtgtctgttcatatccttcgcccactttttgatggggttgtttgtttttttcttgtaaatttgtttgagttcattgtagattctggatattagcccttcgtcagatgagtaggttgcaaaatttttctcccattctgtaggttgcctgttcactctgatggtagtttcttttgctgtgcagaagctctttagtttaattagatcccatttgtcaattttggcttttgttgccattgcttttggtgttttagacatgaagtccttgcccatgcctatgtcctgaatggtattgcctaggttttcttctagggtttttatggttttaggtctaacatgtaagtctttaatccatcttgaatgaatttttgtataaggtgtaaggaagggatccagtttcagctttctacatatggctagccagttttcccctccccagtgttaaaggccactgctaagcacatttttcctaagtaagcatatatagaaagaagctttctgaaatcagatttctgcacaaacctttcctcttcatctgccacagctttccacagtcattttcggtaatcttggggcattcagaaatgtctcacaatgacttgccgatgtggggaggtctggggatgctaaacaacctggaacgatctggcgcaatgaagaattgtcctgccccaaacgccagtagtgttccttagctctctttttcaccgttcattgaatcacactgaacaaaatcacaaaatatggtcctttccttcccagacttccagctcaccttaatgttgccatttccaagtggtggaggaataacttttttctactgattttcttcttggctctttgcttactgattttctgcattcctgtcatgtaggtagctaaaaacctgggtgttatgattcatacctcacataactttagcccagatggagcagaatccgtgacaaacagcaatgatgctaactgcttttgcattctaattgtgtaattttcagaggtgaatgagctcttgcatgtgagtttctccagatgtgagatgatctcctattactttttcatggctgatctttacctttcagaagaaagatttcaattcatttgagggagggaagtagttaagggtcactttcagtttgttcatgctcattgggatgctgtcaacaatattttgcttttggagaaataacatatttgttttaaaaaataaggtatttccctccttttattcagacttggtaaatgttgtcttgcttgcatgatgtaaacactcgatgctgccttctacgtggattctcttgtatcttttcgtttgttcattgattaagaaattaccacacagcatgagaactttccctgaaccattccaagattattatgtatagttaatttttttccctgacatttaccatttccaaacatactgtgatataataccaacaactatctacatgaatctacctaaaacatatacatatgctatctaaaatatgaatggggctgacttgagaattatatagattgtcgtctatgaaggatgaatagaaagaaagttaagtaagctagccacctgcatccctttcagtgttaagtgttcagtgcttctgtaggtagttagataagcctcatttttccaagatgcaatccttcctttatagcccagatgtaaaagaaaagatgactaagtggaaattaaaaaaaaaaattcaaagcaaaagaaaatctttaataagaataaacgaaagtgttcaataagcaaagccaaatacaaatgattacctggaggaaagtaattcacaagtcacagactgtctacagaggggcaaaacagataaacaaatgatgcttcaacatatgaaatgatactcaactttatttataataagaaaaatatttgacctcctactggtaaggataaaagaagaaaataattttaaaaagtaaatttttaaaaagagaaaaatacaaattaaaattgtttcttacctatcagattcaaaagcttgaaaatatactctgttggcaaggctatgaggaaacaagcactctcatccattgctaacagtaagatccctataggaaggaatttggcaatatctaacagagctacatgcacatttacctttttacccagcaatcccagcgctaagaatttatcttaagatgtacattcataccctgtgaccaaaatgcacacaaagttattcatagcaaaattttgaaaaaagccgaactgcttagccgtaggagattggttgaataaatctggggacatctgcagaatggagtaatctatgcagctgtaaaatagtgaggaatagctctgtgacctgatgtagagtgatatccaggatatgtgtaagtgaaaaatgcaagtgtaaaagagcacgtatagcctgcttgtgtacaaaggcggattttatacataggttcatgcacacgtttgcttactaaaacacacaccacacatacacagaataatccagaaaccaatgagaatagttagaagatgtagatggaaaaatggagagtatggggatagcagtgaaacttctctatctttgttatacagtttcaagttttgaaccatttatatattttatatattaaaaatacacagtgaaaacaagagtgaagaaaaagcaaaccctaaaattgaatgcaagacacagttgaaccaaactgtgtaacaacaatattggtaacataaccacacacacacacaaaaacagttcaaataactaaaacacagaacttcccattcactgcacacctttagtggtttatattctaaggacagaattgctaaggaatgttgaactttaccggggtagttgatggtgacactagtaattctgaagctgttttgtgcatgttgtagtctggaacacattagtaaccaaattgcagttttggggagccaagatctgtgctgatagaaagggagatatggatgggaaatggcggtggtgggaagaaacattccaggggtggatttgggttggtaaaaaatcatgacttcttgaacatgtatgttccctggctctgctcacagagagttttcttgcaatgacactcaatggcagtgagcgcacatagcacccagattttactttgcaagttccatttccaggctaaaaggagccagagctctttggacaaaaagtttatttcaggacagaggcacaaaaggtgcaagatgggtctggggcatcttgtggtgccagaattcaagtaaggaattgaaaaaccaaggaggacctgacataagaggcttctcctgtcaaactgggggtagtctgagcatcacgaaaactaatggtggtattgatgtaagtgcagaataccaaagaaaccctcactccatagtaatagtcacagtaaggaaacgggaagtgggcaagaagcaaaagctcaggtggacagaagaatgccagctgacaaatgcggaaagaataagattagaaaatcaccactttgcagccccgatacaataattaattgtatacacaagcaaggatcacttgtggatgtcaaatcactgagtaaaaggatgtttgagaataggaaattcaatctgacaatatttcctccacatattacttactaattaattatacagtggagaaggtgccctgataagagctctggtgaataccccttatctagatgatcagatttagtgtttcctgtaaccagacagctaacatgttccttctgatgcaatgcagtgaaaagtacacagcatcctttgttcagactctgtcaaaaatgtttaacccgaatctgataatcagaaaacagacaagttagaacgtagggcattctccacagcagctgaccaggactcttcaaaaatgaaaaggtcacataaggccaaaaccaaaaaggaagaggaccattctagattggaatagactaaagagacatgacaatgcagtgtaccagccttgactggacccgatttttaaaaataatacagctgccaggacatttggggaataacaagggacttttgaatttggactgcattttaagtgattttactgaatcaatattaaaattcttgggtgtaaaaaaaaagtattattaaaaatatttccaatcactttctggcttttaaattgaaaaatccacataaaatattttgtgtataatttaatttttatttaactacatagaataaagttttctaaagcagagttttccaatagaaacataatgtgagccacataggtaagcttaaattctagtatccacattttaaaaagtaaaaagagatgaaattgattttaattaaaattttatttaagccaatatatccaaagttttatttcaacatataatcagtattaaaagttactagtgagacattttacttttttaaaattattcattcttcaaaattctgtcagtattttacatttattgtaaaatgaattgccctcaaaatttataggacaaattttcagcacaaacagttaagctctatttagattttataaaattttcagttgaaaaagtaggcatgtattcaagttgtttcaaacatatttaaaagttatccaatgactgaatcaataatcactttttaagtttaaattagacaaacattcatttccttcattatactagccatatgttaagtgactatcatattggatatcatactggataattgcacagtccagagttgatgtggatcactgatacgatttggctctgtgtctccacccaaatctcatgtcaaattgtaatctccacaggtcaggggaggcagctggtagggggtgattggatcatgggggcagatttcccccttactgttctcacgatagtaagtgagttcttaggagatctgatggcttaaaagtgtggcacttgccccctcgctggctctctcctgctgccatgtaagatgtgccttgcttccccttcaccttctgccatgattgtaagtttgcctccccagccatacggaactgttgagtcaattaaacctcttctctttataaattaccctgtctcaggtagttctttacagcagcatgaaaacagacaaatacagtcacttaaataagccaacaccatgtataagtttgtgtcattttacataattgtgtctattcaagggatccatggataaagcctcttcaggattctggaggggagttggtagtaaggccaagttgtaaaagccagggcacccctagaaatttggagctaaggtcgagtccgatagagtgtagggtggtcagagcagagctgctgggcattgcagcctttaggtcttctgcttctttgcactgaaacatgttgacaactaggcaaatcttgcttgttagtgttctaagtaagccagctgctggatgtgggggatgctagggcctagagtctaagaagatagcccctgtgttcaacagctacctttataagtgagacctgggaatgctagtgatcacaggtggcatgatcccttcagtgacatactcaaggttgataggccatgttagttgaatagtctcggaaaaacaaaagtacatacaggtaaatatatttatttttaatatttaaaaataatgaactttgttgctatttgttgaatcattgcattgaatcctttattcaagtagtaccagagttgtataccacacaggatacttaaattttaaaggggaaaagaaggccgggtgtggtagctcatgcctataatcccaggactttgggaggccaaggtgggcagatcacctgaggtcaggagtttgagaccagtctggccaacatggtgaaaccccatctctactaaaaatgcaaaaattagccaggcatggtggcaggtgcttgtaatcccagttacttcggaggctgaggcaggagaatcgcttgaacccgggaggcggaggttgctgtgagccgagatcgcaccaccgcactccagcctaggtgacagagcgaggctttgtctcaaaaaaaaaataaaataaaaaatcaaaaaagggggaaaagaaaaatatgttaatcagatttgaatgcagagactctctctgctcttggcttgtgtttcctaagcggtgactacattgaatatactctcagttgttccagatttacctgttgctctctgctgactgctctgtaaatggtttatagctgaagcttcactgtagtataaaacttcattttatttttaaaaacctttctttgttgtctagagcctgtgtggtgcccctatctccttgttccaagggcctctcttgccttgaaagccttcttattacaccagccttggaatggacagtattctttggacatttctcatgtgtaagtttttcacttttctttttctttcataatttacttggggttgaaagacacccatgaaagtcagccatggcctgtactccagcatttaaagggaatggagcctttaaagccgagagaaggcagagacactacagaattgccaggctgcctctgggttctcgggcctttgtggaagtgtgggtcagtgaggagctgtgagggcgtgtattgctctcaggtggctgtgtgcttgtcttatggtctgaacatggatgtgtcgtgatgatgaaaaggatgcgtgtgaagagggcaatggaaggcaggagaatttggagccgggcacgttctttttaaaagcagcatcattagcttcagggatatactgtgtcttaaaaatctcaatatttgcctcattgcaaaaaaatattcacagaaactattagtgtttattaattaaattcacaaatattactgaactcctgccatgtgcagcacggatggaggatttaaaaataatgccaggaagtgtctgttctccaagcactgtctcctcagaatattcattctgcagagctctaaatgagcagattcctttagtaacattgttaagttcttcattaaaaggaatctaaacctgatagattttaaagcctgcttataaatttcctggtttcttgaaagccaaggagactttctttactcattttcttgtttttgactcaataagataaaagcagatattaaagttgattggtggggtcctgagtagattgttgttattttggtctataaccaggtttctaaccaagaactacgaagaaggttatctctatattaacacaacttttttcaggtgaagaaatacgtggttttaagtgaagagataatgaactcattcaaaattttttctttacagtgactatccagaaaatgaagaaataaagaatctcctccaagaacagttgaattcattgtctaagtaagcactccatgtttcattagaagataggaatatgagaaagaaaaatgcaattcaactttaaatgcaattcaaaattaaaataagttacgttttagaaaatattagtggcccaagaagagaccattctgtttagaggtttgcttcccgttagagtctgtgttttgcagaaaaagtacttattcagtagttacagtgacagagcatctgtcttcaccaagttcatgagcaccagctgctctgatctcacatcaaggcaggactagatgcatagtgggagcatccttgtagctcagcttgcctctactacaaacctccatgaagcctcacagcgggagacgaatcgcagggtgattctgggtctgcttcccgcttctaaaatgagttctctgtgtcaggtgctggtgtgcacaggtctggctaagaaattaatgtgctccctagagccaagggcatttaacagaatgtactgggaataagaaaggaaaaaatatgggtctacaaggagttcttggggaaagcgtaacacatttttgcaatctagaatctgttacatataattatagtatttaacaaattaagcatgatattttattgacggaaaattcaaaataattagttttttctatgcaaagattaacatttatgtttaaatgggaaactatagatttaaagaatgtcttcctttctgatttgtgaatattcagtattttactattttagaaatacgaacttataaaagcacaagccattcttccttagatactttatttttggaatagtttcagaataaattacgaatgtcatcttctttaaagtatttactgttcttgatgattttttcaacaatggcattcttgttccagtagttaggcagctaatactttcaaaaactgttgtaagcctataaaccagaaatgagagcgctgcagctccctgtggtggctgaaagctgctgcttctccaagccttgagaacactctcagcccccttcaacttttataatttcagggtcatggtaaagtaccttgtcttgtgtaaattctaaacatgttatttgactggaatttttcatttcaagagtatattgatcaacccccatgctttattgtttgattgaaaacttttgtctcacttttgtccggatttcttccacagtgacataaagaaactgttgcttgatccagaattcactctcttgcagaggtgcctgcttgtttcaaggtaatattgtttgatgtattctgtataagagacaggatttcaagttaactcatttcttttaagggtttttagttagaaacacttagattttagaaaaatgtatcagttcatcctttagatttaacttaaaataattttgacagtagtaataacaaatagggaaaaatcaaattgcattttaaatgtgagatctaggccttctctctggaaagcacttcctcctacagctttttaaaatatgtgttttaaaatatcagatacaggtatatttaaatataccaataaattatatttagaagcgataacctctatatcctgacttacagtagagtttgtcacttataaaaaagactcctctccccacagaataaatagcacattactttcataccttatctagccagttatcccagaggaacttcttcctaatgtgaatcaatggcccacattgaaaggtgtgctaatggcaaaccaggtaaataattgttcttaacacagaacagaaagatgctggagtctgaaggggtcctgtgcagtcaggcccccgtattgttgaaggcccagtagcagggcaggagaacttgctgcctccccctttcaccctgtcaggccccatgccagtatcccagtggatatgtgacaacactcccttccagtccctcagtctactctaggaagccatccaggccaggtgtgctgagtgcagtcaaaactttgcttcatccttgccaggctctatggtgatgaatcggagctgcacttctggactgtcgctgcccactacctgcacagcttatcccaggaaaagtcagccagcacaacagctcctaaagaagctgctcctcgagacaaactgagcaacccactggatatatgctatgacgtgctctgtgaaaatgcctactttcaggtagtctgcttcacacagcaaaacctttagagctgtcatcttgattacttatatctttgtcaatatcttaaacttgggaaactttcaaactaagttactgttcagtaatagaaataagcccttgaaaattagctgggtgtggtggcacgtgcctgtagtcccagctactcaggaggctgagggaggagaatcacttgaacccaggaggcggaggttgcagtgagctgagatcacgccactgcattccagcctgggcaacagagcaagactctgtctccaaaaaaaaaaaaagaaagaaaagaaagaagccctcggtacatttgcattaaaaaaaaagcctgatcaagatttgaaaagctcatagacagttactgcgttgtttactaaacattaaaattttattattaaacaggcttgtttaatttgtcttacatttttaacttggcttcattttaattctgtcattaatttcctataaataacaaatactttatacacttggtttgaatttgctgttcacatgataatttctttaacctcctgcagaatccttcagtgcacataggtttttcatccggctctacttaagtgtcagtttctgtaggcaggcaggtatgcatccaagtgataatatctatcaacatttttgctgttcaaattcttattaaatgtttggggtgctgtaaagttgattatctagtaacctgaaaagtcaaagtagtttattaaaatgatcttattaagtacagtaaaatttaaataattccaaactcttataatccaggcttaatttttcttttttttccaattctagaaatttcagctagaaagggttaatctgcaggaagtgaaacggtcaacttatgatcatacaaggaaatgtacagaccagctactgctcttgggtcaagtatgtcagtttttataactctacatgcttcattaaattgctagttaattcgtatttcagagcaatatatctgtatgtatatatttcataatattttccccttgtatgtacctccttccctgtagacagtttaggctttctttcaaaataataccaataaacctcatgagaaaaaacatatggttaaccagcttgtaatttagacttccataatgcccagtggagcccagctatttgttttgttttgtttttgtgtctgaattgactggtacaaagctaaaataggcaattactcgagcacctagatacaccagcctctggctttatgtttgtctcaaaaaagtagtgtagcacctctgtttaatgtttgtatttgtaaacaaaatattcaattgcattttttgaaaatgagtgttttcctttagttttctaccttatgaattttaaaaagttatgttggaggaaaatgttctcataattagaaaaaccgtttctcttactagacagacagagctgtgcagttgctgttggaaacaagtgcagataaccagcattattactgtgattcactgaaagcctgtttagtcactactgtcacctcgtcaggcccctctcagagcaccattaagttggtggcaacgaatatgattgccaatggcaaattggcaggtaaggcacacttgatatgtttgtcatctctctgaaaaatgagaccttgttcccagcaaagtatctgattagtagggacatttctttctcttttacatatgctgaagaaaaatagaaaaattattgctacctataaatcagatgaatataattgtctaaaccagaattaattgtttacacttttcagagtgaaagggggcactgttaataattgctgagataataggcataaatccaacaatcctaggcaaatcagaacaataaaacctgtgagagaactatgctctccctacttattctccagactgtattgtgcttcctaccctggttacttgagtaataacagtaaaactcttaatattatgtttcagaatttaaatcaagaatgtcttcagtaggtataaaatgggcacgactagataaggtcaaatggggatttaactttttaatgacttctcaaagaaggagctgcagtgtcacttaaggggatgcgcttttgtctttcagagggcgttcagttgctctgcctgatagataaggctgcagacgcctgccgctacctgcagacatacggcgagtggaatcgggctgcatggctggcaaaagtaggtggttccaagtttcaataggtgccctcaacattcgggatagaaagctcagtcctgaactttggacttatgacttagaaacattttttggcctgcaaagctgctttgcaaatactgtcttggaacctttatccttttcctattctttatgagtgtaaattgcattacttatttaaaaatggatcttgcattggtagcaattaagtaaaagcagctgcctcctctttctcccagagtctgagccgaaactacagtccagaggtatagccaggccctgggtcccgtaggcacagaccgttatcattattcagagtatgcagcagcttcagggcagtgtgctagtcaagcagagcatagcctgtatttcatagaaacagatctcactttaactgaattattattttttctttatagagtgcaggatgtttttgttgttaacacaggcgtctttctcaggtccgtttgaatcctgaggagtgtgccgatgttttaaggcggtgggttgaccacctttgttctccacaagtcaatcagaaatcaaaggctctcctggttctcctctctctgggctgcttttttagcgtggcagagacgcttcacaggtaaaccgagagttcacatgggctgctcaggcctgcccgtgagcagtcacttcatgttctctcgcggttctagcaggtcatggtactcgatgtgtaaagtgaaaggagaagtatacatttcaggtttgtcaaaaaacccaaaggagaatggaactgtccgtattcattacatcttcattcggtctaggagctatgctagtttcctactaatatgctgatcagacttaacaggcacctagtaaaagggaatttaaaagtcttcagagaattggggtccattcagctttgactagagcaactgagaggaggcccagagagcagggggagaggcgacagaaggcatggtgaggtggagacatcccgtctgaaaatctggaagaggaacaaccatcactaattgtggagcatttcatttattcaaaactaagggaggtagattacggaaatatgacaaaagattacttgtcaactctggacaggggtacatgggcacttgtcatatctctgtagatttttgtgtatttaaactatttcacaattttttaaagtattaattttaaaaagcttgtgtttggagatgtgagtattcttccctccttttttcaacaaactagggcttagaaaagtgcttgtatcttaatgcagtatgcaggtttccagggaaaatgtgtaaatgtctttatacccttcgatgctgctgcccaccagtgatgtaaatcacaaagcataactcttgttttgttctgttgagcagcatgagatactttgatagagcagccttatttgtggaagcttgcctcaagtatggagcatttgaagtcactgaggacacagatatcctttgcaaggttgtttgtagtgacgaggaagaaagtgacatgcatgggttttggaatttcccttagttgtgctgcctggacaggaactatattatattgtgaaagatccatgttctgattttctgattcaccaaagccaggaaagagggagaaattagaggacaaagaatcagataagaaggtggctgcaccatgggtgtcagctttgactaggatggagggaggcaggaaggactatagaggacagggcccccaagtcttgtctgaacttaaaaagaagatgaaggaatgatttgggaaacaggtagaaggacctggtactttgaaatagtactttttcaagaccagacattccatggaataaattttatatatttatctagaaaaaatatactggaataactaaaaaagtctcacgatcacctctagtgacaatatgatatgggacaaaatacagcacttaaagagaggtgttgctcaggccagccactataatccacccatcagccagaacattttatttcttctaaatggcacttgagcaacattggtttctttgaaaagaatgaacttgagaatgcaactcccaggaccagaaaagaatgaaactgggccagtgcttgcatggtcctgctgctgctcactgcactttgcttcaaattcttacatttgctctcatttctacatggcaggtacttggttctctctctctttctccctctttctctgtgtgtgtttataatttttttttttttttaacagagaattaaaactaaactaaaaattttttttttcctttttttgaggtaaggtctcactcttctgcccagactggagtgagtggcacgatcatggctcactacagccttgacttcctgggctcaagcagtcctcccacctcatcctccccagtagctgggaccataggtccacaccattgtgcctggcttttttttttttttggtagtaacccgggtctcactatgttgcccaggctggtcttgaactcctagttcaagcagtcctctcaccttggcctcccaaagtgctgagattacaggcatgagccacccagccctgcactgaaagttttttaaaattaaactgaaggctgagcctactcaagatcatgtacctagtcactgggaaggtgactggttcagtgtatgcattttgaggatcaaagcatcagcacagagtacccaataggctgtttaaaaaaataaaaataaataaaaaaaaaccaataggacagggctttctaaaaacccaacaaccagatatagggaacattcagaaataaatatctgcccccaaactgccagcctctcagactttcaaatggaatgaggatatgcaggttaagtttctcctctcttatcattcatcttccaatcttcagttgagtgtaggttatgggaggatgttggttgggtcttctggaaggagaagctttggactcagctggtacgaaaggtaatgatggtacagactgagacatggcctactatggccgggaatcaccctctgcccgcgaaaagtctcctgtgttcatcctgtgctgcccgctgtggacaccaggtcccttccgagcagccagcagagcagacgcgactcacccttcctgcttctgggagcctgtgaagagtctcatcacagccctttttactcttcttttccttaactatggtttacagaaactcatcactgctatatatgcagattatgcccggagtttgaagaacctcggttttaagcagggagcagttctctttgcttcaaaagccggagcagctggcaaagacttattgaatgagcttgagtcccccaaggaagaacccattgaagagtgacagcttaataaatgccagggaatctgacctggaaggcagatgggagggggctggtctggctgtggccaccgtcacagtccaggatgaagaggagtacagggtcctgtgagctgtttgaccactgttctaagactatgtgtgcccaaaagcacataagcatctatgttgagagtaagtttgtatcctgcgttggtctcagaaagaacgtgaatgcttaagattttgaaagtacataatattttatactttgggagagagctttaagagtccctggaaatactttttaatttttttaacttaaaattcaagagactgaatcacttttctcattgattaaatgtaaagattattgagaaacctatagtaaatgaaatttgtgagatgttttctcaaatatatgctgtgcctgtacttatatacagtctttcaagagagatacaaacaaggcagaaacatttaaactagtattaaaggtagtttaccaaagcattttttgttttcttaccttgaaaacacagaaccgttaattccttggtttaagcagttgctaagttttgtaattttaggctcagaggaccataggaggttttaagatttatgtttagtccgataggtgaggtctttgatattttgaattttaactccttttatgatacatcacagtaacctcatttttgaagtctttctttgtactttaatgttctctctgttctaatagttgaagtatgagatgtaactattataaactgttgctgaaaacataaatgtctgtaacttacaaacatgataaataaattaaaaattcca

SEQ ID NO: 15874 - DNA, 30506 bp, Homo sapiens
ttcaaaataaagaatttgaaaatataataaggaaagagtttcaaattattttctggtgtatgcagtagtttcaaagaggtttttttaaaaataaaattgtgatgagtttctttaaaatggtatagcaacacgaatcatatgtagatgatcttaaccaatgagagcatgtgtatgtatgtgtaaaatgaattaaatcaaataaatggttgtaaatcaagtaagttgtaaataaatgaagtacatggttgcttttttatgttctccatatgtattttcaagctctcaaagatccagttgttcttacttctcagggtatgttgctgaacttccaggaatcattcccgtctttagtccagtgttgctgctctagtctcattggaagtgacctgtccactgactctcatccccaagttcctaatttgccagcagaatggtactggccctgtgtctagtgatcccagggataaaatgctgttgtctagtatcattgacttaaaaaaaagaaaaaaaatccctgttttatttgttttggtcagctcaagttcaggactgttagataacttaaaatctgctttgcacagatgtatttttaaggaacaaacatctacagtaacagttacagatttccttaagtgggatatttgagttcatagatggtagacttttatagcctgggcttctaaggagggcagcagactagtgcagtcaggacaggacatgggctgtttggggtataataatagtgagtatagtgagattccacatgatggaatctcaacaaagagtaggaaggcgtttaggccttcagttgtccttgaattgagtatgttctctcttttgtttaatgtagataaaaatctaacacaagatactaaaacatacaaggtagaatttatactttttttattcacagaaaatcatgtaacttcctttgcgggtaactcattctttcacagcatacatgaacaccgtagttattccctagtttccagtttataaagatgttttgagaggaacatgttcaaaatatttaactagtattttgcacatgggacaagaagatcttaaatacatgtttcaagagtttttcccccactagttagtatttggaaacatgggaatgtttgtattaaatattactttaaataagtagttttcgcaccagacaattgctgtaccataaatatcttaaaacttaacattgtttttttaaatttctaaaattgaattatagaattcaagaaactgtgtgacaaatgaaaatgcctttttacaaaataaatatctgaatatgtgatatattattgatcattagtttgtaacacttttaagaatattctttgaacttacattattagaaacagcttagaaggaactgggcgccgtggctcacacctgtaatcccagtgctttgggaggctgaggcagatggatcactagaggttaggagatcgagaccagcctggccaacatggtgaaaccccatctctactaggagtacaaaaatgagctggcgtggtggcgagcgcctgtaatcccagctactcgggatgctaaggcaagaaaatcacttgaacctgggaggcggaggttgcagtgagccaagattgcgccattgcactccagcctgggtaacaaagtgagaccatctcaaaaaaaaaaacccgaaaaaacagaaacagattagaagcaaatggaagaatgaataggagaacagagggtaggatgggtaggactgatcaaattacattggcgtggcttcttgtttttcatacatgttttatgcactgttctcacttttttaaatatttgcaattaaaggtaggagcattgcttttcgtggtgaaagaggcaatgatgaatctgccatcgaaatgattaaagtatctcatttgaagtaagtgtcaacctaaaaaaaaatctatggtgttatcacaatgaaatctcgtggatttttttaatctttaagaaaatgggaatgtgctggaatgcatatggaatctttttagtgatagcaaatggtgatatgcagcccaaagaaaatattttgattacaaaattaagttgctatcacttttaattctctacttctaaaaagatgaagtaacttttgcatgaatcgttatttactttcggataaagttcttatgtacttctatctaagcatggagttactgagtgaaagaactcattttctttatgtataatttaaactcattttgcttccagaaattgagtttttttgtttcaggggaaaataacatgtaaagcagtattattaaaaatagaaactgaatgaaaatcaatcaaaattacaaagaaagagtaagctttctaaagtagttttcaaacttgttttggcttttctaagatctttgcatttccatataaattttagaatcagactatcagttttatcaaaaaatcttcctgagattttgattgggattgcattgaacccatcaatcagtgaggggaagaattggtatcttaacaagttttgtaactcatgaacatggtatgtctctccacttatttaggtcttttaaaatttcagcaatattttgtagttttcagtgtgtaagtcttacatattatttgtttattttgtgttttctttgatgcttttataaatgacatttttaaatttcaattatttattatttgtatattaaaatacagttaattttctgatattgaccttgtgccttgtgaccatgctaagcttagttattacttctagtataggtgcttttgttaattctttaggattttctatagagacagtctcgtttgctagtaaagacatctttacatcttttcgatctataggccttctttttgcttgcactaattaggacctcctgtatagtgttgattagaactgagatgtcagctacgagctgacatctttgctctgatcctggaccttatggagaaagcattcagtctttcaacattaagtatgatactagctgtagattttttgtatatttcctttatcaagttgaaaaagttttattcctagtttgctgagcctttgtattatgagtaggtgttgaatttatcaaatgctttttctgtattcattgatatcatcatatggtgtgtgtgtgttattttgtttttctttttgaagttcactaatatggtgaattacattgattgattttcagatgttaagccaacatgacattcccggaataaactctagttggtcgtgatgtattactgttttgacatattgctggatttgatttattgatatattattaagagttttatgatatattattaagagtttttatatctatgttcatgaaggatattggtgtcgtttttatgtaatatcctttgttttggtatcagggtaatactgaccttgcagaacgtgttgtaaagtattctctctcctttttttttgaatgagtttgtgtagaattgatattattcttactaaatgggaaaaatttattaggaaacccatctgaacctaaaattttctttgtggcaaagtttttaaatacaaattcagttttgtttttttttttcataaatataggactatttagattctctttttttgagctttggtaattggtgtcttccaagtaatctgtccattttgttgaagttgctgagtttattaatttattgaaataagcttgttcatcatggatctatgatcagtgattatctttcccactcctaatatcagtaaattatatcaaccaattttatttattgatcttttccaagaaactacttttgattcatttgattcttctctatgatttttccattttcaatttcattgtctgtcatgcttatcttttgttcttctgcttactttttaaatatgctctcctttttttacatagttttctaaaatagaaacttagataattgaattaagttgattctctaaaatgtaatgtaaacagttaatgctatatgagcaccagttttcctgtatcctacaatttttgttatggttatatgttttcattttaattcacattataatctttaaaaatttccatggggtgttattcagaggtatattttttaacttcaaactatttgggtgttttgccaggtatctttctgtaaatttctactttctgttggggtcacacatggtcctgagtggaagaatctcagtcctttgatacagggagtacagggatcttcctactctgtcacatttcctctatgtcagccatcatttgctgataatattttagttcctcataatgcttattgagtaatcagtgctcaaattatatttgttgaattgcactcgttgatgtcattcagtacttctttcaggcttaacagaaagtgaataaagtggcatttgttgaataccaactgtagtagaatgatagaaactttacatactttttcattgaatgtttaccataatctgtatatcaattaattgaggtacatgatgagattctcctgtcatgtgtgagaagttgagcctcaggagggttaacataagttgtggcatcagggtttgaatctatgccactctttcttccaagttggactccttgcctaattgtgtgagactgtatgttctcttacaggtcacttagagctttaccttcttatgactgttaatcatggtgctaaatggtagtttaaattgtctatatttagaatgcgtcagctgagtttttcaatttactgaactttttatttgctctaattcatggtgaaatttttgcaaaaaggggcttatttagtaattttgtttattttaggcagtatttggcagtcgtattcagagataaacccctggagctatgggatgttaggacttgtacccttcttagagagatgtccaaaaacttccctacaataactgctttggtaagttacaatttaagaatttaatagcttatttaggtatatatgtatgtggtgaatgttttgcttaagcttgaatcaaaatcattactgccaatgtcatttttttggttaaaaatgtgtgttcagagaagatgatctaaataaatggagataattcttattttcttggataaatcaacctaatatcatattagtgcaattccaattcaagtttcatttggatattttgaggaatatggtaaacatattcaaaaatgtttatgaaagaataaaggtcctaaatagctaagtcatccttgaataaagaggagtaaatgtgggaggtgtgggtggggttggcccttcctacctgatattagtacatcttacaaaaccatggaaataaaatcagtattgtattggcacaagaatagaaagtgagtcaacctaataaagagctcaggaacagacccatgaatatttggggacttaatatacagtaaagtagcacaaatcaaagaggatggacagactgtgtagtagacggtgttgggaaaactgtctcactttatggagaaaaatacttgatctctacttaataccgtatagagaagtgagtgtcacaggactaaagacctaaatgtaaaaatgtaaagctataaaattgaatataacaaaatacaaaatattgctgtgacctagaggcaggaggagacatcagaagctcaaaccaaaaggcaaaaaaaaaaaagaaacaatgcatttaattaatcaagattaatgctttttgtttgatgaagatgtcaaagttaaatacagaagacattttgggaaaacaaattttccagtgtctaaatttaactagaaactcctgcaagtcaacagtgaaaaaaagcgggaaccctagtgagaaaatgaacaaagtctgtgaagagctaatgagaggcagagaaacctaaaaggccaacaagccatataaaggaatgttcaaactcatcagttttcagagatgttcaaaccatgatatggatctaccgtttagactaacaaaaactggacagccatatagtgttaagtacgggtggaacatagggtatgggaatccttgtgcattgctggtaggaatgtagaccaatgcagccattctgtaaagcacgctggcagcacttgggcaaacacagacatcttctgtgtccgctgagctcttggtcgtaaatgaacttttgcaaggatattgactggtgtgttttgtcatgatgtgagtttggagaccatctgtgtgtttttactgagagaggagacagattaacaattggctgatgcacccatggagtattacgtagcatgcagaaacaggaggaagaggacttaaatacagtggaaagagtaagaaacaggatgaagtatatatatatatatacacacacacacacacacacacacatataaacacaatactatttaggtaaattagataataactacatgttaagaacttatacatatgcgaggatattggactaaaaggctttacaataggtggaatataaaagaatatataaataaaacaagtgattttggaggaatctatggatgataaaggaccctggttcgagaactgtgattgtcttatcgtgtgcacataagagatgggggaggagacgaggaataggcaatactatcattgaattcattattttcattttgtaagtattttataaaaacatcaaaaggtcagaccttttggaagtttgccataaaagctccaattaaaatgcattcatttagcctttctctaagtaggtaaaatctaaagaacaaatgtggattcatgtgtagtaataataaatgatactgggcagtggtgtgtgtgcccagctcttctggacgattctttgacagaaggaaacctagcacttctaggtttgtctgcatttgctttacaggagtggtcaccatctcacaacttgaagagcctgagaaagaagcaacttgcaactcgagaggccatggcccgccagaccgtagtctcagacacagagctgagtattgttgaatcatctgtgatcaggtacagtacagtgtttcttgacactgtcatttgtgccattagcatcatgtctgggaagttgacaagtatcatcggaaggtgtctatggtagcaagttggactctgcttttgaacatacttagtttcatctttcagtacatacccagattactaaaaagataattttatcatttttagtattgtactatactgtttgttataactaataacatatgcagtaatattcacccatcagcatctagtagtaaatgtgctcattccgagtgcccttctactccatacacttcagcttctgaaattcaaatgaacatagcatagacatacagatagatcatattatcatttatacacaccaaagaaaatgtgttgggaatcctaaatttgtgtatcatccccatccataccaatcttacagataaaaggcttcagagataatgttgggtcactgtacagcctcccttctgttgagcacagttctatagccaaaatctctatgaattttatttttcttgtgttaagtttagatcaccatttctctctgtgcagggtaaacttcctctgatgttgtggctgttaaggagtgattcatgtttacccataattagctgggcaaatattagtttcagacttttaaaaaaatagttttggacctcctcttaatgcgtctgtactttgggcaagttaattaattatgagtatcactctaggggaaaaaaaaacatctttatcatatgtttcactatcccaaagcttgctgcaggaggcagaaagtaaatctgaacttagtcagaacatctctgcccgggaacattttgtatttaccgatattgatggccaagtgtatcatctcactgttgaaggaaactcagtaaaagacagtgctcggattccaccagatgtgagtacaaccttgattaaatcttcatcaagaagattttgttttgttggttccatatccagtgaaggcatagttaagttggaaacttcagaaaagcctaatgtaaataaactttatttaaggagatattatcgattaaacttgttccatactgctagagaataacgctgtaactattttgattaaatgtttactgtgtgctactcatttttatccctgtaataatccatgaggagttatctccattttacccataacaaaactgtgggagaataagtaactttcccaaagttatccagcttactcatatggcagagcagtgttttaaactcaggcctgtctgacttcagtatctgtcttctttccatttcaggcattaccctgaaggatttgacttacaatctagtattatttttggataatagtaatcaggttgtaagtgtaatagtattattaacatttactaacttacatatattcttatggccttgtggaatctgtaactaaagttttgccattaatcatttgtgtcagcatgcatctcatagatagtttttaatagatggatcatgaaaatgtttatgttaattaatgcaggctattataatggttaaatgaaggcatgaggggattttttaaaataggtatatttattttaaattgctatctaaaaatggaatgctctagtagaatgccaacccccataattttataggtggctttggggtctcataaagttacaatctagatgttggctgtggctacagtcttttgaagtgtaatgggacagaaggatctatttccaagttggctgcctcacaggctattgcacattaatgctggctgttgacgagggaccttagttcttcatgtcgatctttccataaggctgcttgagtgtcctcacgacatgacaactggcctcccctagagtaagtgatctgataaagcaagaaggaagttgcagagtctattatgacctggtttcagaagtctcttcaaaggcaacttcttaattaaacattctattttatggctaggaaagtagatatcttaaaatgttgcttcatattatatacagaatttcatttctttaatatttttttttattaatggactttattataatattgatttttaaatccagtttttgttttgtttcttgactattaccagagtttttacggtattcagtgtgtgtgctagtccactaatggtcaattattcaaaccactagagttttcttactttttaccatggataccatttgaatttttatgttgtacaataaatgcaaaaataaaatttcttttaataaatagagaagtaattgagcagtaatattatttaatagctaacatgtattgactatttactgcatggcaggcattgctttaaggcctttgcctttataaatttattaatactagcaacaactcaagtttcatgaacttaccctactttatggacaataaatccaagacagaaaggttaagtaaacatgcctcaaatcacataccagtttcaagctgggattcaagcccaggcagtgtgactgcagagcccaggctgctgagccctccatgataccacctctgagcatctattagaactgcaagttcctttcttcctccaagttagattgactacagcagcatttcattcttatgttgtgcttctatatgtaacttctgagcaaagctttctgtgaatttaaactgcatatgcctttagtaaacagcatctcttcaccttcatgattccacaatgttccaaaacgtgtcagtgaagctctggatccttttttcaatagaaaaatcacggcacaattagttataaaagagctttaagtttcccttggaatggatttagttatccttttgcagtgagagataagtttgagttggctctctggaaaaccttccctttacttctctgtttttcttactttaatttcccccttttttttttgaggtatttgttcctcaaaagacatcccctctctttaaatctagttccagtaactacttaatgtctatgaagttgaaatctcctatttcttcatagttgaaattgataggcaatgtagctctttgttagtgtctaaagtctgttttaggatttgatgactaaaagcatactaaagcacagccctttaaattaagttttattaaaatatttattataatgtcttatacagcatagtgaaatttatatttgtttgttgctgttgttttctagggaagtatgggtagtattacctgcatcgcttggaaaggtgatacattagtgcttggagatatggatggaaatttaaatttctgggacttgaaaggcagagtatccaggtataagccaagaatgaaatcttgttatttcattaaaaaaaagaaatgaaatctttttgttttgttttgttgagatggtgtcttgctctgtcgcccaggctggagtgcagtggtgcaatctcggctcactgcaagctctgactcccgggttcatgccattctcctgcctcagccacccgagtagctgggactacaggcacccaccaccacgcccggctaatttttttgtatttttttagtagagacgggatttcaccatgttagccaggatggtctcgatctcctgacctcgtgatccgcccacctcggcctcccaaagtgctgggattacaggcaggagccagcacacccggccaaaaaatgacatcttgatatggttccattagaggcttgtgacttggcaagaaggatcagtaaactcgtggaggtgtagcttggacccttgggtcccttcacctaaacttgggaggatgggccttgagccaagcattcttaggagatagttatctgcaagtggcccctgcagaagtcttagctgaccttaaagggcaggccctttctgtcagatgtggcccccagtcccagcaagtaaagggttctcccatcatcagacctgttagaaatggaaatagtgagagatgttagacatagcttctggtgaccagatctcactctacattgtattgatgtttttgtttctttgtcttcagaggaatacccacacaccgaagttgggtgaggaagattcgttttgctcctggtaaaggaaatcaaaaattaatagcaatgtacaatgatggagctgaagtgtgggatactaaagaggtaggccctctccatgaggataaaacgtaaataaattgttagccataggaactgtgctttgttaaaaaacttctttctgatttagaaatgaaaagtacttaatgagttcgtcaagtttcccataacaaattattttctttactttacagtatttgtgttctaaaggtaacaactcaagatttatttatttatttatttatttatttttattttttattttgatatggagtttcactcttgtcgcccaggctggagtgcaatggcgcgatctcgacttattgcagcctccacctcctgggttcaagtgactctcctgcctcagcctccctagtagctgggattataggcatgtgccaccacgcccggctaatgttttgtatttttagtagagacagggtttcgccatgttgggcaggctggtctcaaactcctgacctgaggtgatctgcccgcctcagcctcctaaagtcctgggattataggcgtcagccaccgcgcccagccgatttatttattttttaatattatcactgtctctgagacctttaaaatgctgcctatttgtggaagatagattgccagaggctgttcagttctaaacttgaactgggcctttgccacagactgtcttccttgaccatttaatctagaataataaagatcttccttttctgtctggaagtgatgcccaaattcactcttgaaggttcagatggtgagcagtttaagaagtggcagaaatgtgacctttcgtatattggatgtggactggtgtacgtcagataaagtgatcttggcctcagatgatgggtgcatcagagtcctagagatgtctatgaagtctgcgtgctttagaatggatgaacaagagttaaccggtatggaatcctaatgatagggggctttgaaacctgtctttactttgccacaagctcttgtattttggggagagagctgctgcttctgtttcatttcagtcttattttcttagaatctgagtttaagaaaatatattaacttgaagcttgagtgtttttactgctgagatgctgcaatctttgtaactatagatgtcaatcattctcaattcaggttttttaagtgccccttttgactcttttctttggtttgttaacaagataaaagatgtttatgtttataaaaatggcttactcagaatttaggcaaactcatcagaggacataaatctagtgataaggctgctggctttttaataatggccttatgtcttttgcaaccatatatcattgaaaagtcactttagaaagtgttctgagtattatgaattttgatgccaatctgtgactagtaaaatgaccagtcaagcaaattagcagattgcagtatcttgctctgttttgtatggttgttttgacattgctttttaccagaataaaaagcattttagtagaatatactccatatatgacttctaaaaaaaaaaagaatgggacaattgtgaatgcatccatttatcagtttaaaaggcagcttttggctgatgcaatacagtgttcatccttggaagatacttgatcctacttggagtggaggagggaacttcttgcctgagtattctcccagcaaaactttggtgcacactctaggctgatatgtagaaaatttcatgagacttttctgaacctttgtagagtcaatatttggcacttcagacacagtaaggttttaaaaacctggtttttcactttgtgttcatgcttgaggcactactgagttgctgctaatgttagcagggctgcctttaacttagttaggtatgctttggtttttgtcactgcccacccctgcccactgcatttgggcaccaccacttcttactatgtaactgactgccatcaggtgaagccagaattcaagacctacattcccatgtctgtccttgtgtcgtttgccagctctggggaagcaccaggatggcctcctaggaaagggcaagcattggtattcattttaaacctaaaggtattgaggacattgaaggaacttcaagggtggtttttgaaaaaattggttactaattctagataaagaagtgtggaactgctatctaaatgtttgaagagcttttccttcacttttaatataaaatttgaatctaaaaagctccaaagtcaaggtgtagcttgttcttaaattaaactgactacagaaatggagtccattgtattaacccatgttcaataccatacttgaacatctggcctgtggccagattttagatcacatgtttcttttaaaatttttctgatttttttttatattcttttcaatctctaatgttacagcctcagccagaaagagaaaactaaatagcaattgggaaaggtcatgcaattgtgtattcattccacaaattgaacttcaaattcagaacaacccttaataaatgttaaagaatgaaaactatggtagtgtaaatgtggagtgaggaaaaagacatctgtgtgttcacctccagattcatggccgatttggtcttgaggaaaaaaagtttgaggtagtatatttctattctgaggaattagaagtatatttggggcttactgacatgggataaaaataaaataggtcctaacattggtgtttcctatgttttcttcaattctccttgaaaacaagtagagaacgtaaaatattgattcacatctgtacattttcttagagcagcttagataggccacttcttcctccaataaagagggggcagtcagacaaattagaagattagaattcctgtttttgagttggagaacctttcttatcggctgcctaatatgtcagggacacaaagagccatcaaaataaatcttaatagtctttttagcagcatctaaaaggaatgcaagaatatgagactgtttaatagcattctggtatcatgcagtttccacaccctttaaatagtattgacttgatatcagggactgttcaacctaatttcctccccagtgttttttttttttaattttattattattatactttaagttttagggtacatgtgcacaacgtgcaggtttgttacatatgtatacatgtgccatgttggtgtgctgcacccattaactcatcatttagcattaggtatatctcctaatgctatccctcccccctccctccaccccacaacagtcccaggtgtgtgatgttccccttcctgtgtccatgtgttctcattgttcaattcccatctgtgagtgagaacatgcggtgtttggttttttgtccttttgatagtttgctgagaatgatgatttccagcttcatccatgtccctacaaatgacatgaactcatcattctttatggctgcatagtattccatggtgtatatgtgccacattttcttaatccagtctatgattgttggacatttaggttggttccaagtctttgctattgtgaatagtgccgtaataaacatacatgtgcatgtgtctttatagtagcatgatttataatcctttgggtatatacccagtaatgggatggctgggtcaaatggtatttctagttctagatccctgaggaatcgccacactgacttccacaatggttgaactagtttacagtcccaccaacagtgtaaaagtgttcctatttctccacatcctctccagcacctgttgtttcctgactttttaatgattgccattctaactggtgtgagatggtatctcactgtggttttgagttgcatttctctgatggccagtgatgatgagcattttttcatgtgttttttggctgcataaatgtcttcttttgagaagtgtctgttcatatccttcgcccactttttgatggggttgtttgtttttttcttgtaaatttgtttgagttcattgtagattctggatattagcccttcgtcagatgagtaggttgcaaaatttttctcccattctgtaggttgcctgttcactctgatggtagtttcttttgctgtgcagaagctctttagtttaattagatcccatttgtcaattttggcttttgttgccattgcttttggtgttttagacatgaagtccttgcccatgcctatgtcctgaatggtattgcctaggttttcttctagggtttttatggttttaggtctaacatgtaagtctttaatccatcttgaatgaatttttgtataaggtgtaaggaagggatccagtttcagctttctacatatggctagccagttttcccctccccagtgttaaaggccactgctaagcacatttttcctaagtaagcatatatagaaagaagctttctgaaatcagatttctgcacaaacctttcctcttcatctgccacagctttccacagtcattttcggtaatcttggggcattcagaaatgtctcacaatgacttgccgatgtggggaggtctggggatgctaaacaacctggaacgatctggcgcaatgaagaattgtcctgccccaaacgccagtagtgttccttagctctctttttcaccgttcattgaatcacactgaacaaaatcacaaaatatggtcctttccttcccagacttccagctcaccttaatgttgccatttccaagtggtggaggaataacttttttctactgattttcttcttggctctttgcttactgattttctgcattcctgtcatgtaggtagctaaaaacctgggtgttatgattcatacctcacataactttagcccagatggagcagaatccgtgacaaacagcaatgatgctaactgcttttgcattctaattgtgtaattttcagaggtgaatgagctcttgcatgtgagtttctccagatgtgagatgatctcctattactttttcatggctgatctttacctttcagaagaaagatttcaattcatttgagggagggaagtagttaagggtcactttcagtttgttcatgctcattgggatgctgtcaacaatattttgcttttggagaaataacatatttgttttaaaaaataaggtatttccctccttttattcagacttggtaaatgttgtcttgcttgcatgatgtaaacactcgatgctgccttctacgtggattctcttgtatcttttcgtttgttcattgattaagaaattaccacacagcatgagaactttccctgaaccattccaagattattatgtatagttaatttttttccctgacatttaccatttccaaacatactgtgatataataccaacaactatctacatgaatctacctaaaacatatacatatgctatctaaaatatgaatggggctgacttgagaattatatagattgtcgtctatgaaggatgaatagaaagaaagttaagtaagctagccacctgcatccctttcagtgttaagtgttcagtgcttctgtaggtagttagataagcctcatttttccaagatgcaatccttcctttatagcccagatgtaaaagaaaagatgactaagtggaaattaaaaaaaaaaattcaaagcaaaagaaaatctttaataagaataaacgaaagtgttcaataagcaaagccaaatacaaatgattacctggaggaaagtaattcacaagtcacagactgtctacagaggggcaaaacagataaacaaatgatgcttcaacatatgaaatgatactcaactttatttataataagaaaaatatttgacctcctactggtaaggataaaagaagaaaataattttaaaaagtaaatttttaaaaagagaaaaatacaaattaaaattgtttcttacctatcagattcaaaagcttgaaaatatactctgttggcaaggctatgaggaaacaagcactctcatccattgctaacagtaagatccctataggaaggaatttggcaatatctaacagagctacatgcacatttacctttttacccagcaatcccagcgctaagaatttatcttaagatgtacattcataccctgtgaccaaaatgcacacaaagttattcatagcaaaattttgaaaaaagccgaactgcttagccgtaggagattggttgaataaatctggggacatctgcagaatggagtaatctatgcagctgtaaaatagtgaggaatagctctgtgacctgatgtagagtgatatccaggatatgtgtaagtgaaaaatgcaagtgtaaaagagcacgtatagcctgcttgtgtacaaaggcggattttatacataggttcatgcacacgtttgcttactaaaacacacaccacacatacacagaataatccagaaaccaatgagaatagttagaagatgtagatggaaaaatggagagtatggggatagcagtgaaacttctctatctttgttatacagtttcaagttttgaaccatttatatattttatatattaaaaatacacagtgaaaacaagagtgaagaaaaagcaaaccctaaaattgaatgcaagacacagttgaaccaaactgtgtaacaacaatattggtaacataaccacacacacacacaaaaacagttcaaataactaaaacacagaacttcccattcactgcacacctttagtggtttatattctaaggacagaattgctaaggaatgttgaactttaccggggtagttgatggtgacactagtaattctgaagctgttttgtgcatgttgtagtctggaacacattagtaaccaaattgcagttttggggagccaagatctgtgctgatagaaagggagatatggatgggaaatggcggtggtgggaagaaacattccaggggtggatttgggttggtaaaaaatcatgacttcttgaacatgtatgttccctggctctgctcacagagagttttcttgcaatgacactcaatggcagtgagcgcacatagcacccagattttactttgcaagttccatttccaggctaaaaggagccagagctctttggacaaaaagtttatttcaggacagaggcacaaaaggtgcaagatgggtctggggcatcttgtggtgccagaattcaagtaaggaattgaaaaaccaaggaggacctgacataagaggcttctcctgtcaaactgggggtagtctgagcatcacgaaaactaatggtggtattgatgtaagtgcagaataccaaagaaaccctcactccatagtaatagtcacagtaaggaaacgggaagtgggcaagaagcaaaagctcaggtggacagaagaatgccagctgacaaatgcggaaagaataagattagaaaatcaccactttgcagccccgatacaataattaattgtatacacaagcaaggatcacttgtggatgtcaaatcactgagtaaaaggatgtttgagaataggaaattcaatctgacaatatttcctccacatattacttactaattaattatacagtggagaaggtgccctgataagagctctggtgaataccccttatctagatgatcagatttagtgtttcctgtaaccagacagctaacatgttccttctgatgcaatgcagtgaaaagtacacagcatcctttgttcagactctgtcaaaaatgtttaacccgaatctgataatcagaaaacagacaagttagaacgtagggcattctccacagcagctgaccaggactcttcaaaaatgaaaaggtcacataaggccaaaaccaaaaaggaagaggaccattctagattggaatagactaaagagacatgacaatgcagtgtaccagccttgactggacccgatttttaaaaataatacagctgccaggacatttggggaataacaagggacttttgaatttggactgcattttaagtgattttactgaatcaatattaaaattcttgggtgtaaaaaaaaagtattattaaaaatatttccaatcactttctggcttttaaattgaaaaatccacataaaatattttgtgtataatttaatttttatttaactacatagaataaagttttctaaagcagagttttccaatagaaacataatgtgagccacataggtaagcttaaattctagtatccacattttaaaaagtaaaaagagatgaaattgattttaattaaaattttatttaagccaatatatccaaagttttatttcaacatataatcagtattaaaagttactagtgagacattttacttttttaaaattattcattcttcaaaattctgtcagtattttacatttattgtaaaatgaattgccctcaaaatttataggacaaattttcagcacaaacagttaagctctatttagattttataaaattttcagttgaaaaagtaggcatgtattcaagttgtttcaaacatatttaaaagttatccaatgactgaatcaataatcactttttaagtttaaattagacaaacattcatttccttcattatactagccatatgttaagtgactatcatattggatatcatactggataattgcacagtccagagttgatgtggatcactgatacgatttggctctgtgtctccacccaaatctcatgtcaaattgtaatctccacaggtcaggggaggcagctggtagggggtgattggatcatgggggcagatttcccccttactgttctcacgatagtaagtgagttcttaggagatctgatggcttaaaagtgtggcacttgccccctcgctggctctctcctgctgccatgtaagatgtgccttgcttccccttcaccttctgccatgattgtaagtttgcctccccagccatacggaactgttgagtcaattaaacctcttctctttataaattaccctgtctcaggtagttctttacagcagcatgaaaacagacaaatacagtcacttaaataagccaacaccatgtataagtttgtgtcattttacataattgtgtctattcaagggatccatggataaagcctcttcaggattctggaggggagttggtagtaaggccaagttgtaaaagccagggcacccctagaaatttggagctaaggtcgagtccgatagagtgtagggtggtcagagcagagctgctgggcattgcagcctttaggtcttctgcttctttgcactgaaacatgttgacaactaggcaaatcttgcttgttagtgttctaagtaagccagctgctggatgtgggggatgctagggcctagagtctaagaagatagcccctgtgttcaacagctacctttataagtgagacctgggaatgctagtgatcacaggtggcatgatcccttcagtgacatactcaaggttgataggccatgttagttgaatagtctcggaaaaacaaaagtacatacaggtaaatatatttatttttaatatttaaaaataatgaactttgttgctatttgttgaatcattgcattgaatcctttattcaagtagtaccagagttgtataccacacaggatacttaaattttaaaggggaaaagaaggccgggtgtggtagctcatgcctataatcccaggactttgggaggccaaggtgggcagatcacctgaggtcaggagtttgagaccagtctggccaacatggtgaaaccccatctctactaaaaatgcaaaaattagccaggcatggtggcaggtgcttgtaatcccagttacttcggaggctgaggcaggagaatcgcttgaacccgggaggcggaggttgctgtgagccgagatcgcaccaccgcactccagcctaggtgacagagcgaggctttgtctcaaaaaaaaaataaaataaaaaatcaaaaaagggggaaaagaaaaatatgttaatcagatttgaatgcagagactctctctgctcttggcttgtgtttcctaagcggtgactacattgaatatactctcagttgttccagatttacctgttgctctctgctgactgctctgtaaatggtttatagctgaagcttcactgtagtataaaacttcattttatttttaaaaacctttctttgttgtctagagcctgtgtggtgcccctatctccttgttccaagggcctctcttgccttgaaagccttcttattacaccagccttggaatggacagtattctttggacatttctcatgtgtaagtttttcacttttctttttctttcataatttacttggggttgaaagacacccatgaaagtcagccatggcctgtactccagcatttaaagggaatggagcctttaaagccgagagaaggcagagacactacagaattgccaggctgcctctgggttctcgggcctttgtggaagtgtgggtcagtgaggagctgtgagggcgtgtattgctctcaggtggctgtgtgcttgtcttatggtctgaacatggatgtgtcgtgatgatgaaaaggatgcgtgtgaagagggcaatggaaggcaggagaatttggagccgggcacgttctttttaaaagcagcatcattagcttcagggatatactgtgtcttaaaaatctcaatatttgcctcattgcaaaaaaatattcacagaaactattagtgtttattaattaaattcacaaatattactgaactcctgccatgtgcagcacggatggaggatttaaaaataatgccaggaagtgtctgttctccaagcactgtctcctcagaatattcattctgcagagctctaaatgagcagattcctttagtaacattgttaagttcttcattaaaaggaatctaaacctgatagattttaaagcctgcttataaatttcctggtttcttgaaagccaaggagactttctttactcattttcttgtttttgactcaataagataaaagcagatattaaagttgattggtggggtcctgagtagattgttgttattttggtctataaccaggtttctaaccaagaactacgaagaaggttatctctatattaacacaacttttttcaggtgaagaaatacgtggttttaagtgaagagataatgaactcattcaaaattttttctttacagtgactatccagaaaatgaagaaataaagaatctcctccaagaacagttgaattcattgtctaagtaagcactccatgtttcattagaagataggaatatgagaaagaaaaatgcaattcaactttaaatgcaattcaaaattaaaataagttacgttttagaaaatattagtggcccaagaagagaccattctgtttagaggtttgcttcccgttagagtctgtgttttgcagaaaaagtacttattcagtagttacagtgacagagcatctgtcttcaccaagttcatgagcaccagctgctctgatctcacatcaaggcaggactagatgcatagtgggagcatccttgtagctcagcttgcctctactacaaacctccatgaagcctcacagcgggagacgaatcgcagggtgattctgggtctgcttcccgcttctaaaatgagttctctgtgtcaggtgctggtgtgcacaggtctggctaagaaattaatgtgctccctagagccaagggcatttaacagaatgtactgggaataagaaaggaaaaaatatgggtctacaaggagttcttggggaaagcgtaacacatttttgcaatctagaatctgttacatataattatagtatttaacaaattaagcatgatattttattgacggaaaattcaaaataattagttttttctatgcaaagattaacatttatgtttaaatgggaaactatagatttaaagaatgtcttcctttctgatttgtgaatattcagtattttactattttagaaatacgaacttataaaagcacaagccattcttccttagatactttatttttggaatagtttcagaataaattacgaatgtcatcttctttaaagtatttactgttcttgatgattttttcaacaatggcattcttgttccagtagttaggcagctaatactttcaaaaactgttgtaagcctataaaccagaaatgagagcgctgcagctccctgtggtggctgaaagctgctgcttctccaagccttgagaacactctcagcccccttcaacttttataatttcagggtcatggtaaagtaccttgtcttgtgtaaattctaaacatgttatttgactggaatttttcatttcaagagtatattgatcaacccccatgctttattgtttgattgaaaacttttgtctcacttttgtccggatttcttccacagtgacataaagaaactgttgcttgatccagaattcactctcttgcagaggtgcctgcttgtttcaaggtaatattgtttgatgtattctgtataagagacaggatttcaagttaactcatttcttttaagggtttttagttagaaacacttagattttagaaaaatgtatcagttcatcctttagatttaacttaaaataattttgacagtagtaataacaaatagggaaaaatcaaattgcattttaaatgtgagatctaggccttctctctggaaagcacttcctcctacagctttttaaaatatgtgttttaaaatatcagatacaggtatatttaaatataccaataaattatatttagaagcgataacctctatatcctgacttacagtagagtttgtcacttataaaaaagactcctctccccacagaataaatagcacattactttcataccttatctagccagttatcccagaggaacttcttcctaatgtgaatcaatggcccacattgaaaggtgtgctaatggcaaaccaggtaaataattgttcttaacacagaacagaaagatgctggagtctgaaggggtcctgtgcagtcaggcccccgtattgttgaaggcccagtagcagggcaggagaacttgctgcctccccctttcaccctgtcaggccccatgccagtatcccagtggatatgtgacaacactcccttccagtccctcagtctactctaggaagccatccaggccaggtgtgctgagtgcagtcaaaactttgcttcatccttgccaggctctatggtgatgaatcggagctgcacttctggactgtcgctgcccactacctgcacagcttatcccaggaaaagtcagccagcacaacagctcctaaagaagctgctcctcgagacaaactgagcaacccactggatatatgctatgacgtgctctgtgaaaatgcctactttcaggtagtctgcttcacacagcaaaacctttagagctgtcatcttgattacttatatctttgtcaatatcttaaacttgggaaactttcaaactaagttactgttcagtaatagaaataagcccttgaaaattagctgggtgtggtggcacgtgcctgtagtcccagctactcaggaggctgagggaggagaatcacttgaacccaggaggcggaggttgcagtgagctgagatcacgccactgcattccagcctgggcaacagagcaagactctgtctccaaaaaaaaaaaaagaaagaaaagaaagaagccctcggtacatttgcattaaaaaaaaagcctgatcaagatttgaaaagctcatagacagttactgcgttgtttactaaacattaaaattttattattaaacaggcttgtttaatttgtcttacatttttaacttggcttcattttaattctgtcattaatttcctataaataacaaatactttatacacttggtttgaatttgctgttcacatgataatttctttaacctcctgcagaatccttcagtgcacataggtttttcatccggctctacttaagtgtcagtttctgtaggcaggcaggtatgcatccaagtgataatatctatcaacatttttgctgttcaaattcttattaaatgtttggggtgctgtaaagttgattatctagtaacctgaaaagtcaaagtagtttattaaaatgatcttattaagtacagtaaaatttaaataattccaaactcttataatccaggcttaatttttcttttttttccaattctagaaatttcagctagaaagggttaatctgcaggaagtgaaacggtcaacttatgatcatacaaggaaatgtacagaccagctactgctcttgggtcaagtatgtcagtttttataactctacatgcttcattaaattgctagttaattcgtatttcagagcaatatatctgtatgtatatatttcataatattttccccttgtatgtacctccttccctgtagacagtttaggctttctttcaaaataataccaataaacctcatgagaaaaaacatatggttaaccagcttgtaatttagacttccataatgcccagtggagcccagctatttgttttgttttgtttttgtgtctgaattgactggtacaaagctaaaataggcaattactcgagcacctagatacaccagcctctggctttatgtttgtctcaaaaaagtagtgtagcacctctgtttaatgtttgtatttgtaaacaaaatattcaattgcattttttgaaaatgagtgttttcctttagttttctaccttatgaattttaaaaagttatgttggaggaaaatgttctcataattagaaaaaccgtttctcttactagacagacagagctgtgcagttgctgttggaaacaagtgcagataaccagcattattactgtgattcactgaaagcctgtttagtcactactgtcacctcgtcaggcccctctcagagcaccattaagttggtggcaacgaatatgattgccaatggcaaattggcaggtaaggcacacttgatatgtttgtcatctctctgaaaaatgagaccttgttcccagcaaagtatctgattagtagggacatttctttctcttttacatatgctgaagaaaaatagaaaaattattgctacctataaatcagatgaatataattgtctaaaccagaattaattgtttacacttttcagagtgaaagggggcactgttaataattgctgagataataggcataaatccaacaatcctaggcaaatcagaacaataaaacctgtgagagaactatgctctccctacttattctccagactgtattgtgcttcctaccctggttacttgagtaataacagtaaaactcttaatattatgtttcagaatttaaatcaagaatgtcttcagtaggtataaaatgggcacgactagataaggtcaaatggggatttaactttttaatgacttctcaaagaaggagctgcagtgtcacttaaggggatgcgcttttgtctttcagagggcgttcagttgctctgcctgatagataaggctgcagacgcctgccgctacctgcagacatacggcgagtggaatcgggctgcatggctggcaaaagtaggtggttccaagtttcaataggtgccctcaacattcgggatagaaagctcagtcctgaactttggacttatgacttagaaacattttttggcctgcaaagctgctttgcaaatactgtcttggaacctttatccttttcctattctttatgagtgtaaattgcattacttatttaaaaatggatcttgcattggtagcaattaagtaaaagcagctgcctcctctttctcccagagtctgagccgaaactacagtccagaggtatagccaggccctgggtcccgtaggcacagaccgttatcattattcagagtatgcagcagcttcagggcagtgtgctagtcaagcagagcatagcctgtatttcatagaaacagatctcactttaactgaattattattttttctttatagagtgcaggatgtttttgttgttaacacaggcgtctttctcaggtccgtttgaatcctgaggagtgtgccgatgttttaaggcggtgggttgaccacctttgttctccacaagtcaatcagaaatcaaaggctctcctggttctcctctctctgggctgcttttttagcgtggcagagacgcttcacaggtaaaccgagagttcacatgggctgctcaggcctgcccgtgagcagtcacttcatgttctctcgcggttctagcaggtcatggtactcgatgtgtaaagtgaaaggagaagtatacatttcaggtttgtcaaaaaacccaaaggagaatggaactgtccgtattcattacatcttcattcggtctaggagctatgctagtttcctactaatatgctgatcagacttaacaggcacctagtaaaagggaatttaaaagtcttcagagaattggggtccattcagctttgactagagcaactgagaggaggcccagagagcagggggagaggcgacagaaggcatggtgaggtggagacatcccgtctgaaaatctggaagaggaacaaccatcactaattgtggagcatttcatttattcaaaactaagggaggtagattacggaaatatgacaaaagattacttgtcaactctggacaggggtacatgggcacttgtcatatctctgtagatttttgtgtatttaaactatttcacaattttttaaagtattaattttaaaaagcttgtgtttggagatgtgagtattcttccctccttttttcaacaaactagggcttagaaaagtgcttgtatcttaatgcagtatgcaggtttccagggaaaatgtgtaaatgtctttatacccttcgatgctgctgcccaccagtgatgtaaatcacaaagcataactcttgttttgttctgttgagcagcatgagatactttgatagagcagccttatttgtggaagcttgcctcaagtatggagcatttgaagtcactgaggacacagatatcctttgcaaggttgtttgtagtgacgaggaagaaagtgacatgcatgggttttggaatttcccttagttgtgctgcctggacaggaactatattatattgtgaaagatccatgttctgattttctgattcaccaaagccaggaaagagggagaaattagaggacaaagaatcagataagaaggtggctgcaccatgggtgtcagctttgactaggatggagggaggcaggaaggactatagaggacagggcccccaagtcttgtctgaacttaaaaagaagatgaaggaatgatttgggaaacaggtagaaggacctggtactttgaaatagtactttttcaagaccagacattccatggaataaattttatatatttatctagaaaaaatatactggaataactaaaaaagtctcacgatcacctctagtgacaatatgatatgggacaaaatacagcacttaaagagaggtgttgctcaggccagccactataatccacccatcagccagaacattttatttcttctaaatggcacttgagcaacattggtttctttgaaaagaatgaacttgagaatgcaactcccaggaccagaaaagaatgaaactgggccagtgcttgcatggtcctgctgctgctcactgcactttgcttcaaattcttacatttgctctcatttctacatggcaggtacttggttctctctctctttctccctctttctctgtgtgtgtttataatttttttttttttttaacagagaattaaaactaaactaaaaattttttttttcctttttttgaggtaaggtctcactcttctgcccagactggagtgagtggcacgatcatggctcactacagccttgacttcctgggctcaagcagtcctcccacctcatcctccccagtagctgggaccataggtccacaccattgtgcctggcttttttttttttttggtagtaacccgggtctcactatgttgcccaggctggtcttgaactcctagttcaagcagtcctctcaccttggcctcccaaagtgctgagattacaggcatgagccacccagccctgcactgaaagttttttaaaattaaactgaaggctgagcctactcaagatcatgtacctagtcactgggaaggtgactggttcagtgtatgcattttgaggatcaaagcatcagcacagagtacccaataggctgtttaaaaaaataaaaataaataaaaaaaaaccaataggacagggctttctaaaaacccaacaaccagatatagggaacattcagaaataaatatctgcccccaaactgccagcctctcagactttcaaatggaatgaggatatgcaggttaagtttctcctctcttatcattcatcttccaatcttcagttgagtgtaggttatgggaggatgttggttgggtcttctggaaggagaagctttggactcagctggtacgaaaggtaatgatggtacagactgagacatggcctactatggccgggaatcaccctctgcccgcgaaaagtctcctgtgttcatcctgtgctgcccgctgtggacaccaggtcccttccgagcagccagcagagcagacgcgactcacccttcctgcttctgggagcctgtgaagagtctcatcacagccctttttactcttcttttccttaactatggtttacagaaactcatcactgctatatatgcagattatgcccggagtttgaagaacctcggttttaagcagggagcagttctctttgcttcaaaagccggagcagctggcaaagacttattgaatgagcttgagtcccccaaggaagaacccattgaagagtgacagcttaataaatgccagggaatctgacctggaaggcagatgggagggggctggtctggctgtggccaccgtcacagtccaggatgaagaggagtacagggtcctgtgagctgtttgaccactgttctaagactatgtgtgcccaaaagcacataagcatctatgttgagagtaagtttgtatcctgcgttggtctcagaaagaacgtgaatgcttaagattttgaaagtacataatattttatactttgggagagagctttaagagtccctggaaatactttttaatttttttaacttaaaattcaagagactgaatcacttttctcattgattaaatgtaaagattattgagaaacctatagtaaatgaaatttgtgagatgttttctcaaatatatgctgtgcctgtacttatatacagtctttcaagagagatacaaacaaggcagaaacatttaaactagtattaaaggtagtttaccaaagcattttttgttttcttaccttgaaaacacagaaccgttaattccttggtttaagcagttgctaagttttgtaattttaggctcagaggaccataggaggttttaagatttatgtttagtccgataggtgaggtctttgatattttgaattttaactccttttatgatacatcacagtaacctcatttttgaagtctttctttgtactttaatgttctctctgttctaatagttgaagtatgagatgtaactattataaactgttgctgaaaacataaatgtctgtaacttacaaacatgataaataaatt

SEQ ID NO: 15875 - DNA, 57821 bp, Homo sapiens
acagtgtccgccgcttcctggttgcgggtcagcgcccaggtcctgggctggccgccgggatgttgccctacacagtgaacttcaaggtgtcggcgcgcaccctcacgggggccctcaacgcccacaacaaggcggcggtggactggtgaggacgccgagcttccaggtcgccaggatcggccaggaatgtgtgagggggaagggggaaggacaagaggtttcaccccctggttagtttggcctcgctaaggcagggagccgccctcacgcaatgagcttgctttcagttggtggatttttgttgttacaaaagtgataatagccccgtgtgggaaattcccccatgcaaatacatttcccctctttctcgcgtatttctctgctgttttctctgcacctcgcccttttgccgttccattcctctctcttttcctctcctccagcttccaggcttctctctctccaccattaattccctgtgcactttctctttcccatcctgtcttttctttttcgttgtcttgtattcctgttgtctttcaacaatgtgccagaccctgtgctaggcgcctgttctttcacctgtccttttcacctcttttcgggctcctcctgtgtagaacattcctgccttcaacaggtcgtctttattactctctcctttcactataaattactactgcagctctgaaaactactcattagacaaatgtaaagcaaaattctgtggctgtgggatgttgttaggaggactgaaacgtcttgtgcagtgtttgtcgttttatttagttggaaggactaggattagtcgcagtatccccaggcacattgtggatactaaggattagaaatcggataagcgaaagacgtatgcctacaagaacagtcagagggcacaagttcctttttatgtcctcgggtctctattttcatatcttttagaactttttttatccgaatgaaaagtgaatttcaacaagcattttaagcttagccagatcttttatttaagtgggataatgataaatactggcctttgggtttaaatgattttattaatggtggtacatatgaattagacttatcatttatttaggcttggcaagaaagaagtcgtcctgctttgttctgtacttaaactttaacattactgttttgctaggggctggcaaggtttaattgcttatggatgtcattcacttgtggtagtgattgattccattactgcccaaactcttcaagttttagaaaagcataaagctgatgttgtaaaggtaagtaaaatcccactttgacgctaacatgttgtctagtctaaagtttaatactgtgtatcactaagctctcattaagtcttacgtgtaagtgttgaatagcttttaaatataacaacctatttggggtagcctagaattttcatatatatgacttaatgtcaatacagggtgagttattaaatgctagttgttagatcattttaaggcagatgaaagttctaccatttacaagaccactcagtcattccttagttttgagcacttaccatatgctatggatatggagatgaaagccctcagataattctccatcttataaggaagactcacagcgtgatagtgtgataagtgagacttgcgtaacacgctgtgagaaaacagaggagctgcatattgcctggttgtgaggagagtcacagaagtctacagtttcaagactagtagacagtagttagccaagtaaaaaattgacaaggagcattgcagggaaaagcaagaatatacacagaagtaagtagcgtgccataaagatggctaaagatgggacacttgtaggagtgatgaaataagaggcagccagagagattcagctgtctgtcctgaagttttgtaagattacgaaggagtttggattttttttttttttagacagaatctcactctgtcgcccaggctggagtgcagtggcatgatctcggctcactgtaagctccacatcctgggttcacgccattctcctgcctcagcctcctgagtagctgggactacaggcacccaccaccatgcccagctaattttttgtatttttagtagagaccgggtttcaccatgttagccaggatggtctcgagctcctgacctcgtgatccacccgccttggcctcccaaagtgctgggattacaggtgtgagtcaccgcgcccagcaggaatttggatttttgagtaggagattgatgtgaccatattcgcgtcttagaaaaactctggcagcagtggaggatctgctgaagaaatgcaagactggaggcagtaagatcatttaggagatttctgcagtaattttggtgggaaattctaagggcctaaaataaagctggggcatggagaagtcatgtttaagagcagcaaagaggtaaacctgatagcctttatagtgatcagtataaaggagagtaagagaatagagtgactccaaggtttcttttggtgtaattgaatgacagtgtttccagttatcagaggtaagcatctgtgaagtcagtgaatttttaagttttcaacatgcaaaatctgagatgcctgtaatatattgcattatagtgatccgggctttaggagataggtcaggattagagatagagatttggagtctttttcttttttaaataatagctttattgagatactcataccataaaatgtactgacttaaaatgcacaattctgtggcttttagtatatccacagttaatgcagccacaattacaatgaacttttttacctcaaaaagaaaccctatatccactagcagtcatattccatttcccccatttccctcatcctttggcaaccactgacctactttctgtgtctgtagactggcccattctggggattttatataaattgaatcatataatttgtggtcttttgtgcatgacttctttcacttaggataatgttttcatggttcatctgcgttgtagcatatatcaatactctgttactgatgaataatattccactgtaaggatgtatcacatttattttattgatggacatttggatattttgtactttttgcctgttacgaataatgctgctttgcacattcatgtgcaagttttgtgtgaacctgtgttttcatttcccttgagtatgtttctaggggtggaattactgactcatatggtaactctgtttaactttttgaggaactgctggactgttttccaaattaacattctcattagtagtgtatgaggagtctaatttgtccaaatcctcaccaacgcttgctgttctctgttcttttgattataaccatcctaatgggtatgaattgattctcattgtggctttggtttgcatttccctgatggctaaaggtgtggagtatcttttcatgtgcttattggccatttgtatatcttctttggagaaatgtctatgcaggtcctttgcccattttaaaattgtattatttatctttttataattgagtcgtaagatttctttgtatacagtagtcctcccttatccagaagggaaatgttccaagaccccagtggaagcctgaaaccctggatagtactgaaccctatatatattgtgctttttctcatacatacttacttatgataaagtttataaaccaaaccctgtatatactgttttgtctcatacatacttacctatgatcaagtttataaattaggcataataagagattaacaacaataactaataataataaaggagaacaattataacaatacatcagcattactactcttgcactttgggggcattataaagtaaaataagggttacttgaacatagcactgagatatcacaacagttgatctgataatcagtatggctactgagggcaggtggtgtatacagcatggatgttctggacaaagggatgatttatgattaaggcaggatggaacaggacagtgggagatttcatcatgctattcagaaaagcgcataatttatgaattgtttatttttagacttttttgtgtcatatgtttggattgatacatgatttgcaaatattttctctcaatttgtgggttgtctttttactttcttggtggtgtcttttgaagaacaaaactttttcattttgatgtagtccaatttattattttgtattgttgttgcttgtactttttgtgccatatccaagaaaccattgctttctccaatatcaagaagatatatacctttgtttttttcttagaattttagagctttagcttttaatccattttgagttaatttttatatatgatgtgaaatagggaaaaatactattaatttttgtttattgatcatatcctgtaatctagctaacttcacttagtagatctatttaatagtaattttgggtaaattttttttaagtagacagtcatgtcactgcaagtgactgcagtttaatgttttcattgataatctgtgtgtcttctatttttcttgccatgttgcattggctaggacctctactacaatgaatgggagagtagtgagaggatactcttgtcctgttcctgagcttagggggaaagtattcagtctttcatcaagtctgatgtaaggtatagggtgttttgggaaaaatatatttaccttctctttccctctctgtttcctttcccctacactgccccttggcatttctggagcttttatttctttatgtaggtccaagtttcagtctggtattatattcccatcgactgaagaatttactgtaagttcttaaagtgcctgtctaatattggttgattctcttagcttttatttctctgagaaagtatttcacctttgttttcgaaagataattttcaaaggatatagaattctgggtttataatttttttttctagtagtactttacaaatatcattccattggccaggcatggtggctcacacctgtaatcccaacactctgggaggccgaggtggatggatcacctggggtcaggagtttgagactagcctggccaacaaggcaaaacctcatctctactaaaaatacaaaaattagccaggcgtggtggtacacacctgtaatcccagctacttgggaggctgaggcaggagaacagcttaaacctgggaggtggaggttgcagtgagctgagatagtgccactgcactccagcctcggcaacagaataagactctgtctccaaaaaaaaaaaaaaaaaaaaatccctccactatcttcaagcttacatagtttctgatgaaaaatttttgtttttgtttctctgcattatatcttttttcctccgattatcttcaagatttccttaaccttggttttcaatagtttgattattaaaatatatatatatatggcttggagtttacctaaatggaattcaacatatacatatacaaatatatacacatatacaaacatatatatacacatagagacagtcaattcttgttatttgtggtagctatattctgtaaagttgttgtatacactgaattagtgaatactgaaactttgtttgctcctaggggttaggttcttgtgaggctctggtcacaacattttcatcaactgatcaatagataaccttgctttatatgtgtttccgtttaaagacatattaatatgtcagttgatctattaacattgaactcatagccaacaacacatgcctgagcaaagattatcacatatatatatatgtatgtattttttgcaagacacatcacaacttctcatacttagaaacggtaggcagtatgcttggggacctatttaaacagtgaagtcaccagcaaaaggaacaaaaatgtgaaaaatgtggtactaaataaatcatgagatgaacacttgttttgccattggaaaagctaaagcaagaattcttgtttgacttcagctgggaacacacatgtatgttcggtgacatttttttcaccattctgcacttgtccacaaaagcactgcaagtattgattttgaggttgcaaattatagtgagtaggtaaattgacaaatacagaatctataaataactagaatggactgtgtacacatatatacactatacatattctattcatacacattctatacctatgaacttaaacatatacacatacaaatatgcatacacacatacatatgcatatatacacatacctcatttaaaaatttttgcctgagcaaaagatctattacaggaaaaccttaaggcctgttcacgctcattttcagaaaacgttgtttccatctttttcatgaatactactgcaattggttggcttactttcctaccttagcattatatatgagtgtatttatatctgtacacatatataggtatatacatttatatgtatttatagatttgtggtatttaaatctacttattaaacagaccttggacactgtactaagtctgagaatagaaatgcaaacaaagaccacatggtgtgccctatggaacttacagttgatggactcatgaataggcaaaaagaatgtaaataaaataagtacaaattgtgtagtagtaaatgctttgaagaaaataagcaggatactgagaagagaggggtggtagtgaccagggaaggcctgactcctagtgaggactatgaaatttttcccttattctgtcagtattcattgttcaagaatttaatcagatttgccctggagttcatgtgttttttattttaaaaattctattgttaatcatgttgctataggcatgaagcatttttttttttttagagaaaaacttaatgttttgtgaaagagagagacagctagagttttttgtttgactttgccttctcctgactttccctctgcaaggtttttgtgtttctaagttgtcttcttttagttaggagactagaatacagaaaaacattctgctaaatatgattttaggtattttgtcataaattagatcttaggaaaactgattttcaaggcatcctggggttttaacctaaatttcccaaaatattaaggctgtgaatcatttttcatcacaggatctttgtgatgtgtcaaagaaaacaattttgtaactgcagttaaagatatctaccaaagtaacacaaatgctgccttcaaaatgaaaaccagttttctgtttattcttgctaaatgtttatgtaatataaatgtagtatgggttctggttgatgttttgtgaaaattatgttctgtttcatccagcgcaagtatttacttgatctgatttcttcttgatacaggttaaatgggccagggaaaactatcaccataacattggctcaccatattgcttacggttagcttctgctgatgtcaatgggaagatcatcgtctgggatgtagcagcaggagtagctcagtgtgagatccaagagcatgccaagcctatccagggtgaggaaagtctgctcagctaagtgtgtatattgatacacttactcttggagtggttttttggttttgggggttttcccccattcatttaattttatcaattccaagttagctcttgattgtgttttgcctattctgctgatctaaatctggctttctgtccttactaatacacttctaggcatatttcttcaaatctcaactgatttgtgctttggtaaaactcattaattgcaatatcagcctcattcaagcatgataagaaaaagtaagtggtacaatcttgtaatctaagctacaatataaggaaaattggccactgctgttaggaactagccatcagtgcttactctacattaagtaatttgttcattatcagagatgaacaaaattttattctcattttcatatagattgcttgtttgttcgtttcatgttactgacctaaaaccagtacggtattctttttttttttctttttttttttttgagatggagtgtcgctctgttgcccaggctggagtacagtggcgctatctcggctcactgcaaactctgcctcctgggttcacgccattctcctgcctcagcctcccgagtagctgggaccacaggcacacaccaccacacccagctaattttttgtatttttagtagagacggggttttaccatgttagccaggatggtctcgatctcctgacttcgtgatccacctgcctcgtcctcccaaagtgctgggattacaggcgtgaaccactgcgccctgcccagtacagtattctttagacttaagtcctccagtggctctcttgactgaatgaattttttaaatgactatttaaaaaatatttattaaatacttactgtgtactaggtactgaactagatctttgcatattctgtttattttttgaaaaaccatgaagaactgtaaagttccattaagtaattccacagaaacattaggaaagtctgacatcttggttgtggctaagagagtttcatattgattttatagttttaagtaatgattagggcaaattgccttttattttctttgaagtaatatttcagattacttcaaaatttttaccttgagagtttaaccagacaacttatttttatatagaattagttttttctctggaatattgatacacacacacacacacacacacacgtcacatttggggctggtggttaagtttttaaagattatattttaaaaactaaatatcaaggacaagttagccaaggactttggagagtgtggtttctgaattttgcctttctttatcgggtctttccagatgttcagtggttgtggaatcaagatgcttcccgcgatttactgcttgctatccacccgccaaattacattgtgctctggaatgccgacactggcaccaaactatggaagaagagctatgcagataacattctttctttttcttttgacccttttgatccctcacatttaacttgtgagtaacagttgcttgtggaaaatgagttaagtgagatatttataatatagtaatgctatgtgcatgagatatacacacacattatacatctataatgttaaaatgactgagcgaagtggagaagcatgtctagtccatatatctgcagctcctaatacacatactcaatcataagttcatatcattgcaaatatgataaaaaattaaatcagcaagctacaccttcactgtgttgaatttgtgaatagtattagactagccagggacagagagttactttgacactccagacttaattagttcttctaagaacatttaaataacttgaatcaagggtttcattcagtctgtggccaagttaagttcttgctttttaataaattgtcctaattcacgccattcattttgagtgccataaacagatgcatgtaaagaagaaataagcctaagcaagttttttcttgcagagatagtttttgctaatatgcttttaatgttttcctgagctaatgatctaaaaatgagatgtgctttaggtatttttgtggctaaattgtttagaaactatttaatcatccaacagatatttcttgagctattgctactcttctgggaaccaagatgtctcagaacccaaaaggcaggagccttcacagagtttgcattctagtgagaagaagtcatatcataaactgtgaccacaatgaattaataaattctagtgtagtaagaggtgacaggtgatataaaggcaggataaaggggatgcagaagaatgggggatgagggcatgcaagttgtatgagataaagtggtcaaagtaggcttcactttgataatgatcagaaatgtgaaggaggtaagggaattagctatggtaaggaatgtttttcctggatttgaatgactcaaaattgttttacccatcaacttttattgaggggtgtgtgtgtgtctgcacgtgttaaaggaggaagagaaaggcagacaaaattgaaattataataacatgggaaatgtggctgtgtaaatacactacagggtgcttaggcttttatgtatgtaaatgtttgtatatggacgtgtgcatacatacactcacttggtcaccagtttacttactcacataggtgcagtgctggggaaacacctaggagggctggcccagttggcagagtcagggaaggagggcatcacaaaagaaggaagcaaaggggaccttgaaggatgagttctggaacctgaaaaggcaacaaggctttcagctaacttgattgcatcagctctttacatctctgtaatttggttgatgaaagcattgtgtgttccagagtgtcagttgacctaacatctttgatttactcatattgaatgtgctagggttgtcataactcttgaatgcatcctttttccctgtgtttagagcagccttgctaagggctgggacccagggtagtaaggtttttctgctcatgtcttccagtattaggcccattgttgagggagattattttttcagtcataaaaaggcataatttgtattgctaaatatggtgctccctccttgactatttttgtttcatgtacacttagtaagtcactgtgggcccactactgttttctaaatattaagggaaaagaatattccttaatcatcttaaggttcgatctgatgcttgagaagaaaaagggaatatatttagactgagtagctcaggataaaaatttggtatcatcaaataaaatatatgaacttagctaattgtgatatgcagagcctcttaagtatggttttttgtttttttaagttatgggatatgttaaagtttttttgtttgtttgttttttgtttttgtttttgttttttttttttgagatggaatcttgctctgtcacccgggttggagtgcagtggcactatctcggctcactgcaacctccacctcccagttcaagcgattctcctgcctcactctcctgagttgctgggattacaggtgtgtgccaccacgcctggctaatttttgtatttttggtagagacggggtttcaccatgttgatcaggctggtctcgaactcctgacttcatgatctgcctgcctctgcctcccaaagtgctgggataataaggaaagatttttaatgaaagtccgtgccctgaatttatttagaagaacaaacacttgttctttctgccaataaccttatgttatctttttaatataagacataatatagaatgccaagcttggaggcctctgatgaattgtaatggaccacctgtttctcttcaacttagagaacattcccattatgttatgaatgcataacattgccagttatatattattaaaattatcactatattgctctcaaaattgtattggaataaaactgtatgctaaacttcattaaactttaatcagagttttgcttttctcaatatagtgcttaccagcgagggtattgttttcatctcagacttctccccatccaagcctccctcaggccctgggaaaaaagtttacatatccagcccacactctagcccagctcataacaagctggccacagccacaggtgccaagaaagctctaaataaagtaaaaattttaatcactcaagagaaacctaggtaagttacaagtgtaaaattaacattcatctacttatctggtatgaaagcatcatttttggagatgtacaaagactgatgtttttcttcatctcactttttctcatttctaattttgaatttattagaggaaaaaaatatttatttttgtcccctgccctaagaggagattcagcatttaacattgcctttgtttccactagctgtgctaaacttccccactgacttttatagattaaaatttttgaattctgatttttacttgtgaaaatcgcaatgatcctaaagttcaggcaattgaatgcattaaaaatttgggcacaaaagctggatactcattttaaatacattttcctgacttaggtgctgtgcattctcattcagcagtaaaatcggagtgtttttcttatgcaggtgaagatgtctcccatcctggttaagagccaaggctccgggggaagctttagctatgagactgagaaacttctttaatcttactcaaatttctctctcccagtctctaaaataaggctttaaagtatttcatagggttgttttaaagatcaatagatccaataatgtaagtaaagcatgtaatgtcattgatacatagtaatttatttagaagatgtcggctgttattaagaaattacaactgaataaaagtttattttaagtaatttgatgtattcaaaataggtttctttctttttcctatagcaataatctgtatattattgctttggcaggcttttttgtttgttttggcattcattttcagatagcctttatttttaatatgccaagattactctctctaggcttggtgagtaactacttgaaaaatatgtggtaaaaatataaattgctctacaaatacattttgcacttgtgtgtaagtatcacttctatatattaagccataggctggttaagttcactagttaatttatctctcaccctgtgccaaaatgacttaagattacttcttaagtatcttaagagaactttctattttttatgtattccctctcataaacaagaaattatttggcagtctgaatagttttataagttatgttttatatttcttaagttttctctcatatgaattatatgtatatcttgagtattggggaaatacattatttcttcaagtagaaccgctctgggtgctttcacatctattaattcctggactcttactacaattctggcagtagtaatattcccattttacaaataaggaaaactgagtcccacaccaatttaaataaagttactcaagctcacccaactaggacatggcagtcgggattttaatgcaataaaaattcctctttctagtcttgtgaactaactttattttaaatttcaaagccttttaataaaattatgtttgtaaaatgaaatgtaaaatgaaaatagtacataattgtatgtctattcctattgaaatatatttaatatagaaaaggtcattgaatgtatgcaacaatcacaaattattaaaatgatttttcagaccctaacaatctcttaaaatccttatagtttcacctgttttatttacacacaagaaaatgctgcaatataagtgaaactttgtttcaaaaaagatttaagacagcttaaaagtgaatgaaggcagccaaggggaagttacttgcccaaagccatacagatagtccagtaactcctggtccaggggccctaattaccctaaatgttgatgtttttcatcctgagtcttgattttaacagtttgcctagtacttttaatgacaaagtaaaagtaaaataaaactgtcttatgcatgccagctattattatattatcatttaccatgtcttgtgtaatattaataacttaatattctactacttaatatttcaaaaacttagaaacactgacatttctacccatcctatacaatattattagcatttggattttggtacatagtagagatctaagttttggatgccaacccatgttggtcacttcagggaatagttgtacatttttattgtcaatttttatgtgtaaagtacaaaattaaatcttttattaggtctgatataaatgaagtctttgacccaagtgaatgtttacttttttcagtgctgaattcataactctcaatgattgccttcagttggcatacctgccttcaaaaaggaatcacatgttgttgctctatcctcgagagattttaatccttgaccttgaggtgaatcagacggtgggtgtgattgcaatagaacgcacaggagttccatttttacaggtatctacaattcataaattatattccccaaaattattaagaatgttatattaaaagaaggccataatcttgcataagtcttgtcttcagttctccactttctcttttcaatttatcaaaagactagcaacactattttagattgttttttttgtctgcacttttgattggtttgatttaccctagaaattgtgactgatcctgagatatttattgaactatttaagtcacatgggtaaagacaaattattttaggattataaatggatattttaaatgtacatttagttttaaagtttgggatttgtctatttttttttcttttgcccatattatctaaatatgagtttgagtttcacagtatatactttattaatctattgtgttttaaaaaataaatatatcatctatttaaaggtaataccctgctttcagcgtgatggtttattttgtctacatgaaaatggttgtataactttacgtgttcgaagatcttataataacatttttaccacttcaaatgaggaaccaggtgagtttctgtctcacaataatgttatatttttcttcaaaattattttataaagcttgatgtggcaaataccagccaaggtatatagttaatgatactccttgctttgaggaagtttaaaatatggttataataagaggcataaaaagtataagcccaagattaatctcttgatgttaaaacagtgcacctcctgtatacatcaaagagagtaaaattttgtgtttcttgatcatatccatgagccaagtagatattattttttggaattttttttttttttcagtacaagtccaaccttgtgtgcctttattattatacccccttgacttgttggctgtaagaacttccattgtaaagtgacagaggttattaagtctcagttgtcaagtcagtcttatcttggagaatggaaataatgtttttgtgaaattatatactgtgtaaagatcaaagtgattttcacatcttttggaaagtacagttattttcaggcttatagactactacaaattatgatggaaatttattcattaattatatatcactgttgatcctttttcaaagtatcgtctttattttaaaatattgaaaaaagatatcttgattatagttgttattttggaaattaaacttagtacagtcattaagtaaattatatttggaaaaaatttagtagtaattgtaaaaagtgaagccatgcttgacattgcattcatgaaggagtgatgcccaaatttagttgaggttttatttaaattgaaacaaacagtagtggtatcgatatggctgctttctgatatttaaaacaattttatgtgaagatccagatccagttcaggagcttacctatgatttacgaagccagtgtgatgcaatcagggtgacaaaaaccgtccgtcccttcagtatggtgtgctgtcctgtcaatgagaatgcagccgccctcgtagtgagtgatggcagggtcatgatatgggaactcaagtctgcagtttgtaatcgaaattcacggaacaggtaaatgaatcaacaggatcatggttttgttttttgtttcctgtttccttttataaaaaatttccataatcataaaaataggagggctggttttctataaaaatatttttaaggtaataattaaggctttagattattagggaattatgtaaatctgctagagctatttcacctatgggtaagatgaatgaataatataaaaatagatagaatgccataatctggacttaatactttgaattcctaatacgtaatgcagattttaagtatgtaaaaccttctaattattatgtctttgcagtagttctggtgtgtcacctttatattcaccagtgtctttctgtggaattcctgtaggagtgctacagaataaactcccagacctttccttagataacatgattggtaagcttttttcccctctaactccatgttaagtattctttctgaagggcaaaattaatagaatcactcacttgtaattattttaaagtcaaaaaagttaatacttgagaaaactagaacatggaatcattctttcctaaataaatcagaggggtttaaaatacttaggtagaaaagtgcctgaagtagcacgggtttgcattatagttgttagaaatagaaaacgttcattcgtgagagactgatgtaaatgaaagcaatgacattaggcatctggattttggacctagagccgatgctgagctatgccatgccaactcagggccttgctgtttgctggttcctcagcttggaatgaagtacatgcttcctttctgtctgctactcctaattcaaaattcaactcagatgttgttttctttaatctcccaagtctaatttaaatgctcttcttttgtttttcctaacagttatcagcatattttaattgtgggtttttttcttctgtttcatctcatcaattgtaagcatcacaagggtggtacagtgtttgattctattttgtctttcccagcactcagcacagtaccttgtgcatgcctgttttgtagtaaatatttactgaaggaataaagtaactgagcagtattagaaaagattattttaactttttgacatgaattatttttatgttggggattctttcaaaaaatcatttttggagataaagtgttcaaagttatttaattatgaggccagtatgtattaaaggaagaatgagagtttgtgatttcaaattttatgctacttgaaattataaggctttgtaaatatgccaagcaatttggacatctaatttttttacagttgtggctatggtttataaaggattttctgttttattatttattctaccataatataattgaaaacgatattatttaggagggtttttttgttgttgttgaaacgctaaataagtgatgcactagaaagagcattggccaggcgcagtgactcacgcctgtaatcccaacacttttggaggccgaggcgggaggatcacttgaggtcaggagttcgagaccagcctggccaacatagtgaaaccctgtctctactaaaaatataagaattagccaggtgcagtggcatgtgcttgtggtcccagctacttagggggctgaggcaggagaatcgcttgaacctgggaggcggtggaggttgcagtgagccgagattgcaccactgcactccaacctgggcaacagagcgagactcgatctcaaaaacaaaaaaaaagcattacattattaattacattaattagatcacatttattgggtacttcatactgtgttaagtgctgtgctaaatattctacatattaccttggtacagctttgcaatgtaagtaatattatctccatttgatacatatgagaactgaggcccagagagattaaaactttaaaccacacagtcacacagtcacacaatggaagagcccaagtgtgacccgggtaatcctggctccagagcctgctccttagcaatggcctccagtcctgacagctccactgtcatcttgggtaagaccatcattcatctctaggcctcagttttttcacgatttctgccagttatgaaatccttttgttcagtgatacttactattatatctaaaattatttctctccactatctattctaccagacataaatccatatgaggaagcctggacacatgttttgcaaaatttattttatcagtaacacaattttttgagttaattcaccttgtctactcttaatatgaaaacttaaagtgaaaagaattataaacacacacaagaacagcactaatcagttatatggagcccataggagtttgaaattttatgctgtttaggtatctaagtgatataaattacaggttttttttttttttttttttttgagacggagtcttgctctgtcgcccaggctggaatgcagtggcgcgatctcggctcactgcaagctccgcctcccgggttcacgccattctcctgcctcagcctcccgcgtagctgggactacaggcgcccgccaccacgcccggctaatttttttgtgtttttttagtagagacggggtttcactgtgttagccaggatggtctcgatctcctgacctcgtgatccgcccgcctcggcctcccaaagtgctgggattacaggcgtgagccaccgcgcccggccaaattacagtttttaagagacaaatggatacggattgtatagcagttcttgacaatgtagttgattttaaagtgttaaataaagcttcgtacttgaaaacattttaatttaaacttttaattaaacttttaatttgaaattcactgtgttcttagtgaaaattcaaagcaattcaggtaaataaagaggctgatttatattcactggataaatgctgatacttattaaggcctaatttgccctacattgtgaattgcctcttatgaaaaatacttgaagaaaaatgtggcattccctggatgtcaactcaaagccaacatatgtatgtgtggcacttacatgttaagcttcccattccttcatatttcatcttttttattttattttattttttttgagatggagtctcgctctgtcaccaggctggagtgcggtggcgcaatctcggctcattgcaacctccacctcccgagttcaagcgattctcctgcctcagccccatgagtagctgggattacaggtgtgcgccaccacacccagctaatttttgtatttttagtagagacagggtttcaccatgttgaccaggatggtctcaatcttctgacctcgtgatccggttgcctcggcctcccaaagttctgggattacaggcgtgagccaccacactcggcctccatctttttttaaccaaagttatgtagagagattgatattgagtatgtggctaatcctaagggatcattttaataggattaaaatgctattttttctatatattttgtggattttaaaataacattattaaaacaactttacagcttcaaaaggttgtatttatcacccactcttagtaattatttatacttttcctttcacactatatacatgtttgtgtttatgtgtgtgtagacatgtatgtatatactcatgcatattctttctatttttggcaagttaatcccaatattctgtagtggtttataggaaggaaatttgtatacctttttaatgaacagtcttgatttcattgtactgtttagatttagcttttgttagaatgatttttattggagtcatctttttagtttgagacttgctaacctaagtacgaatggtatatgtgaaaataatgccattgaagtcttaactattgacagtgatggtgtatatattatacacgtgatttatgaatatatatatttgtatttgttttatatttacttataaaacattttgtaattacactgacacattaaggtttcttattagaaattatgaataagttatttaaatctgtttttcatgaataccaattttgtatgtactttacagagtacatcagattgaaaagtaaccctttcaaaaggcagtaaaatgagaaaaatgtggtacagtagttcactctgcagaaactgttctctaatgcaagttctcttgctttgttctgaagcctgtgtagtgctttaataccaggaacattgactgaaacagtgtttcttagaagacataggtccctgcattctggatagcaggactcgggagtaatctatcctttgaggtgttagttgatgcaatttaagtcctatagccaggtacagagtcattgtgtccttaataactacagccactaaagtactacattaactacattatacttttagacctgaagagcatttctactgaaaattttctttagctttttaagatcagcatacactgtagttaatatatttgttatttttattacaaatcagggcaaagtgcaattgctggggaagaacatcccagaggttcaattctgcgggaagtgcacctcaagttcctgctgacgggactgctttcaggactgcccgcaccacagtttgctattcgtatgtgtccaccgttgaccacaaaaaacatcaagatgtatcagccactgctggctgttggtgagtatttgacctggtctttttttttttaactcactttataagatgtttaggttttctagtttctagaagatcctttattctttttgaggatgctttaaaaggagatagagactaagtgaaactgtaaatactcatcctggaacttaaaaaaaaaaaaatttctgtccttttattccaactgtcttatattgaattggaatgctgagtcttcatccacctgagactggacagtcgagtctctgacgctgtccattcatctcggaaataccaggaggctcatccctgcagtgctgaatcccaggctccttgtctgtaattggaccaccccagtctttatgtcatgtcagttttcgttgggtctttattgactaaaaatatagtcagggttaatagcttaataatagcagggttcttcttttgccaagagttatatattaaatattatttaaagtggctatggtccctataaattaagatttgccttttggtgtgaaattgtgtatttgtatgttataggtagaaaaatttatctgggttccaacttgctgtcacattgatttcatagtaatgtgatgaacctaattttctttacagcatagagaaaaaaacaaaatttagtttgctattaagtacacattattaaaatacatttctccaaaacttctgaaaaacagtgtatttgtttgaaactcaacatttcttcttaagatgctatcggctggcttctggctttctcccccagtctattaacatgtgatttgtggtgaaaacctcaccatatttattctgtggccaacatggctgacttctcagtgttaaagactcatttgggtattactgtttggtagtacccttctgtttttttctgtgcctatcttttgaaagcgatttgatttttatgattcaattgtctatatatgtgtcccgatttatataatgcagataaatgtttaatttttgctttagaaactgttgattaatatttcaccactaatagattttaattaggattcatcagtgtgcttcatatgtgcatgtatgtattatgtcagtgttcctgatttgtcagttaggattttgtcaatttcttggggaaaactacttcttgggatagctatgtaataagagctatggcaaggtctgagctttccattgtagaataagctgtattggtatgtagtgaatatcatttactgaatttagtataacaaagtaaaaatataagtacctaaaagtttgtctagaggtgtcactaagaaagataaataagagttcagctatggaattaattctccttgtggtgcccctagtgcattagatcataggttcagcattgttaaaactttcagattgcagaaatcattggattattatgaagttctgttaattgaaaaattttagtaatttagttattttctcagtgccaaaaggtattattatgaaatagatgataaatgtaaacaactgtacaatgtgtttttctagaatagttttgcaaaagatttctggagttttattcagcaaataagataatattggaatttgcccagcatttttacttccactctgttgctttgcatgaattcattaatctttaaatcatgtgcagtgcaaaagtgattgtccatatagactgttcacttttcttgcttaacttataaaaacactatagagactgaagctttactttctcatgtatgtccgtgtcctttacatttaaactttagacatactacctgagaccatgaaaagctttagaataatacctgtaaactattaattatagtgatgacagaatactaatagttaaccaagtgcttactttgtgccaattactgtgcttagtgctttatgtttccccatttaatctccaacaactagattttctactcttcccattttaaagagatgaaaacacagatttagtgtgggcaagtaattcatccaagagtataaggaagagccagggcttaagcccaggtttctttaattgcagaaaccacagttaaccattatactttactctcttgtcaggatttatttaataaaagagacaaaacaaaaagaaaactttggaaagaaaaatggataaccctggttagtgagctctgctagattgcttatttgaggaccagctataataaaccttctgagtctcaaaaagtataaattcccatgtgtataaaagcttaggaaagtgtttcttcaaattgtatgtgtattaatgtaagttttaaggtctttctgtgaaaaatctattcctggaattaggcaaggcttttgagcacgtgaggttaggcccattttttttataaggaagtggaccagagaaattcattcttctttgtgtgtttgtttaaacacatagtttgggtttcttttataaaagataaatgtgttaagtgattaaagtcttgagaaaagacttttcttgcaaagtgctggaactcccactgaattaatgctcttccatgatgtcattttgaaaggtacaagtaatggttctgtcctggtgtaccatctcaccagtggtctgctacacaaagagttaagcatccactcatgtgaagtcaagtaagtatgtcattgtgatgatgacatcacaaacatcatatcagaaaaaaaattctcatagacttttctacattgagtactctgtaatatctgcagtggtgattatttgaaaagtttgaataatattcatgtccaactaatggctatgttaatcaaggatgataactaattctttgctgtgtaaagaacataagcagtagagaatgttttctcttttattaggttggtgcaaaagtaattgcggtttttgcagttttttttttttttttgttgttgttgttgttgtttgttttgttttgttttgttttttttaaatggcaaaaaacacagctatttttgtaccaactaatattgttgcacctcatttatttctcctaagggccaggctgttttctcactggatatccttacgttgccttgttcaggtttattttatttatttattttgctcaaaattattattttttattattttaaaattttttttactttaagttcctggatacatgtgcagaatgcgtgcatttgttacatagttatacatgtgccttggtggtttgctgcacctgtcaacccatcacctaggttttaagctccacatgcattagctatttgtcctgatgctctccctcccctcacatgcccccgccaacaggccctagtgtgtgttgttcccctccctgtgtccatgtgttctcattgttcaactcccacttatgagtgagaacatacagtgtttggtttttctgttcctgtgttagtttgctgaggatgatggcttccagctccatccatatccctgcaaaggacatgatctccctttttatgactgcatagtattccatggtgtgtatgtaccacatttcctctttctttttttttctttaattttactttaagttctgggatacatgtgcagaatgtgcaggtttgttacatagatatacatgtgccttggtggtttgctgcacctgtcaacccgtcatctaggttttaagccccacatgcattaggtatttctcctaatgctctccctccccttgcccctcaatccccgataggccccagtgtgtgatgttcctctcgctgtgtctatgtgttctcatcgttcaactcccacttatgagtgagaacatgcagtgtttggttttctgttcctctgttagtctgctgagaatgatggcttccagtttcatccatgtccctgcaaaggacatgaactcattcttttttatggctgcgtatttttcatttctataacgatccatcagtaggactgcttatgacaaattcaaataaagtcattttaattgttaatttgtcttatttattctttgtttaaacatcatcagaacgctgcatagcatttatttgatttttaggacatgatctgcttatgagttctgtgtatgcagagctgtccgagggaaagctaaattgacggaaaagtgcttcttgctttctgttccaaaatgcctacctgtgctgtccatagcattatttcgctgaatgcaaggctattttccttttgtgtcctatcagtgatagatcgtagagttacatatataaaatatgaatttccacttttttgtttgttttttgatacagtcttactctgtcacccaggctagagtgcaatggcgcgatctcagctcactacaatctccgcctcctggtttcaggtgattcttatgcctcagcctcttgagtagctaggactacaggcacgtgccaccatgcccagctaaattttgtatttttagtagagacggggtttcaccatgttggccaggctgatgttgaactcctcacctcaagtgatccatccacctcagcctcccaaagtgctgggattacaggcatgagccaccacccccagccagtttccagtttttttttatgatctttcagtgaaagcataagaagtcattttctgttttctgtacattaaataattgtaggtcttgtgtataaaaattctcagtgaacccttagcaaacacattatcctgagtacatgcattttcttaatggagaagggttaaccttttttttctttttttttttttttttgagttggagtttcgctcttgttgcccaggctagagtggaatggcgctatcttagctcactgcaacctctgtctcccgggttcaagcaattctcctgcctcatcctcccaagtagctgggattacaggtgtatgccaccacgcccagctaatttttgtattttttagtagagacaagatttcaccatgttggtcaggccggtcttgaattcctgacctcagatgatctacctgcctctgcctcccaaagtgctgggattacaggcgtgagccaccgcgccaggccaggttaaccttttaagtatcacagcttctgattgtgatggaaatctctgaaaagtttgcattgtcttactgtttcaagtgcattgttgtgtggtgcagcccaggtgactgtttattgccaccttacgctgttcctatacagcatctccccagatacatttacgtggaataataatgtctttaaaagctttgggcttttgaggtgcagtgacacaggtatctgtttggactctttcaggctgttattcatctcttctcttctgttgcagtgtctgtagcttgccattctggcacttctagtagtctctgcttacactgctgaatcttctctctctctctttcccatctcctcttctctcgacatttcctttcaccctgccttgtgtgtctggtgtttccttttatggtcagcactaaccaatcgaaactctccatttaatcactacttattctagggattatgttaactattaatacttcacacgtatcatttcattgaatccccactacaatcgtatggggcaggtattgtatttccagtctacagagtaagaaactgaaaattacagagtaatctgtgaaggagctagatggaattcactctgggcctttgaagcctcagaacctgaactcttcacttatacttacagtgcatgtgctgcatctcctgctaaaatacgcacataggttagtaggaatcatgttggcagtaaaattaaaatgttggctgagccaagatttgtgctaagaatttcacacatgcttctgaaaaatcaaacatgttgtcttttcaaacacagaaagttttaatagctaattaatcagagaggtattaattttaagtaaggtttattatcctggattagtcaggttatagatgtcactaaatacttgacttatacatgttaagataatatttatggttgagtaacattgaaattgattataagtgttacttgggatactaactctgagggatatactacttatcagataaatgtgaatgatcatacaaagatactccatttttatatgaatttttcctcttcattgccattttgaaaataatttgtattttatattcagagatactgcccaagagaacactaaaatcctgctttgtgtttcagttaatgcaattttagtattataatcaaaagccattaagaaaatttcacagaaatacaaaaattagctgggcgtggtagcatacacctgtaggctcagccatttgggagcctgaggtgggaggatctcttgaacctgggaggcagaggttgcagtaagttgagattgtgtcactgcactccagcttgggtgacagtgagaccctgtctcaaaaaacacaaaacaaaacaaaacaaaactttcacgatgtattataaaaatgtctgaatttattagcagtaaactcaaaacattttagattttcatgtccaaataaggttaacttttagaaagttgtttttctaccttttattaagtgtgtttttaaaaaatcataatctaaagcacttgaaggttgtatatactgtgccggggactcatgacagcagatagcacaaagtgtgtgtgtttttaaaaccatgatgttttaacttgtgatgctttatgaatatctgttgaatatcttctctatgcttataaacagagaaagcctttgaagcttataatgcaatggaagatacttagaagtaaacaaaatagagaggtatatgtagattttcttaggtcattagtttgtgtctttgtctggtaggctgaaactactgtcatatgactctctccctggccagattttaatagtcatactaatactgatgtgaatcctgataattaaactatcttgtcattacatttgtagataaagttttggttagaaatgattttgtatgtgttaggtatggtaatacagtctcaaataaaaggtcatgttaagataaaaggtcatgcttactttttaattaatttgtgtaataaaatttaggtctttggaaaacttatttttcaaataaatgaacctttcaaataaaaaagagaattagtttaacctttatctcatttcctattataggggtattgaatggacaagtttgactagttttctttcttttgctacctcaacaccaaacaatatgggattagtgagaaatgaacttcaactggttgatcttccaacaggtttgtttttaaagatccaaataggtttgtcatattgaataaacatgttgccatttataaaacatgtttgaaagtacttctttcaccttggaatttttttttatatttcatgcttatatatttattcttttattctctaataattgccctagaaaggcctcatcattgtttacatggaaatgttgttggcacaaatacatggtaaaatggaggaccattagcctgaacagacagattcattaaaaaataggataccggttctacttttaagtgcattgttatatgtaaccaactttaaaagatcgatttaaaaataactctgtcaatggactttattagagtctgtgctggaaattttggcttttataggaaacacttagaaaatttataggttaaggattgtttttaaatgctcaaatttaaaacttgtaatagtctctggctgaatgaatagagaaacttaatttgggattttgaagattctacagtaggaaacgtcccaataaggtaactttttcagaattgaaagcctaaacccagtgaatttcaaaataaagaatttgaaaatataataaggaaagagtttcaaattattttctggtgtatgcagtagtttcaaagaggtttttttaaaaataaaattgtgatgagtttctttaaaatggtatagcaacacgaatcatatgtagatgatcttaaccaatgagagcatgtgtatgtatgtgtaaaatgaattaaatcaaataaatggttgtaaatcaagtaagttgtaaataaatgaagtacatggttgcttttttatgttctccatatgtattttcaagctctcaaagatccagttgttcttacttctcagggtatgttgctgaacttccaggaatcattcccgtctttagtccagtgttgctgctctagtctcattggaagtgacctgtccactgactctcatccccaagttcctaatttgccagcagaatggtactggccctgtgtctagtgatcccagggataaaatgctgttgtctagtatcattgacttaaaaaaaagaaaaaaaatccctgttttatttgttttggtcagctcaagttcaggactgttagataacttaaaatctgctttgcacagatgtatttttaaggaacaaacatctacagtaacagttacagatttccttaagtgggatatttgagttcatagatggtagacttttatagcctgggcttctaaggagggcagcagactagtgcagtcaggacaggacatgggctgtttggggtataataatagtgagtatagtgagattccacatgatggaatctcaacaaagagtaggaaggcgtttaggccttcagttgtccttgaattgagtatgttctctcttttgtttaatgtagataaaaatctaacacaagatactaaaacatacaaggtagaatttatactttttttattcacagaaaatcatgtaacttcctttgcgggtaactcattctttcacagcatacatgaacaccgtagttattccctagtttccagtttataaagatgttttgagaggaacatgttcaaaatatttaactagtattttgcacatgggacaagaagatcttaaatacatgtttcaagagtttttcccccactagttagtatttggaaacatgggaatgtttgtattaaatattactttaaataagtagttttcgcaccagacaattgctgtaccataaatatcttaaaacttaacattgtttttttaaatttctaaaattgaattatagaattcaagaaactgtgtgacaaatgaaaatgcctttttacaaaataaatatctgaatatgtgatatattattgatcattagtttgtaacacttttaagaatattctttgaacttacattattagaaacagcttagaaggaactgggcgccgtggctcacacctgtaatcccagtgctttgggaggctgaggcagatggatcactagaggttaggagatcgagaccagcctggccaacatggtgaaaccccatctctactaggagtacaaaaatgagctggcgtggtggcgagcgcctgtaatcccagctactcgggatgctaaggcaagaaaatcacttgaacctgggaggcggaggttgcagtgagccaagattgcgccattgcactccagcctgggtaacaaagtgagaccatctcaaaaaaaaaaacccgaaaaaacagaaacagattagaagcaaatggaagaatgaataggagaacagagggtaggatgggtaggactgatcaaattacattggcgtggcttcttgtttttcatacatgttttatgcactgttctcacttttttaaatatttgcaattaaaggtaggagcattgcttttcgtggtgaaagaggcaatgatgaatctgccatcgaaatgattaaagtatctcatttgaagtaagtgtcaacctaaaaaaaaatctatggtgttatcacaatgaaatctcgtggatttttttaatctttaagaaaatgggaatgtgctggaatgcatatggaatctttttagtgatagcaaatggtgatatgcagcccaaagaaaatattttgattacaaaattaagttgctatcacttttaattctctacttctaaaaagatgaagtaacttttgcatgaatcgttatttactttcggataaagttcttatgtacttctatctaagcatggagttactgagtgaaagaactcattttctttatgtataatttaaactcattttgcttccagaaattgagtttttttgtttcaggggaaaataacatgtaaagcagtattattaaaaatagaaactgaatgaaaatcaatcaaaattacaaagaaagagtaagctttctaaagtagttttcaaacttgttttggcttttctaagatctttgcatttccatataaattttagaatcagactatcagttttatcaaaaaatcttcctgagattttgattgggattgcattgaacccatcaatcagtgaggggaagaattggtatcttaacaagttttgtaactcatgaacatggtatgtctctccacttatttaggtcttttaaaatttcagcaatattttgtagttttcagtgtgtaagtcttacatattatttgtttattttgtgttttctttgatgcttttataaatgacatttttaaatttcaattatttattatttgtatattaaaatacagttaattttctgatattgaccttgtgccttgtgaccatgctaagcttagttattacttctagtataggtgcttttgttaattctttaggattttctatagagacagtctcgtttgctagtaaagacatctttacatcttttcgatctataggccttctttttgcttgcactaattaggacctcctgtatagtgttgattagaactgagatgtcagctacgagctgacatctttgctctgatcctggaccttatggagaaagcattcagtctttcaacattaagtatgatactagctgtagattttttgtatatttcctttatcaagttgaaaaagttttattcctagtttgctgagcctttgtattatgagtaggtgttgaatttatcaaatgctttttctgtattcattgatatcatcatatggtgtgtgtgtgttattttgtttttctttttgaagttcactaatatggtgaattacattgattgattttcagatgttaagccaacatgacattcccggaataaactctagttggtcgtgatgtattactgttttgacatattgctggatttgatttattgatatattattaagagttttatgatatattattaagagtttttatatctatgttcatgaaggatattggtgtcgtttttatgtaatatcctttgttttggtatcagggtaatactgaccttgcagaacgtgttgtaaagtattctctctcctttttttttgaatgagtttgtgtagaattgatattattcttactaaatgggaaaaatttattaggaaacccatctgaacctaaaattttctttgtggcaaagtttttaaatacaaattcagttttgtttttttttttcataaatataggactatttagattctctttttttgagctttggtaattggtgtcttccaagtaatctgtccattttgttgaagttgctgagtttattaatttattgaaataagcttgttcatcatggatctatgatcagtgattatctttcccactcctaatatcagtaaattatatcaaccaattttatttattgatcttttccaagaaactacttttgattcatttgattcttctctatgatttttccattttcaatttcattgtctgtcatgcttatcttttgttcttctgcttactttttaaatatgctctcctttttttacatagttttctaaaatagaaacttagataattgaattaagttgattctctaaaatgtaatgtaaacagttaatgctatatgagcaccagttttcctgtatcctacaatttttgttatggttatatgttttcattttaattcacattataatctttaaaaatttccatggggtgttattcagaggtatattttttaacttcaaactatttgggtgttttgccaggtatctttctgtaaatttctactttctgttggggtcacacatggtcctgagtggaagaatctcagtcctttgatacagggagtacagggatcttcctactctgtcacatttcctctatgtcagccatcatttgctgataatattttagttcctcataatgcttattgagtaatcagtgctcaaattatatttgttgaattgcactcgttgatgtcattcagtacttctttcaggcttaacagaaagtgaataaagtggcatttgttgaataccaactgtagtagaatgatagaaactttacatactttttcattgaatgtttaccataatctgtatatcaattaattgaggtacatgatgagattctcctgtcatgtgtgagaagttgagcctcaggagggttaacataagttgtggcatcagggtttgaatctatgccactctttcttccaagttggactccttgcctaattgtgtgagactgtatgttctcttacaggtcacttagagctttaccttcttatgactgttaatcatggtgctaaatggtagtttaaattgtctatatttagaatgcgtcagctgagtttttcaatttactgaactttttatttgctctaattcatggtgaaatttttgcaaaaaggggcttatttagtaattttgtttattttaggcagtatttggcagtcgtattcagagataaacccctggagctatgggatgttaggacttgtacccttcttagagagatgtccaaaaacttccctacaataactgctttggtaagttacaatttaagaatttaatagcttatttaggtatatatgtatgtggtgaatgttttgcttaagcttgaatcaaaatcattactgccaatgtcatttttttggttaaaaatgtgtgttcagagaagatgatctaaataaatggagataattcttattttcttggataaatcaacctaatatcatattagtgcaattccaattcaagtttcatttggatattttgaggaatatggtaaacatattcaaaaatgtttatgaaagaataaaggtcctaaatagctaagtcatccttgaataaagaggagtaaatgtgggaggtgtgggtggggttggcccttcctacctgatattagtacatcttacaaaaccatggaaataaaatcagtattgtattggcacaagaatagaaagtgagtcaacctaataaagagctcaggaacagacccatgaatatttggggacttaatatacagtaaagtagcacaaatcaaagaggatggacagactgtgtagtagacggtgttgggaaaactgtctcactttatggagaaaaatacttgatctctacttaataccgtatagagaagtgagtgtcacaggactaaagacctaaatgtaaaaatgtaaagctataaaattgaatataacaaaatacaaaatattgctgtgacctagaggcaggaggagacatcagaagctcaaaccaaaaggcaaaaaaaaaaaagaaacaatgcatttaattaatcaagattaatgctttttgtttgatgaagatgtcaaagttaaatacagaagacattttgggaaaacaaattttccagtgtctaaatttaactagaaactcctgcaagtcaacagtgaaaaaaagcgggaaccctagtgagaaaatgaacaaagtctgtgaagagctaatgagaggcagagaaacctaaaaggccaacaagccatataaaggaatgttcaaactcatcagttttcagagatgttcaaaccatgatatggatctaccgtttagactaacaaaaactggacagccatatagtgttaagtacgggtggaacatagggtatgggaatccttgtgcattgctggtaggaatgtagaccaatgcagccattctgtaaagcacgctggcagcacttgggcaaacacagacatcttctgtgtccgctgagctcttggtcgtaaatgaacttttgcaaggatattgactggtgtgttttgtcatgatgtgagtttggagaccatctgtgtgtttttactgagagaggagacagattaacaattggctgatgcacccatggagtattacgtagcatgcagaaacaggaggaagaggacttaaatacagtggaaagagtaagaaacaggatgaagtatatatatatatatacacacacacacacacacacacacatataaacacaatactatttaggtaaattagataataactacatgttaagaacttatacatatgcgaggatattggactaaaaggctttacaataggtggaatataaaagaatatataaataaaacaagtgattttggaggaatctatggatgataaaggaccctggttcgagaactgtgattgtcttatcgtgtgcacataagagatgggggaggagacgaggaataggcaatactatcattgaattcattattttcattttgtaagtattttataaaaacatcaaaaggtcagaccttttggaagtttgccataaaagctccaattaaaatgcattcatttagcctttctctaagtaggtaaaatctaaagaacaaatgtggattcatgtgtagtaataataaatgatactgggcagtggtgtgtgtgcccagctcttctggacgattctttgacagaaggaaacctagcacttctaggtttgtctgcatttgctttacaggagtggtcaccatctcacaacttgaagagcctgagaaagaagcaacttgcaactcgagaggccatggcccgccagaccgtagtctcagacacagagctgagtattgttgaatcatctgtgatcaggtacagtacagtgtttcttgacactgtcatttgtgccattagcatcatgtctgggaagttgacaagtatcatcggaaggtgtctatggtagcaagttggactctgcttttgaacatacttagtttcatctttcagtacatacccagattactaaaaagataattttatcatttttagtattgtactatactgtttgttataactaataacatatgcagtaatattcacccatcagcatctagtagtaaatgtgctcattccgagtgcccttctactccatacacttcagcttctgaaattcaaatgaacatagcatagacatacagatagatcatattatcatttatacacaccaaagaaaatgtgttgggaatcctaaatttgtgtatcatccccatccataccaatcttacagataaaaggcttcagagataatgttgggtcactgtacagcctcccttctgttgagcacagttctatagccaaaatctctatgaattttatttttcttgtgttaagtttagatcaccatttctctctgtgcagggtaaacttcctctgatgttgtggctgttaaggagtgattcatgtttacccataattagctgggcaaatattagtttcagacttttaaaaaaatagttttggacctcctcttaatgcgtctgtactttgggcaagttaattaattatgagtatcactctaggggaaaaaaaaacatctttatcatatgtttcactatcccaaagcttgctgcaggaggcagaaagtaaatctgaacttagtcagaacatctctgcccgggaacattttgtatttaccgatattgatggccaagtgtatcatctcactgttgaaggaaactcagtaaaagacagtgctcggattccaccagatgtgagtacaaccttgattaaatcttcatcaagaagattttgttttgttggttccatatccagtgaaggcatagttaagttggaaacttcagaaaagcctaatgtaaataaactttatttaaggagatattatcgattaaacttgttccatactgctagagaataacgctgtaactattttgattaaatgtttactgtgtgctactcatttttatccctgtaataatccatgaggagttatctccattttacccataacaaaactgtgggagaataagtaactttcccaaagttatccagcttactcatatggcagagcagtgttttaaactcaggcctgtctgacttcagtatctgtcttctttccatttcaggcattaccctgaaggatttgacttacaatctagtattatttttggataatagtaatcaggttgtaagtgtaatagtattattaacatttactaacttacatatattcttatggccttgtggaatctgtaactaaagttttgccattaatcatttgtgtcagcatgcatctcatagatagtttttaatagatggatcatgaaaatgtttatgttaattaatgcaggctattataatggttaaatgaaggcatgaggggattttttaaaataggtatatttattttaaattgctatctaaaaatggaatgctctagtagaatgccaacccccataattttataggtggctttggggtctcataaagttacaatctagatgttggctgtggctacagtcttttgaagtgtaatgggacagaaggatctatttccaagttggctgcctcacaggctattgcacattaatgctggctgttgacgagggaccttagttcttcatgtcgatctttccataaggctgcttgagtgtcctcacgacatgacaactggcctcccctagagtaagtgatctgataaagcaagaaggaagttgcagagtctattatgacctggtttcagaagtctcttcaaaggcaacttcttaattaaacattctattttatggctaggaaagtagatatcttaaaatgttgcttcatattatatacagaatttcatttctttaatatttttttttattaatggactttattataatattgatttttaaatccagtttttgttttgtttcttgactattaccagagtttttacggtattcagtgtgtgtgctagtccactaatggtcaattattcaaaccactagagttttcttactttttaccatggataccatttgaatttttatgttgtacaataaatgcaaaaataaaatttcttttaataaatagagaagtaattgagcagtaatattatttaatagctaacatgtattgactatttactgcatggcaggcattgctttaaggcctttgcctttataaatttattaatactagcaacaactcaagtttcatgaacttaccctactttatggacaataaatccaagacagaaaggttaagtaaacatgcctcaaatcacataccagtttcaagctgggattcaagcccaggcagtgtgactgcagagcccaggctgctgagccctccatgataccacctctgagcatctattagaactgcaagttcctttcttcctccaagttagattgactacagcagcatttcattcttatgttgtgcttctatatgtaacttctgagcaaagctttctgtgaatttaaactgcatatgcctttagtaaacagcatctcttcaccttcatgattccacaatgttccaaaacgtgtcagtgaagctctggatccttttttcaatagaaaaatcacggcacaattagttataaaagagctttaagtttcccttggaatggatttagttatccttttgcagtgagagataagtttgagttggctctctggaaaaccttccctttacttctctgtttttcttactttaatttcccccttttttttttgaggtatttgttcctcaaaagacatcccctctctttaaatctagttccagtaactacttaatgtctatgaagttgaaatctcctatttcttcatagttgaaattgataggcaatgtagctctttgttagtgtctaaagtctgttttaggatttgatgactaaaagcatactaaagcacagccctttaaattaagttttattaaaatatttattataatgtcttatacagcatagtgaaatttatatttgtttgttgctgttgttttctagggaagtatgggtagtattacctgcatcgcttggaaaggtgatacattagtgcttggagatatggatggaaatttaaatttctgggacttgaaaggcagagtatccaggtataagccaagaatgaaatcttgttatttcattaaaaaaaagaaatgaaatctttttgttttgttttgttgagatggtgtcttgctctgtcgcccaggctggagtgcagtggtgcaatctcggctcactgcaagctctgactcccgggttcatgccattctcctgcctcagccacccgagtagctgggactacaggcacccaccaccacgcccggctaatttttttgtatttttttagtagagacgggatttcaccatgttagccaggatggtctcgatctcctgacctcgtgatccgcccacctcggcctcccaaagtgctgggattacaggcaggagccagcacacccggccaaaaaatgacatcttgatatggttccattagaggcttgtgacttggcaagaaggatcagtaaactcgtggaggtgtagcttggacccttgggtcccttcacctaaacttgggaggatgggccttgagccaagcattcttaggagatagttatctgcaagtggcccctgcagaagtcttagctgaccttaaagggcaggccctttctgtcagatgtggcccccagtcccagcaagtaaagggttctcccatcatcagacctgttagaaatggaaatagtgagagatgttagacatagcttctggtgaccagatctcactctacattgtattgatgtttttgtttctttgtcttcagaggaatacccacacaccgaagttgggtgaggaagattcgttttgctcctggtaaaggaaatcaaaaattaatagcaatgtacaatgatggagctgaagtgtgggatactaaagaggtaggccctctccatgaggataaaacgtaaataaattgttagccataggaactgtgctttgttaaaaaacttctttctgatttagaaatgaaaagtacttaatgagttcgtcaagtttcccataacaaattattttctttactttacagtatttgtgttctaaaggtaacaactcaagatttatttatttatttatttatttatttttattttttattttgatatggagtttcactcttgtcgcccaggctggagtgcaatggcgcgatctcgacttattgcagcctccacctcctgggttcaagtgactctcctgcctcagcctccctagtagctgggattataggcatgtgccaccacgcccggctaatgttttgtatttttagtagagacagggtttcgccatgttgggcaggctggtctcaaactcctgacctgaggtgatctgcccgcctcagcctcctaaagtcctgggattataggcgtcagccaccgcgcccagccgatttatttattttttaatattatcactgtctctgagacctttaaaatgctgcctatttgtggaagatagattgccagaggctgttcagttctaaacttgaactgggcctttgccacagactgtcttccttgaccatttaatctagaataataaagatcttccttttctgtctggaagtgatgcccaaattcactcttgaaggttcagatggtgagcagtttaagaagtggcagaaatgtgacctttcgtatattggatgtggactggtgtacgtcagataaagtgatcttggcctcagatgatgggtgcatcagagtcctagagatgtctatgaagtctgcgtgctttagaatggatgaacaagagttaaccggtatggaatcctaatgatagggggctttgaaacctgtctttactttgccacaagctcttgtattttggggagagagctgctgcttctgtttcatttcagtcttattttcttagaatctgagtttaagaaaatatattaacttgaagcttgagtgtttttactgctgagatgctgcaatctttgtaactatagatgtcaatcattctcaattcaggttttttaagtgccccttttgactcttttctttggtttgttaacaagataaaagatgtttatgtttataaaaatggcttactcagaatttaggcaaactcatcagaggacataaatctagtgataaggctgctggctttttaataatggccttatgtcttttgcaaccatatatcattgaaaagtcactttagaaagtgttctgagtattatgaattttgatgccaatctgtgactagtaaaatgaccagtcaagcaaattagcagattgcagtatcttgctctgttttgtatggttgttttgacattgctttttaccagaataaaaagcattttagtagaatatactccatatatgacttctaaaaaaaaaaagaatgggacaattgtgaatgcatccatttatcagtttaaaaggcagcttttggctgatgcaatacagtgttcatccttggaagatacttgatcctacttggagtggaggagggaacttcttgcctgagtattctcccagcaaaactttggtgcacactctaggctgatatgtagaaaatttcatgagacttttctgaacctttgtagagtcaatatttggcacttcagacacagtaaggttttaaaaacctggtttttcactttgtgttcatgcttgaggcactactgagttgctgctaatgttagcagggctgcctttaacttagttaggtatgctttggtttttgtcactgcccacccctgcccactgcatttgggcaccaccacttcttactatgtaactgactgccatcaggtgaagccagaattcaagacctacattcccatgtctgtccttgtgtcgtttgccagctctggggaagcaccaggatggcctcctaggaaagggcaagcattggtattcattttaaacctaaaggtattgaggacattgaaggaacttcaagggtggtttttgaaaaaattggttactaattctagataaagaagtgtggaactgctatctaaatgtttgaagagcttttccttcacttttaatataaaatttgaatctaaaaagctccaaagtcaaggtgtagcttgttcttaaattaaactgactacagaaatggagtccattgtattaacccatgttcaataccatacttgaacatctggcctgtggccagattttagatcacatgtttcttttaaaatttttctgatttttttttatattcttttcaatctctaatgttacagcctcagccagaaagagaaaactaaatagcaattgggaaaggtcatgcaattgtgtattcattccacaaattgaacttcaaattcagaacaacccttaataaatgttaaagaatgaaaactatggtagtgtaaatgtggagtgaggaaaaagacatctgtgtgttcacctccagattcatggccgatttggtcttgaggaaaaaaagtttgaggtagtatatttctattctgaggaattagaagtatatttggggcttactgacatgggataaaaataaaataggtcctaacattggtgtttcctatgttttcttcaattctccttgaaaacaagtagagaacgtaaaatattgattcacatctgtacattttcttagagcagcttagataggccacttcttcctccaataaagagggggcagtcagacaaattagaagattagaattcctgtttttgagttggagaacctttcttatcggctgcctaatatgtcagggacacaaagagccatcaaaataaatcttaatagtctttttagcagcatctaaaaggaatgcaagaatatgagactgtttaatagcattctggtatcatgcagtttccacaccctttaaatagtattgacttgatatcagggactgttcaacctaatttcctccccagtgttttttttttttaattttattattattatactttaagttttagggtacatgtgcacaacgtgcaggtttgttacatatgtatacatgtgccatgttggtgtgctgcacccattaactcatcatttagcattaggtatatctcctaatgctatccctcccccctccctccaccccacaacagtcccaggtgtgtgatgttccccttcctgtgtccatgtgttctcattgttcaattcccatctgtgagtgagaacatgcggtgtttggttttttgtccttttgatagtttgctgagaatgatgatttccagcttcatccatgtccctacaaatgacatgaactcatcattctttatggctgcatagtattccatggtgtatatgtgccacattttcttaatccagtctatgattgttggacatttaggttggttccaagtctttgctattgtgaatagtgccgtaataaacatacatgtgcatgtgtctttatagtagcatgatttataatcctttgggtatatacccagtaatgggatggctgggtcaaatggtatttctagttctagatccctgaggaatcgccacactgacttccacaatggttgaactagtttacagtcccaccaacagtgtaaaagtgttcctatttctccacatcctctccagcacctgttgtttcctgactttttaatgattgccattctaactggtgtgagatggtatctcactgtggttttgagttgcatttctctgatggccagtgatgatgagcattttttcatgtgttttttggctgcataaatgtcttcttttgagaagtgtctgttcatatccttcgcccactttttgatggggttgtttgtttttttcttgtaaatttgtttgagttcattgtagattctggatattagcccttcgtcagatgagtaggttgcaaaatttttctcccattctgtaggttgcctgttcactctgatggtagtttcttttgctgtgcagaagctctttagtttaattagatcccatttgtcaattttggcttttgttgccattgcttttggtgttttagacatgaagtccttgcccatgcctatgtcctgaatggtattgcctaggttttcttctagggtttttatggttttaggtctaacatgtaagtctttaatccatcttgaatgaatttttgtataaggtgtaaggaagggatccagtttcagctttctacatatggctagccagttttcccctccccagtgttaaaggccactgctaagcacatttttcctaagtaagcatatatagaaagaagctttctgaaatcagatttctgcacaaacctttcctcttcatctgccacagctttccacagtcattttcggtaatcttggggcattcagaaatgtctcacaatgacttgccgatgtggggaggtctggggatgctaaacaacctggaacgatctggcgcaatgaagaattgtcctgccccaaacgccagtagtgttccttagctctctttttcaccgttcattgaatcacactgaacaaaatcacaaaatatggtcctttccttcccagacttccagctcaccttaatgttgccatttccaagtggtggaggaataacttttttctactgattttcttcttggctctttgcttactgattttctgcattcctgtcatgtaggtagctaaaaacctgggtgttatgattcatacctcacataactttagcccagatggagcagaatccgtgacaaacagcaatgatgctaactgcttttgcattctaattgtgtaattttcagaggtgaatgagctcttgcatgtgagtttctccagatgtgagatgatctcctattactttttcatggctgatctttacctttcagaagaaagatttcaattcatttgagggagggaagtagttaagggtcactttcagtttgttcatgctcattgggatgctgtcaacaatattttgcttttggagaaataacatatttgttttaaaaaataaggtatttccctccttttattcagacttggtaaatgttgtcttgcttgcatgatgtaaacactcgatgctgccttctacgtggattctcttgtatcttttcgtttgttcattgattaagaaattaccacacagcatgagaactttccctgaaccattccaagattattatgtatagttaatttttttccctgacatttaccatttccaaacatactgtgatataataccaacaactatctacatgaatctacctaaaacatatacatatgctatctaaaatatgaatggggctgacttgagaattatatagattgtcgtctatgaaggatgaatagaaagaaagttaagtaagctagccacctgcatccctttcagtgttaagtgttcagtgcttctgtaggtagttagataagcctcatttttccaagatgcaatccttcctttatagcccagatgtaaaagaaaagatgactaagtggaaattaaaaaaaaaaattcaaagcaaaagaaaatctttaataagaataaacgaaagtgttcaataagcaaagccaaatacaaatgattacctggaggaaagtaattcacaagtcacagactgtctacagaggggcaaaacagataaacaaatgatgcttcaacatatgaaatgatactcaactttatttataataagaaaaatatttgacctcctactggtaaggataaaagaagaaaataattttaaaaagtaaatttttaaaaagagaaaaatacaaattaaaattgtttcttacctatcagattcaaaagcttgaaaatatactctgttggcaaggctatgaggaaacaagcactctcatccattgctaacagtaagatccctataggaaggaatttggcaatatctaacagagctacatgcacatttacctttttacccagcaatcccagcgctaagaatttatcttaagatgtacattcataccctgtgaccaaaatgcacacaaagttattcatagcaaaattttgaaaaaagccgaactgcttagccgtaggagattggttgaataaatctggggacatctgcagaatggagtaatctatgcagctgtaaaatagtgaggaatagctctgtgacctgatgtagagtgatatccaggatatgtgtaagtgaaaaatgcaagtgtaaaagagcacgtatagcctgcttgtgtacaaaggcggattttatacataggttcatgcacacgtttgcttactaaaacacacaccacacatacacagaataatccagaaaccaatgagaatagttagaagatgtagatggaaaaatggagagtatggggatagcagtgaaacttctctatctttgttatacagtttcaagttttgaaccatttatatattttatatattaaaaatacacagtgaaaacaagagtgaagaaaaagcaaaccctaaaattgaatgcaagacacagttgaaccaaactgtgtaacaacaatattggtaacataaccacacacacacacaaaaacagttcaaataactaaaacacagaacttcccattcactgcacacctttagtggtttatattctaaggacagaattgctaaggaatgttgaactttaccggggtagttgatggtgacactagtaattctgaagctgttttgtgcatgttgtagtctggaacacattagtaaccaaattgcagttttggggagccaagatctgtgctgatagaaagggagatatggatgggaaatggcggtggtgggaagaaacattccaggggtggatttgggttggtaaaaaatcatgacttcttgaacatgtatgttccctggctctgctcacagagagttttcttgcaatgacactcaatggcagtgagcgcacatagcacccagattttactttgcaagttccatttccaggctaaaaggagccagagctctttggacaaaaagtttatttcaggacagaggcacaaaaggtgcaagatgggtctggggcatcttgtggtgccagaattcaagtaaggaattgaaaaaccaaggaggacctgacataagaggcttctcctgtcaaactgggggtagtctgagcatcacgaaaactaatggtggtattgatgtaagtgcagaataccaaagaaaccctcactccatagtaatagtcacagtaaggaaacgggaagtgggcaagaagcaaaagctcaggtggacagaagaatgccagctgacaaatgcggaaagaataagattagaaaatcaccactttgcagccccgatacaataattaattgtatacacaagcaaggatcacttgtggatgtcaaatcactgagtaaaaggatgtttgagaataggaaattcaatctgacaatatttcctccacatattacttactaattaattatacagtggagaaggtgccctgataagagctctggtgaataccccttatctagatgatcagatttagtgtttcctgtaaccagacagctaacatgttccttctgatgcaatgcagtgaaaagtacacagcatcctttgttcagactctgtcaaaaatgtttaacccgaatctgataatcagaaaacagacaagttagaacgtagggcattctccacagcagctgaccaggactcttcaaaaatgaaaaggtcacataaggccaaaaccaaaaaggaagaggaccattctagattggaatagactaaagagacatgacaatgcagtgtaccagccttgactggacccgatttttaaaaataatacagctgccaggacatttggggaataacaagggacttttgaatttggactgcattttaagtgattttactgaatcaatattaaaattcttgggtgtaaaaaaaaagtattattaaaaatatttccaatcactttctggcttttaaattgaaaaatccacataaaatattttgtgtataatttaatttttatttaactacatagaataaagttttctaaagcagagttttccaatagaaacataatgtgagccacataggtaagcttaaattctagtatccacattttaaaaagtaaaaagagatgaaattgattttaattaaaattttatttaagccaatatatccaaagttttatttcaacatataatcagtattaaaagttactagtgagacattttacttttttaaaattattcattcttcaaaattctgtcagtattttacatttattgtaaaatgaattgccctcaaaatttataggacaaattttcagcacaaacagttaagctctatttagattttataaaattttcagttgaaaaagtaggcatgtattcaagttgtttcaaacatatttaaaagttatccaatgactgaatcaataatcactttttaagtttaaattagacaaacattcatttccttcattatactagccatatgttaagtgactatcatattggatatcatactggataattgcacagtccagagttgatgtggatcactgatacgatttggctctgtgtctccacccaaatctcatgtcaaattgtaatctccacaggtcaggggaggcagctggtagggggtgattggatcatgggggcagatttcccccttactgttctcacgatagtaagtgagttcttaggagatctgatggcttaaaagtgtggcacttgccccctcgctggctctctcctgctgccatgtaagatgtgccttgcttccccttcaccttctgccatgattgtaagtttgcctccccagccatacggaactgttgagtcaattaaacctcttctctttataaattaccctgtctcaggtagttctttacagcagcatgaaaacagacaaatacagtcacttaaataagccaacaccatgtataagtttgtgtcattttacataattgtgtctattcaagggatccatggataaagcctcttcaggattctggaggggagttggtagtaaggccaagttgtaaaagccagggcacccctagaaatttggagctaaggtcgagtccgatagagtgtagggtggtcagagcagagctgctgggcattgcagcctttaggtcttctgcttctttgcactgaaacatgttgacaactaggcaaatcttgcttgttagtgttctaagtaagccagctgctggatgtgggggatgctagggcctagagtctaagaagatagcccctgtgttcaacagctacctttataagtgagacctgggaatgctagtgatcacaggtggcatgatcccttcagtgacatactcaaggttgataggccatgttagttgaatagtctcggaaaaacaaaagtacatacaggtaaatatatttatttttaatatttaaaaataatgaactttgttgctatttgttgaatcattgcattgaatcctttattcaagtagtaccagagttgtataccacacaggatacttaaattttaaaggggaaaagaaggccgggtgtggtagctcatgcctataatcccaggactttgggaggccaaggtgggcagatcacctgaggtcaggagtttgagaccagtctggccaacatggtgaaaccccatctctactaaaaatgcaaaaattagccaggcatggtggcaggtgcttgtaatcccagttacttcggaggctgaggcaggagaatcgcttgaacccgggaggcggaggttgctgtgagccgagatcgcaccaccgcactccagcctaggtgacagagcgaggctttgtctcaaaaaaaaaataaaataaaaaatcaaaaaagggggaaaagaaaaatatgttaatcagatttgaatgcagagactctctctgctcttggcttgtgtttcctaagcggtgactacattgaatatactctcagttgttccagatttacctgttgctctctgctgactgctctgtaaatggtttatagctgaagcttcactgtagtataaaacttcattttatttttaaaaacctttctttgttgtctagagcctgtgtggtgcccctatctccttgttccaagggcctctcttgccttgaaagccttcttattacaccagccttggaatggacagtattctttggacatttctcatgtgtaagtttttcacttttctttttctttcataatttacttggggttgaaagacacccatgaaagtcagccatggcctgtactccagcatttaaagggaatggagcctttaaagccgagagaaggcagagacactacagaattgccaggctgcctctgggttctcgggcctttgtggaagtgtgggtcagtgaggagctgtgagggcgtgtattgctctcaggtggctgtgtgcttgtcttatggtctgaacatggatgtgtcgtgatgatgaaaaggatgcgtgtgaagagggcaatggaaggcaggagaatttggagccgggcacgttctttttaaaagcagcatcattagcttcagggatatactgtgtcttaaaaatctcaatatttgcctcattgcaaaaaaatattcacagaaactattagtgtttattaattaaattcacaaatattactgaactcctgccatgtgcagcacggatggaggatttaaaaataatgccaggaagtgtctgttctccaagcactgtctcctcagaatattcattctgcagagctctaaatgagcagattcctttagtaacattgttaagttcttcattaaaaggaatctaaacctgatagattttaaagcctgcttataaatttcctggtttcttgaaagccaaggagactttctttactcattttcttgtttttgactcaataagataaaagcagatattaaagttgattggtggggtcctgagtagattgttgttattttggtctataaccaggtttctaaccaagaactacgaagaaggttatctctatattaacacaacttttttcaggtgaagaaatacgtggttttaagtgaagagataatgaactcattcaaaattttttctttacagtgactatccagaaaatgaagaaataaagaatctcctccaagaacagttgaattcattgtctaagtaagcactccatgtttcattagaagataggaatatgagaaagaaaaatgcaattcaactttaaatgcaattcaaaattaaaataagttacgttttagaaaatattagtggcccaagaagagaccattctgtttagaggtttgcttcccgttagagtctgtgttttgcagaaaaagtacttattcagtagttacagtgacagagcatctgtcttcaccaagttcatgagcaccagctgctctgatctcacatcaaggcaggactagatgcatagtgggagcatccttgtagctcagcttgcctctactacaaacctccatgaagcctcacagcgggagacgaatcgcagggtgattctgggtctgcttcccgcttctaaaatgagttctctgtgtcaggtgctggtgtgcacaggtctggctaagaaattaatgtgctccctagagccaagggcatttaacagaatgtactgggaataagaaaggaaaaaatatgggtctacaaggagttcttggggaaagcgtaacacatttttgcaatctagaatctgttacatataattatagtatttaacaaattaagcatgatattttattgacggaaaattcaaaataattagttttttctatgcaaagattaacatttatgtttaaatgggaaactatagatttaaagaatgtcttcctttctgatttgtgaatattcagtattttactattttagaaatacgaacttataaaagcacaagccattcttccttagatactttatttttggaatagtttcagaataaattacgaatgtcatcttctttaaagtatttactgttcttgatgattttttcaacaatggcattcttgttccagtagttaggcagctaatactttcaaaaactgttgtaagcctataaaccagaaatgagagcgctgcagctccctgtggtggctgaaagctgctgcttctccaagccttgagaacactctcagcccccttcaacttttataatttcagggtcatggtaaagtaccttgtcttgtgtaaattctaaacatgttatttgactggaatttttcatttcaagagtatattgatcaacccccatgctttattgtttgattgaaaacttttgtctcacttttgtccggatttcttccacagtgacataaagaaactgttgcttgatccagaattcactctcttgcagaggtgcctgcttgtttcaaggtaatattgtttgatgtattctgtataagagacaggatttcaagttaactcatttcttttaagggtttttagttagaaacacttagattttagaaaaatgtatcagttcatcctttagatttaacttaaaataattttgacagtagtaataacaaatagggaaaaatcaaattgcattttaaatgtgagatctaggccttctctctggaaagcacttcctcctacagctttttaaaatatgtgttttaaaatatcagatacaggtatatttaaatataccaataaattatatttagaagcgataacctctatatcctgacttacagtagagtttgtcacttataaaaaagactcctctccccacagaataaatagcacattactttcataccttatctagccagttatcccagaggaacttcttcctaatgtgaatcaatggcccacattgaaaggtgtgctaatggcaaaccaggtaaataattgttcttaacacagaacagaaagatgctggagtctgaaggggtcctgtgcagtcaggcccccgtattgttgaaggcccagtagcagggcaggagaacttgctgcctccccctttcaccctgtcaggccccatgccagtatcccagtggatatgtgacaacactcccttccagtccctcagtctactctaggaagccatccaggccaggtgtgctgagtgcagtcaaaactttgcttcatccttgccaggctctatggtgatgaatcggagctgcacttctggactgtcgctgcccactacctgcacagcttatcccaggaaaagtcagccagcacaacagctcctaaagaagctgctcctcgagacaaactgagcaacccactggatatatgctatgacgtgctctgtgaaaatgcctactttcaggtagtctgcttcacacagcaaaacctttagagctgtcatcttgattacttatatctttgtcaatatcttaaacttgggaaactttcaaactaagttactgttcagtaatagaaataagcccttgaaaattagctgggtgtggtggcacgtgcctgtagtcccagctactcaggaggctgagggaggagaatcacttgaacccaggaggcggaggttgcagtgagctgagatcacgccactgcattccagcctgggcaacagagcaagactctgtctccaaaaaaaaaaaaagaaagaaaagaaagaagccctcggtacatttgcattaaaaaaaaagcctgatcaagatttgaaaagctcatagacagttactgcgttgtttactaaacattaaaattttattattaaacaggcttgtttaatttgtcttacatttttaacttggcttcattttaattctgtcattaatttcctataaataacaaatactttatacacttggtttgaatttgctgttcacatgataatttctttaacctcctgcagaatccttcagtgcacataggtttttcatccggctctacttaagtgtcagtttctgtaggcaggcaggtatgcatccaagtgataatatctatcaacatttttgctgttcaaattcttattaaatgtttggggtgctgtaaagttgattatctagtaacctgaaaagtcaaagtagtttattaaaatgatcttattaagtacagtaaaatttaaataattccaaactcttataatccaggcttaatttttcttttttttccaattctagaaatttcagctagaaagggttaatctgcaggaagtgaaacggtcaacttatgatcatacaaggaaatgtacagaccagctactgctcttgggtcaagtatgtcagtttttataactctacatgcttcattaaattgctagttaattcgtatttcagagcaatatatctgtatgtatatatttcataatattttccccttgtatgtacctccttccctgtagacagtttaggctttctttcaaaataataccaataaacctcatgagaaaaaacatatggttaaccagcttgtaatttagacttccataatgcccagtggagcccagctatttgttttgttttgtttttgtgtctgaattgactggtacaaagctaaaataggcaattactcgagcacctagatacaccagcctctggctttatgtttgtctcaaaaaagtagtgtagcacctctgtttaatgtttgtatttgtaaacaaaatattcaattgcattttttgaaaatgagtgttttcctttagttttctaccttatgaattttaaaaagttatgttggaggaaaatgttctcataattagaaaaaccgtttctcttactagacagacagagctgtgcagttgctgttggaaacaagtgcagataaccagcattattactgtgattcactgaaagcctgtttagtcactactgtcacctcgtcaggcccctctcagagcaccattaagttggtggcaacgaatatgattgccaatggcaaattggcaggtaaggcacacttgatatgtttgtcatctctctgaaaaatgagaccttgttcccagcaaagtatctgattagtagggacatttctttctcttttacatatgctgaagaaaaatagaaaaattattgctacctataaatcagatgaatataattgtctaaaccagaattaattgtttacacttttcagagtgaaagggggcactgttaataattgctgagataataggcataaatccaacaatcctaggcaaatcagaacaataaaacctgtgagagaactatgctctccctacttattctccagactgtattgtgcttcctaccctggttacttgagtaataacagtaaaactcttaatattatgtttcagaatttaaatcaagaatgtcttcagtaggtataaaatgggcacgactagataaggtcaaatggggatttaactttttaatgacttctcaaagaaggagctgcagtgtcacttaaggggatgcgcttttgtctttcagagggcgttcagttgctctgcctgatagataaggctgcagacgcctgccgctacctgcagacatacggcgagtggaatcgggctgcatggctggcaaaagtaggtggttccaagtttcaataggtgccctcaacattcgggatagaaagctcagtcctgaactttggacttatgacttagaaacattttttggcctgcaaagctgctttgcaaatactgtcttggaacctttatccttttcctattctttatgagtgtaaattgcattacttatttaaaaatggatcttgcattggtagcaattaagtaaaagcagctgcctcctctttctcccagagtctgagccgaaactacagtccagaggtatagccaggccctgggtcccgtaggcacagaccgttatcattattcagagtatgcagcagcttcagggcagtgtgctagtcaagcagagcatagcctgtatttcatagaaacagatctcactttaactgaattattattttttctttatagagtgcaggatgtttttgttgttaacacaggcgtctttctcaggtccgtttgaatcctgaggagtgtgccgatgttttaaggcggtgggttgaccacctttgttctccacaagtcaatcagaaatcaaaggctctcctggttctcctctctctgggctgcttttttagcgtggcagagacgcttcacaggtaaaccgagagttcacatgggctgctcaggcctgcccgtgagcagtcacttcatgttctctcgcggttctagcaggtcatggtactcgatgtgtaaagtgaaaggagaagtatacatttcaggtttgtcaaaaaacccaaaggagaatggaactgtccgtattcattacatcttcattcggtctaggagctatgctagtttcctactaatatgctgatcagacttaacaggcacctagtaaaagggaatttaaaagtcttcagagaattggggtccattcagctttgactagagcaactgagaggaggcccagagagcagggggagaggcgacagaaggcatggtgaggtggagacatcccgtctgaaaatctggaagaggaacaaccatcactaattgtggagcatttcatttattcaaaactaagggaggtagattacggaaatatgacaaaagattacttgtcaactctggacaggggtacatgggcacttgtcatatctctgtagatttttgtgtatttaaactatttcacaattttttaaagtattaattttaaaaagcttgtgtttggagatgtgagtattcttccctccttttttcaacaaactagggcttagaaaagtgcttgtatcttaatgcagtatgcaggtttccagggaaaatgtgtaaatgtctttatacccttcgatgctgctgcccaccagtgatgtaaatcacaaagcataactcttgttttgttctgttgagcagcatgagatactttgatagagcagccttatttgtggaagcttgcctcaagtatggagcatttgaagtcactgaggacacagatatcctttgcaaggttgtttgtagtgacgaggaagaaagtgacatgcatgggttttggaatttcccttagttgtgctgcctggacaggaactatattatattgtgaaagatccatgttctgattttctgattcaccaaagccaggaaagagggagaaattagaggacaaagaatcagataagaaggtggctgcaccatgggtgtcagctttgactaggatggagggaggcaggaaggactatagaggacagggcccccaagtcttgtctgaacttaaaaagaagatgaaggaatgatttgggaaacaggtagaaggacctggtactttgaaatagtactttttcaagaccagacattccatggaataaattttatatatttatctagaaaaaatatactggaataactaaaaaagtctcacgatcacctctagtgacaatatgatatgggacaaaatacagcacttaaagagaggtgttgctcaggccagccactataatccacccatcagccagaacattttatttcttctaaatggcacttgagcaacattggtttctttgaaaagaatgaacttgagaatgcaactcccaggaccagaaaagaatgaaactgggccagtgcttgcatggtcctgctgctgctcactgcactttgcttcaaattcttacatttgctctcatttctacatggcaggtacttggttctctctctctttctccctctttctctgtgtgtgtttataatttttttttttttttaacagagaattaaaactaaactaaaaattttttttttcctttttttgaggtaaggtctcactcttctgcccagactggagtgagtggcacgatcatggctcactacagccttgacttcctgggctcaagcagtcctcccacctcatcctccccagtagctgggaccataggtccacaccattgtgcctggcttttttttttttttggtagtaacccgggtctcactatgttgcccaggctggtcttgaactcctagttcaagcagtcctctcaccttggcctcccaaagtgctgagattacaggcatgagccacccagccctgcactgaaagttttttaaaattaaactgaaggctgagcctactcaagatcatgtacctagtcactgggaaggtgactggttcagtgtatgcattttgaggatcaaagcatcagcacagagtacccaataggctgtttaaaaaaataaaaataaataaaaaaaaaccaataggacagggctttctaaaaacccaacaaccagatatagggaacattcagaaataaatatctgcccccaaactgccagcctctcagactttcaaatggaatgaggatatgcaggttaagtttctcctctcttatcattcatcttccaatcttcagttgagtgtaggttatgggaggatgttggttgggtcttctggaaggagaagctttggactcagctggtacgaaaggtaatgatggtacagactgagacatggcctactatggccgggaatcaccctctgcccgcgaaaagtctcctgtgttcatcctgtgctgcccgctgtggacaccaggtcccttccgagcagccagcagagcagacgcgactcacccttcctgcttctgggagcctgtgaagagtctcatcacagccctttttactcttcttttccttaactatggtttacagaaactcatcactgctatatatgcagattatgcccggagtttgaagaacctcggttttaagcagggagcagttctctttgcttcaaaagccggagcagctggcaaagacttattgaatgagcttgagtcccccaaggaagaacccattgaagagtgacagcttaataaatgccagggaatctgacctggaaggcagatgggagggggctggtctggctgtggccaccgtcacagtccaggatgaagaggagtacagggtcctgtgagctgtttgaccactgttctaagactatgtgtgcccaaaagcacataagcatctatgttgagagtaagtttgtatcctgcgttggtctcagaaagaacgtgaatgcttaagattttgaaagtacataatattttatactttgggagagagctttaagagtccctggaaatactttttaatttttttaacttaaaattcaagagactgaatcacttttctcattgattaaatgtaaagattattgagaaacctatagtaaatgaaatttgtgagatgttttctcaaatatatgctgtgcctgtacttatatacagtctttcaagagagatacaaacaaggcagaaacatttaaactagtatt

SEQ ID NO: 15876 - DNA, 50132 bp, Homo sapiens
atggcggccgtagggtccggaggctatgcgcggaacgatgcaggggagaagctgccctctgtcatggcgggagttccggcgcggaggggccagtcctccccgccccccgccccaccaatctgcctacggcggcggacgcgactctcgacggcctccgaggagacggtgcagaaccgggtgagaagctgctcgccatgtctaccccagttccaggcttcctaggtttcccctagtcccgtcctgagaactgtggccccgacatcagcccccggccagtcccctcaggttgttccctgccatgcctcgtcccctaacccccgcccctttagccacggcccctcccactttctcctcgctgctttcccggctccaccctcagcgttggagcaattcgggggttcctcgctggttcccacccgtggaaatgcattttgcttctgtaaatcacagcctagtcctgctatattttaacccccgttctatcgcctttagacgtcacgatcatagctcactgcagcctcactgccctggcccccgctgagtcattaaggtcccttcgagggttcggtccagagtgttacctgccccaactcttcctcgcttctaccccgccttctctcaccttctgcgatctctatcctttttcctcaccaaggtgggattcttaatccatattgtcactcaaaactatgagaaagacgtgagaagttatttataaaatctctgcagtgctgcctggggaggagggcgtacagaacagttccctaaatcctgagacagaaaaatggaaagaaatgatttcacagtaggtagaaggaattccattagcacagcggcaattaaaaaaattgttttccagctgtgtaggcacaaaatctgtttttataaaatggagatgataagaaccatactactggtagggcgcggtagctcacgtctgtaatcccagcactttgggaggccaaggtgggctgttcacctgagatcagttcaagaccagcctggccaacatggtgaaacccgtctctacaaaaagtagaaaaattagcccggcatgctagcgcgcgcctgtaatcccagctactcaggaggctgaggcgggagaaatcgcttgaacctgggaggcggaggttgcagtgagctgaggtcatgccactgcactccagcctgggcgacagagtgagactctgtctcaaaataaataaataaataaattatactattgcattggagggaaatgaaattttaattgtgatcttcttggcacggagtccagataaagggaggatacctggtagctgctggtggagcttgttcctgccccatgactttctcctgcactgtgattataccgcccactcctggctacagggctctggctgtacctcccatgtgctctctgtcaccaaggttcagtcacactggcctgcttttggttttcctgaggctccatattcttttctgcctcctggcctttgtgattggtgagtcctcagcctgggctttttgctgcaatctgcctgtctggctccttcccatccttcaagtctcagcctgaatgtcgctatcttgaaaggccttctcgaaccccattctaaagcaaacagccaccttcatctgtcacccagcaccctatacttcatagcctttatcttatatgttcctgaaagtgccctttgagctattaaactacatataacaatagcaaattcagagaggcgttatagcaaagtggctaagagcacagactgctgctgatggtatggttggacccaggcagcctgagcttaaactttagtcctgttcttcctggcaggttatgaacttcgctttttcttttctttttttttttttttgagatggggtcttactctgtcatccaggctgtagtgcactgggttgatctcggctcactgcagtctcagcctccctgggctcaggtgatcttcctgcctcaagcctcctgagtagctgggactgcaggcgcatgccaccatacctgactaatttttttgtgttttctggtagagacagggtctcgccgtgttggccaggctggtcttgaattactgagctcaagcgatctgcctgcctcggcctcccaaagtgctaggattacaggcgtgagctactgtgccccgccaagttatgaacttatctgtgcctcagttttcttatctgtaaaatgagaataatgatgtagaaatctctcatagggtatttgtgaggattcaatgaggttacatatcctaggcacttagaacaacactggcatatggcaagtactctattcatgttagctaatactgatattatgactgtgtatttggggtaatatttatttattttttttgtttggcagcacagagttgatctgtcttgcaaagacctagtctaaaagtgaccattcataccagggcccagtaatgctgatcgacagataagacaacatgagtgccatggcttggttgtttgtgttggaatcctggcactaccccttcctggatgggtaacccctcttggcctctgtttcctcaactgttttgttcctttttttttttgagacagagtctcactctgtcgcccaggatggagtgcaatggtgccatctcagctcactgcaacctccgcctcctgggttcaagcgattttactgcctcagcctcctgagtgcctgggattataggcatgggccaccacacctgactaatttttttgtatttttagtagagacagggtttcgccatcttggccaggatggtctcaaactcttgactgagccaccacacccagccttgtttaaattttaaatattactgttcatgtggttttttactcgttgaaaccgctcaaatttctggactgtgaatctgatgtggggaaactgtctacctttggtcactactgtgtctctcctgtacagcccaaagtgctagctttggagccagactgcctgggtttgtatatcaacattgccacttgcagatgtaggatcttgggcctcagacttcttacctgtaaaacaggggtgataatagagccttcttcgtggcttgttgggaggattcaagtcttttatacatataaaagtactaagaggccgggcacagtggctcatgcctgtaatcctagcactttgggaggccgaggcgggtgtatcacctgaggtcaggagttcgaggccagcctggccaacatggtgaaaccccatctctactaaaaatacaaaaattagccggacatggtggcatgtgcctgtaatcctagctactcaggaggctgaggcaggagaattgcttgaacctggaaggcggaggttgcaatgagccaagatctcaccactgactccagcctgggtgacagagcaagactccatctcaaaaacaaacaaaaaaaagtacttagaaacttattcacaggtcaccttctcaccgcggcattcgcccccttcccctgtgctcctaacctccttatctgctttcttctctcttgcacccatcattacttggcatctatttcacatatttgttctgctccttttctatgttctacatacccatcaccagtagaatgtgagccccccgagggcagggatttgtctcttcctcaccactctgtgcttttcacctagcgttgtatttgtcaaaggaatgttgagagaacaagtgttagctgctggtggatggcgtggccacagaagctcagtgtgggtgttgaatgtagcaggacctgaatgggtggccaaggcggctgcaccatgtggtgctggctagggtgggtgcctctgacttgggctttttctttgcaggtgtcactcgagaaggtgcttggcatcacagcccagaacagcagtggcctaacctgtgaccccggcacaggccatgtggcctacctggcagggtaagcagataagggcctcgacgtctaatcattgctagggaatttggagcttggaacctgaagccatccgtaaatcgctctgagcctcatatttttcacctgtagaatgtggagaatggggcctgcctctgagagctgtggagaggattccatagccccctctctgtctagaacagttcctggcatgtagtgagtgcaatgaaagcctttattatgactacaggggggaggtgacagcgattctgggaaagacaggtgattaaagtccacgctgtggtgtcaggtaacctggatttgtgtcccagctctgccatgtatgctgctctctgagcctcttcctctgcctctgtaaaacagagctggtgaccccctctgcttgcatagttgagaagactgaagaagatgctacagctgttcattccataaatactcatgtagcctggcactgtgctaaggacgtcccctctctgggtttgtttccttatctataaatgggcctaaatagtcgtgacctgacctggcagttgtgaggatttaaaacaattacatccctctttctctctttttgttttgttttgcttttttgagacagagtctggctgtgttgcccaggctagaatgcaatagtgtgaataacagctcactacagccccaacctcctgtgctcaagcgatcctcccatcttcacctcccatgtagctgggactacaggcacatgccaccacagccagctaattttttttagtggagatgagatctcactctgtcgcccaggctggtctaaaactcctgagctcaagtgatccctcctgccccatactcccaaagtgctgggattatagccagcttaaggtcttaattagcctagggcctgacagacattacctcagaggaagtgttggtttctatttaagaacatagcaatgttaaagtgccctagaattctcagcgtaaacacctggaggagggggaggaggaggagaccagagagaaccgagggagcttgtttatttgtgggcttttctggtgggaatagaatcatcccaggaccccaacactccccacagttgaggcacattttcctctttcttcccagctgtgtggtggtgattttggaccccaaggagaacaagcagcagcacatctttaacaccgccaggtaggctgaggcctgggcccggggcaggggtggaaccaggggcttggcacgcctcccctcccctacacagcctggagatactcatgggtaggtgctcactcattcacttacatgttggctcagcagcattcgcctgtgctgggtgctgttccgtgtgctggggacacagcagtgaccagaggagacgagaatctctgctggctagagcgagacagactgtaaactagtcagcaaattacgggctgatcatgatcagtgctatggaggaaatgatggaggatgtcttcgggcaggtttgtgggcagagaataggaggaaagccttatcagaaggctcagggaacgctgccttgactctgagacctgaaggaagcgagagggtgacccataagaagctgtagggagagcgcttcaggcagggggcacaggaagggcaaaggccctgcagtggttaagaatctccggcgctttagaagcagccagggatctgggtgcctggagaaaggagcagggaagatgaggctggaccaggcagaagccacatcccgtaggccttgcagccttgtagagggtctgcatagcatgctgagtgcagagagcagccacaggagggcaccacaggccaggaatgtgcttttcacccccagccctccagcagctctattccctgctttgcttttctccacaaaatttgctcccatctctgatatgctgtccagtttcctcattgatggtattcactgtgggtctccctcagtgtgagcactcttgagagcagggactttctctgagttcatttctgtgtccctagcaccaaagagcagtatctggcatattgatggctattttctaagagaaagacttaacatgatttgggttttagaaagatcccttcagctataagtttactggggaaggacccgctcctctgccttggggctaactgatcactgctaccctggggatgtggtcccaatagggctgtgacctttggaaggcacaccatgtccctccttggcatagctcaggctcagctcctttggcccagttctccaggtggatggataaggagtgggttttctcctgcccttatggtccctaaggtacggtccttaagctacggcaggttcttgttatctgacagaagtgcattccctcttgaaagtggctttttggaccttttgctcctaactgtgggttctgttactggtgataagggcagagctgggttccattcctggctcaagcgtctattcactgtggaatctcaggtgagacacttctttcagagccttggtctcctctgaaaataaaatagctgcctccaactgggagagcattcataaggcagcagctacaaaccagagtcacacacacttgcccaatatagtatgttttaaaggttggataagtggacaacatttcaagttttttaacacaaaaatccaaatgtcccttttgtttggagaagtgagaaattctctggcctctggggcccaaattcccctgtggcagtgaggggctgagcttagtgaaatttgtcaggcccgttgtggccagttcctcacacctgtgttgcctccctaatccctgtaggcagtggagtgggtggcctggatctatagtagatggtatgcaggtgtccgcccttggccaccagtgggtgtgcattaggaggtggtgtggccagtgtggggattttcactccaactgcatatcagaatcacctggtccctgtgcctcaccgcccccccaccgccacgcaagagaaagccaaatcagttgatctgggatgaaacttgggcattggcaattttgagactttttatattgaaataatttcagacttagaatagtacaaagagctcctatatacctatgtacctttcacatatttcacaaatgttagcttttttttcttttttttttttggacacagagtcttgctctgtcacccaggctgctggagtgcagtggcacagtctcagctcactgcaacttccacctcccgggttcaggtgattctcatgcctcagccccccaggtggctgggaccacaggcatgtgccaccatgcccagctagttttttgtgttttagtggagacggggttcatcatgttgcccaaggtggtcttgaactcctgagcttagacagtctgcctgcctcagcctcccaaagtgctaggattacaggtgcgagccactgcacttggccaaatgttagcattttaccacatttgctttatcattttttgtctatatacatattaatttgttctgaactatttgagaatcagttgtagacatgatgcccctatatctctaaatacttcacgccaggcatggtgattcacgcctgtaatctcagcactgtgggaggccttggaggcaggaagatcatttgaggtcaggagtttgagaccagcctggggaacatggcaaaaccctgtctctactaaaaatacaaaaattagccaggcctggtggcaggcgcctgtaatcccagctactcgggaggctgaggcaggagaatcgcttgaacccgggaggcagaggttgcagtgagccaagatcatgccactgcactccagcctgggtgacagagcaagagtccgtctcaaaaaaaaaaaaaaaaaaaaaaaaaacttaatcaaataaatacttcagtgtgtatttcctacaaaaaaaaatgacaatctttttaaactgtaatacatccagcaaaatcaggaaatgaaaattgatatatcactctcatccactccccagagggcaccattcaggagtcagcctttgtcccatgaatgtcctttatggccaaaggattctgtctagaatcacacattgcattgagttgtcccctcagtctctttcaggctgacgtggctcctctgtcttttcttgactttcaggatcttgacatttttttttttctttttgagatggagtctctgtcgtcaggctggagtgcagtggtgggatcctggctcactgcaacctgactccccagttcaagtgattctcctgcctcagcctcccgagtagctaggattacaggcatatgccaccatgtccggctaatttttgtatttttagtagagctggggtttccccatgttggccaggatggtctcgatctcctgaccttgtgatccgcccgccttggcctcccaaagtgctgggattacaggcgtgagccacagcacctggccacttttttttgtttttttgttttttgagacgaagtctcacactgtcgcccgggctggagtgcagtggggcgatcttggctcgctgcagcctccacctcctgggttcaagcgattctctgcctcagcctcctgagtagctgggactacaggcatgcgccaccgtgcctggctaatttttgtatttttttttagtagagacggggtttcactatgttggtcaggctggtcacgaactcctgacctcgtgatccacccgcctcggcctcccaaagtgctgggattacaggcttgagccactgcacccggccaatcttgacactgaggattgtagacgaggtattttgtagagtgtcccagcatttgggtttgtccaatgcctcctcacgggcagactcaggttctgcatctttggcaggaacagaccagaaggggtgctgtgttcttcctggtgcctcctctcaggaggtctcctatgactggtggtgttcactgggagcacttggccaaggtgttgcctgccagattcctccacttcaaagcctctcttttcacctttgtgattagcaggtatcctggggacatctttcctgagacagtgcaaatattatcttgttcctcaccaaactttcactcaactaatcttaggctttgacacttttcagatgctccccagggaaatctaatgtacagccaggactgagaactactggcttagaggtcagggctctgccctgtctggttaggtaactgcaggcaggggacttccttgtgttgcagtcacctcatctgccaagttggttcatgagagccctgactccatgaagcatgcttgaggaatcagtgcactgatggccagacagcatttgccagagggccaggcacaaggtcagggcatgcgacaggttagaggtggctacgggcaacagaaacccctccacagcatggcttaaaacccaagagcatgctcttcctgcatgtcataagtccagaggtgggcagcccaggggctgtgtctctgaacgccacattttttttttctgtctctctttttgagacagagtctcactctgttgcccaggctggagtgcagtggcgcgatcttggctcactgcaagctccgcctcctgggttcacaccattctcctgcctcagcctcccaagtagctgggactacaggcgcccaccaccacgcctggctaattttgtttttgtatttttagtatagacagggtttcaccgtgttagccagggtggtctcgatctcctgaccttgtgatctgcccacctcagcctcccaaagtgctgggattacaggcgtgagccaccgcgcccagccccacttctttttttctctagacggagtcttggtctgttgcccaggctggagtgcagcagcacgatcttggcttgctgcaacctctgcctcccgggttcaagcaattctcctgcctcagcctcccgagtagccgggattacaggctcctgccaccacacctggctattttttgtatttttagtagaggtggggttttgtcgtgttggccaggctgttcgcgaattcctgacctcaagtgaaccacccacccctctgcctcccaaagtgctgggattacaggcgtgaggcaccgcacccggcccccattccttctctcctgttccaccccatttattgtgaggcttctggtcttgaagtcacttcatggcccaagatggagttctggctgtcgtgtgcgtatttcaggaggggaactggtaggaagcagggcaaagggttccctttgacgagtatttcaggaagtcccacacagcatgtcagtttacttctccttggccagactaagtcatgtagctgtacctgcatagttgcaagcataaaactggggttatgtcagtaaggaaagagaggcgagtggatatccaggaggcagcttgccctgtttgttgcagtaaggagccacgggaagcctgggaagcaggttgacttgatgatgaatattccatgaagttgccaaagtctcacttagcgacatttacttagttatctacacaccaatttaccatctcacgtagggagacaattattagattgttaaggaacaaaggtaaaaataagattaaaagagagaagggagtagaaggaaaccatacaatctgggaacagtgaatcttgctgccagaaacctacgagctagcctgttcattcagtgcttgtgcaggctagctaggagtatcagaaacattttggctctttatggattttccagaacaccttgagtatttagcagtggagcacaggctgcaggctaccttgatgtgatgcctgccaggatcctcccatcagcaccacccgtttagttaggccaggcctgtaccatttcctgcatctctatttctcagtgttacagggtggatagggtcttaggatacccactgcggcagagggagaagaaagcagggtccgcatacagtgtctactccatttgggtttggtgtctcagggcggaaggggcctttgcatttacccccatttctctgtgtgctttgctgggcacaccagcggcactggctctgtgggagctgcttgagctcacctctgctggcctcttccgaggcttgggaggcagaagagggcagagtcctatcagagtcgccaggatggggtctggctggccaccctcagcggaaccagtgatcagctcttttctttatccccaggaagtctctcagtgctctggccttctcccctgatgggaagtacatagtgacaggggaggtgagtcgtgatcgtgactgagtgggagtcgggggctggggggtcttggaagccattccttctgctcccggcaggcctgggagtccctggaatagctccttcctgggccagaacagccctgtagcagatgggggaggtggcttttgggcacatcctgtggcaatgccatcttcggccttgacaaccctctagccctgcccagtacagagcccagcagcagtaacgaccccaccttccctagaatgggcataggcctgctgtgcgcatctgggatgtggaggagaagaatcaggtggcggagatgctaggccacaagtatggtgtggcgtgtgtggccttctcacccaatatgaagcacatcgtgtccatgggctaccaacatgacatggtgctcaacgtctgggactggaaggtaagagccgaccagcaggcctgtggcaggcagccagctgccacagcatcctatgtcttgggcacagggagagctacatgagaggacgcagtaaagtgctcactcacccaacagataacagctattgagcacctgtgacatgctgatcccttattgtagggcacaaggcaggctcccagctagaagcattatacatatttttatattgaccagctgtgaccttaggcaagtgacttaacatctctgtgagtctgtttcctcctctgttagatggatatagtagtacttatcttgttgagttgtgagactttaatgagttgataagcactggaaggctgggctttggaacagctgtggagctggcagaagtgggtaccaagtcctggctctgcccataacccactatgtgaccttgagcacatgacatctccccctctgagcctggtagggttggggagaagcgcctccctcgtggggcttttgagggattgaggaaatttcatgggttatcctgtgaagggctcagggcagggcccagagcaggagccccatctgtgacagccataggttgtgttgtccttacatcccagccgtgactgtccccaataccatgtgtgggctgcagagcttagacccttggagagagctctggaacatactgtcccatggggaccattccaagcctctgtcccttcctctgtcggtgaggaatgagcagggtgccccacataggtttccccatacagcagctccctggagggtcccaggaagacagacttggagtggggacgagcagggagttccagcctgagggcaaaggcacaaacagtccagtggaatgagtgctggcatgagcttctctgcacttattcttccagaaagacatcgtagtggcctccaacaaggtatcttgtagagtcattgccctctccttctcagaggacagcagctattttgtcactgttgggaaccgccatgtgaggttctggttcttggaagtctccactgagacaaaggtgagtttctgtccctgcccctttagccaggccctgagggagtcaccatcggtggcagcatggtctcctgtttctccctgagatttgagggcagcggtctcgggccatttggcctctcaggggcccagctgctgcttctgggcctactctcagggtgctgatgcacaggccctgccaggaaccccctgaccctgggaccagctctcattcttggactgctgctgtccagcccctctgtccagagtggcagggttctagtgttttcttcccttctccatttggaagagcttcttagagttctcctgttttgttgtgtcctatcatctggtcatgcagggcccagctgtgtggacaagtatctcactacgccctctgtgtctccaggtgacgagcacagtgccccttgtagggcgctcgggcatcctgggcgagctgcacaacaacatcttctgtggtgtggcctgcggtcggggccggatggcgggcagtaccttctgtgtgtcctactcgggcctcctctgccagttcaatgagaagagggtgctggagaagtggatcaacctgaaggtaccacctccctctctgccatcagctggacagactctttctcgtgatatgtgtctgcaggggtgctcatcagcattgaccacacaggttctgcttatgtgactagtggtgaatgacgcccactctctgagcttaaggttccacatctgtaaaatgggagtactgctgccctccccgcagagctgataaggaagtcacgtgagataacataggcaaggcagtgagcacggtgcttggtaccctgaaatgggctcaaggtgacagttgttttcccatgactatttgatctacttcacatttcttttctcctttgagcactctggctggtagaggattgcatttttttttaattaatttatttttttttattgatcattcttgggtgtttctcccagagggggtttggcagggtcttaggacaatagtggagggaaggtcagcagacaaacaagtgaacaaaggtctctggttttcctaggcagaggaccctgcgggcttccgcagtgtttgtgtccctgggtacttgagattagggagtggtgatgactcttaacgagtctgctgccttcaagcatctgtttaacaaagcacatcttgcaccgcccttaatgcatttaaccctgaatggacacagcacatgtttcagagagcacagggttgggggtaaggtcatagatcaacagcatcccaaggcagaagaatttttcttagtacagaacaaaatgaagtctcccatgtctacttctttctacacagacacagcaacaatctgatttctctatcttttccccacctttcccccttttctattccacaaaaccgccatcgtcatcatggcccgttctcaatgagctgttgggtacacctcccagacggggtggtggccgggcagaggggctcctcacttcccagaaggggcggccgggcagaggcaccccccatctcccggacggggcggcggcagggcggaggcggacccccacctccctccctgacgggccggctggctgggcaggggctgacccccacctccctcctggacggggcggctggccgggcgggggctaaccccccacctccctcccggacggagcggctggccgggcgggggctgactccccccacctccctcccggactgggcggctggccgggcgggggctgacccccacctccctccgggacggggcggctgctgggcggagacgctcctcacttcccagacggggcagctgccgggcggaggggctcctcacttctcagacggggcggctgccgggcggaggggctcctcacttctcagatgggacggccaggcagagacgctcctcacctcccagacagggtcgcggccgggtagaggcgctcctcacatcccagacggggtggcggggcagaggcgctccccgcatctcagacgatgggcggccgggcagagacgctcctcactttctagacggaatggcagccgggaagaggcgctcctcacttcccagattgggcagccgagcagaggggctcctcacatcccagacgatgggcggccaggcagagacgctcctcacttcccagacggggtggcggccgggcagaggctgcaatctcggcactttgggaggccaaggcaggcggctgggaggtggaggttgtagctagccaagatcgcgccactgcactccagcctgggaaacattgagcactgagtaaacgagactccgtctgcaatcccggcacctcgggaggccgaggctggcggaccactcgcggttaggagctggagaccagcccggccaacacagcgaaaccctgtgtttggtggagaccaaaaaaatacgaaaaccagtcaggcgtggcggcgcgcgcctgcaatcgcaggcactcggcaggctgaggcaggagaatcaggcagggaggttgcagtgagccgagagggcagcagtacagtccagctttggctcggcatcagagggagaccgtggaaagagagggagagggagaccgtggggagagggagagggagaccgtggggagaaggagagggagaggaggattgcattttttaaaaattggaggtaccattgatttaataacttttcagtcaaaaaagactacacaaaatacataaacttttatttatttttatttatttttactttttttttttttttgagatggcgtctcacttgttgccaaggctggagtgcagtggcgcaatctcagctcactacaagttccacctcccaggttcaagcaattctcctgcctcagcctcccaagtagctgggattacaggtgcctgccaccacgcacagctaatttttgtatttttagtagagacagggttttaccatgttggcctggctggtctcgaactcctgacctttagtgatccatccgtcttggcctcccactgcgcccggccataaacttttaaactaaagcatgatctatcgatacattgcagagcttctttcctttagtatctgaaggtttgagtcaaagctgttttcccatctggaatcagttgcccatttggctatccgcccgagcgttgtggtttcctctcctgttcctggcctgcctttgtgactcactctggagatcaccttcgaggttaatggcttgtggaagagttccaagttttatctctgtcctagttggttaaacatcattttctctttttcaagcaagtgaaaagctttcaatagatagatgtttatttcctaagcactaaatgactcataaattaagtccctgtagatttggaaaaactccttaaactgtatctagaggtctagcacttcctagtaggatagacagtcctttctagatactgtaacttttttctgtaccgctttggagtacagtctttatgaagttgtttgtaagcaaaagggaataaaatttaagcctaaaggctgggcgcgatggctcacatctgtaatcccaatgctttgggaggccaaggcaggtggatcacctgaggtcaggagttcaagaccagcctgaccaacatggtgaaaccccatctcaaaatacaaaaaattatctgggtgtggtggcggccgcctataatcccagctactctggaggccgaggcaggagaatcacttgaacccaggaggtggaagttgcagtgagccgagattgtgccattgcactccagcctgggcgcaacaaaaaactctatctcaaaaaaaaaaaaaaatttaagcctaaaattcaaccctgttactacaagtgacttacctgaagttgcagtctgctgaacaggtattttccatacacagctacgtttctctgtagacagcagtgacaattctgtttccgttcatgcctctgcctacctgctggcacatgtctttcaatagcagcagtatgctatatcctgatttcacaaatcttaaaatatgctaaaatgggtgtcttagacccaaggaactgtaagtcttctctggaggcctaaggctgctctgtcagtccccatatccccgggccaggccacgtgaagcaccaaatccactggggtcccttttgcccctacaggtctccctgtcttcctgcctctgtgtcagccaggagctcatcttctgtggctgcacagatgggatagtccgcatcttccaggcccatagcctgcactacctcgccaacctgcccaagccacactaccttggggtagacgtggcacagggcctggagcccaggtactgccctgtggggagagggaatgggaggggcccacccagagtctgtccactggcattcatccatgcttccagatccatctatctgtctgtccatcccacaaatacccatcatgactctcagccctgggcattacaaagcagaaaagtccttgccttccgaggcaagcctcacagtgagaagtgaggctgggtagggggaagaaacagtgagaaaacaaaggaataatatcatttcagatagcggtcagcatggtgaagaacagtgcagagcaggtgtgaatgtggcggagtgtttccatccacatggctgacccctactaagtggctgctaagtgccagccctgggctggaagcaggacatgcctattataatgaagcagcaaaatctctgcctctctgcagtatagcaagggggctcgatgataagcaagtacacgaaaaagataatttcaataggcatgagtgctttggggaacacagcagggactcgggaaggagagtgactggggtgggctgtgctgattgggtgcctggtgagaaggagctgctgtgtggagagctgggtcccagcagttgaggtgacagcacactgggcttgttacgttgcaggaatagtaagggactgtgtggccagagcccagtgtgtccggggaggatggtgggagatgaggccagtgtggggcgcctgtagtctatcctcaggtcagtgggcagttgctggggtttcgggcgttggggtaaatgaccaggccttacatgttaggtccctcagctgctgtgtcgagagtggatagaagcactaggctgtggctttcttctcctttgttgcaagtctgttttatggaattgggggctacctaaccagggggtgccaggtgcctagggctgcctctttgtggatttctggatgctagctcctgggtgccttttccacgacagggcctgaacaggggaactgggtgtcatgaaggaaaggagggggcgagcaacccacaggcagtgttgtgttgtagtagtcgggctcacagctctgctgtcttctgttgtgctctgtgaccttgggaaggtgactatacctccctgtgcttccgttttctcatgtgtaaaatacagtacctagctcttattgtggttgtgagaatttattgcaggtaaaactctcggcctggcacagtgtaaatgctcagtaaactgtagccttcatagggagaccccaggccaagggacagctccccagcctccttaggacacagaggctttttgatcatgcgttggtgaggccaagaagaggtgggacctgagatacatgcctattatctttctatgctcagagagagagcaggagcttgggttgggtgaaatgatgggcgataaatgttcataggaatcaaaaactcaattgctctcggggccaggcaaaaatttccggtttgtagcctctatatgaaaagcaaagcagaggaagagggaagagggaaaagtagaattggagcaggagagatggatggccacaaataccatgagggatggcattgccggggaggcatctccactgtcactagaggtggctgtcactactcagtgacattgatggtgattgattacccatgtggccttgttagcttcctcttccacaggaaggcggaagcagtctacccagatacagtggcactgaccttcgaccccatccaccagtggctgtcctgcgtgtataaggaccacagcatctacatctgggatgtcaaggacatcaacagagtgggcaaggtgtggtcagagctcttccacagctcctacgtttggaacgtggaggtgagccccccccccacccccttgcccctgcttggcctctgcacagttccccacagtttgggaacccattcagtaattccttcagaagatactcattgactccctcctatgcatcaggccctgtcctaggtgctgaggacacagacacaaaatccctgcccttaacaagctcacatttggatgggaaaggaaacctggaaacatcatcagtgaataacacgccaagcagcagtaaccctctgaagaaaaatgaggcggggaaggggaaggggaatgcaggtggtattctagagaggagaggggtcagggaaggcctccctgaggacatatgagcagagacctgcaggaaatcggggagtgagacctgcaactgctggggagaaccacaagcacagaggccctgcggcaggaacatgcactccacagagagctttgctgtggaggtcgtttatgtatttcactgctttttttaaaaaggagttgaagacggggcatggtggctcacacctgtaatcccaacactttgggaatctgaggcgggaggatcacttgagtccaggagtttgagaccagcctgggcaacacaagaccctgtctctacaaataatttttaaaaattagccaggcatggtagcacacacgtgtggtcccagctactcaagaggtggaggcaggaagatcacttgagcctgggatgtcaaggctgcagtgagctgtgattgtgccaccacactcccacactccagcctgggtaacagtgagaccatgtctaggaaaaaaaaaaaagttttgaagtttttattttctgagaatgaatttgtgggtttttaaaaattctctaaagttaaccaggcacagtggctcatgcctgtagtcccagcactttgggaaatcgaagtgggcagattgcttgagtccaggggttcgagatcagcctgggcaacatgaggaaaccccggctttacaaaaaatacataaaaattagccaggcgcgcctatagttgcagctactcggcaggggctgcggcaggggggctgaaaatttcttactgggaatgtttgtcctagagaaattgggttttcagtggccagattcaggatcgtgagaaagaactttgtccttttgaataggcagcattcagcctatgactctggttgaatctgtctgccttcatggggctgacgtttttgttgacagcactttttttccactcaaagaatgttttttaataacttttaaaattcctgtatgaaatttttaaaaatttgggataataggtgaaatattacagataaggctacagtccacattgatgacttccctgcccccagttctgctctctctcgccctcaccattatcaattttattatgggtgtcttcagttgattttctttgcatctccttattgtttatgtatatagctgttcaacaacagtatctgtggatagatcttttcatcagttctagaaaattctcagccaatactgcttctaccctcttctctctctttttttttttcagacggagtttcactcttgttgcccaggctggagtgcaatggtgtgatctcggttcactgcatcctccgcctcccgggttcaagtgattctcctgcctcggcctctcaggtagctgggattccaggcatgcgccaccacgccttgctaattttgtatttttagtagagacggggtttctccttgttggtcaggctggtcttgaactcccgacctcaggtgatccgcctgccttggcctcccaaagtgctgggattacaggcatgagccaccatgcccggcctattcgctctcttctaaggttctatctaactctaaggttctatctgtattcttcatgtttctgaaaataaaaatcacacaaaagatatgtagagtttatcaattattgttagcagctttttttcccccccaagacggaatctggctgtgttgcccagtctggagtgcaatggcacaatctaagctcactgcaacctccagctcctgcgttcaaacaattctcctgcctcagcctcccgagtagctgggattacaggcagccgccaccacgcctggctaatttttgtgtttttagtagagatggggtttaaccatgttggccaggctagtttcaaacccctgacctcaagtgatctgcctgcctcggcctcccaaagtgctgggattacaggcgtgagccactgtgcctggcctgttagcagctattgatgctcagttcctggacccttttatttattgagggttgcaatatggtgatattctaaatctataatttatttttattagttggactacttacgtgaagagatatttgctctcatctgccatttggtcacccagtgctatacttcatataggaaaggcaggagaaatacttgattctttccctttatttaccagttttcaagataatgaattggttccctatcctctaaaggtaactagttttatttaatatcattataaactcatatatatttaaatatatcagatatgttttaatctattgtaattattaactttattggagctcatatcatcccatctttggccagtgagagcctcttaacattggctcctgagccctttggacatgaccctagtatttcttgatagccaccttgctgcctgggatgccaatatgttccagtctcatcttgtacatttcctgtcacacatcaggaatcaaccatttctcgaaaagaccatgtttttttttttgggctgggtgcagtggctcatgcctgtaatcccagcactttggaaggctggggcaggggaattacccgagcccacgagtttgagaccaacctggccaacatggtgaaaccttgtctccactaaaatacaaaaaattagccgggcatggtggcaggcgcctgtagtcctagctacttgggaggctgaggcatgagaattgcttgaacccgggaggcagaggttgcagtaagccaagatcaagccactgcactccaatctgggtgacagagggagatcctatctcaaaaaaaaaaaaaagaaaaaagagaaagagaaggccagggtttttttttagtacaaattgggacttcagaatcacaggttgggtgttagggatgctcatcgctattgggtcgttcttccagaagcctagttcttaaggacacaggggatggtggaattagaatatccccagtaactcatttgctttttcccacattatacatgcaacagtctgagaatggacaacttttcaattctgaagatagttaaaacaattgtaatgcatatgttctctctgttctctccaatttttaaaatagttatactatatttacaggatctgaatatgtagccattatatactatagtgtctcccttttgacccctgtttattttggaatggggaattatatatgtgtgtatatatgtatgtgtgtgtgtgtatatatatatataaaatgataaaatatacatgacatcaagttcaccatttcaactattttaaattgtaccatttggtggcatttagtacacttacagtgtcatgcagccatcattactctctagtttcagaacattttcatcacccacccaccccaaaaaatcctgtatctgttaagcagtcctccccattccccactccccccatccatggaaatgactaatctgcttctgtctttatggatttgcctgttctgaatcttttcttttctctccttctttccttccttccttccttcctttttttttttttttttttgagatggagtctcactctgtcgcccaggctggagtgatgcagtggcacgatctcggctcactgcaagctccgcctcccgggttcacgccattcttcttcctcagcgtcctgagcagctgagactacaggcacacgccaccacacccagctaattttttgtatttttagtagagacgaggtttcaccatgttagccaggatggtctcgatctcctgacctcgtgatccgcccacctcagcctcccaaagtggtgggattacaggcatgagccaccatgccaggctgtttcctttcttttcctctttctttcttttttttttggatggagtctcgctttgtcacccagactggaatacagaggcacaatctcggctcactgcaacctccacctcccgagttaagctattcccatgcttcagtctctagagtagctgggattacaggcacatgccaccatgcctgatgaattttttgtattttagtagagacagggtttcaccatgttgcccaggctggtttcaaactcctgagctcaggtgatctgcccgcctcagcctcccaaagtgctaggattacaggcgtgagccaccatgcctgacctgaatattccttataagtgaaatcatagactatgtgggcttttgtgcctggctttcacttagcataatgttttcaagatttatccatgttgtagcatgtgtcagcacttcatgcctttttatggtggaataatatttcattgtacggatagaacacattttgttctctgttatcagttgacggccacttgggtttttttctaccttatggctgttgcgaataccactgctatgaacatgtaagtacaagtttttttgtttttttttttttgaaacggagtctcactctgtcgcccaggctggggtgcagtggtatgatctccgctcactgcaacctcaggctcccaggttcaagcgattcttctgcctcagactcctgagtagctgggattacaggcacgcaccaccatgcctggctaatttttgtttttttagtggagacacggtttcgccgtgttggccaggttggtctcaaactcctcgcctcaagtgatttgcccacctcggcctcccaaagtgcagggattacaggcgtgagccactgtgcctgacgtagttctttctttcagttacatcactttgtttctgagtttttgtaggttgtttttcataccttggatcattttttaaatatcttttaccttcttttgaaacagtaggcccagcgtggtggctcacgtcggtaatcccaacactttgggaggccgaggcaggtggatcacctgaggtcaggagtttgagaccagcctggccaacatggcaaaaccctgtctctgctaaaaatacaaaaaattagctggccgtggtggcgggcgcctgtaatcccagctacttggggggctgaggcaggagaattgcttgaacccgggaggcagaggttgcagtgagccaagatcgtgccattgcactccagcctgggcgacagggcgagactctgtcaaaaaaaaaaaaaaaaacaaagtaagttatagtttttatctttttttgtgaaaatatgtttctgctgtgcttttttttttttttcttttttaagagtaactattggatttgaccttggtcctttcctgttgttcatttttatgtgataccagtttttctgaaattttagaagttggtgtgcttcaggacagattttccaactacacaagaagaactctgtcttttcttttttttgtgggggtggggtggcatgttttgttttgtttttgaaaaggagtctcactgttacctaggctggagtgcagtggcatgatcacagctcactgaagcctcaacctcataggcacaagcagttctcctgcctcagcctcccgagtagctgggaccacaggcatgcactaccatgcccagctaattttttatttttggtagagatgggatctcattatactgcccaggcttgtttcaaacttgggctcaagcagtcctcctgcctcagcctcccaaagtgctgggattgcaggcttctgttatttttatactgtgttaaaatatggcagcctgctttctgatacttcctttttgtggtcctctttatctgttatgtctcttctttcgtctcaatctcctctttactttatttcttctgtccctgttgtgattggtcaatttcatttctactcttagcagtttctcttcagtgtggagctttgtcctggaaggacaaagttcacaggatcttctccagtccctttaggccttaccccttgcactcaactgctgttggggtggatgaaaccctcctactttcagctgctgttcagtttggcccagtgtgctttccaatgaacacctcttggctactttggaattatcctgttgctgggtctgtcagatgccttattacttctctgtctcccacatgcatgctgatgatatgtaggtcttgtgattggtggtggtttgtcccactcacttgtattttggggtttatgggagtattttgtcactgagttttgctataaatgttgtctgtaggtttgggttttgctatctggttgatgtttttcttatgtcgagattttgggagattaaaaaaattaatgccgctactatcatcttcccagttctcaatcttccgtattttgaaatctctttatatggtggctctttgtccttctcagcttcattctaaatatctttagttttgtctttcagttcacttaattttctcctcagttatatctaatctttggtttttaatgtttttatttttttattattttttttttgagacggagtctccctctgccgcccaggctggagtgcagtggcgtgatctcggctcactgcaagctccgcctcccaggttcacgccattctcctgcctcagcctcctgagtagctgggactacaggtgcctgccaccacgcccggctaattttttgtattttttttttttagtagagacggggtttcaccgtgttagtcaagatggtctcgatctcctgacctcgtgatcctcccgcctcggcctcccgaagtgctgggattacaggcgggagccaccatgcccggcctattttttatttttttatttttatttttttgagatggagtttcgctcttgttacccagactggagtgcaatggcgcgatcttggctcactgcaacctccgcctcccaggttcaagcaattctgctgcctcagcctcccaggttcaagcaattctgctgcctcagcctcccgagtagctgggattacaggtgtgcaccaccacgcccagctaattgtgtatttttagtagagacggggtttctccatgttgaggctggtctcaaactcctgacctcaggtgatccgcccacctcagcctcccaaagtgctgagattacaggcatgagccaccgcgcccggccaatatgtttttattattcatttctagaagctgttctgttttggtctttttcagccctgcttggttaatctttataatttctggttggctgcacacttttaatcttgtcaaaattatcttttagttcttcaaacatattgaatgtagttattttatattctgtctgataattccaatttgggtttttttattttgtttttggtttgtctgtctgtttgttttgagacacagtctcatatgttggccagagtagacttgaactgctggtctctagcagtcctcctgcctcagcctcccaagtagctgggactacaggcatgcgccacctcccctgatttaataattccagtatttaaagtcttgctagactctgttgcttctgctgcttcttgctgatggtacctcgttttcttttgtgcttagtcatgtttgattgagttccacatttcccttggaagtttatttgagggtatgtgttaaggcctaggctgaaggtgggacatggatgatatatggtagcattttgtgtcctttttttttcttgtttatttttagcatagaaggtattgcacgatacctgtttatctttaacttactttttttttttccatgaaaatgcaacagtaagtcatagtgctgtcattgagtcatcctttgccttgtcctctgggaactgtaggtgtatcctgagtttgaagaccagagagcttgtttgccatcaggatcctttctgacttgttcttcagacaacaccattcgcttctggaacttggacagcagccctgattctcactggcagaaaaacatcttcagcaatgtgagtggcttcctttgtgaaccatctttcaggaggaacaaagacctactgtaagcttgaatgcaggggcaggagagagtctgatggaccctagatgttaggttccatgagggcaagagccggcaaccaaggcaggtccctctctgcatcactgcctcttgtttctctttctcctgccccctctctgaggtggcacgctctatcctctctgattctttgccagttggctcctgctctgcagatgtgtggacgtggccactcccggcagcccaacacacccagcccaggtgaaattgcttcctaagtcttgagatggaattccctgggagagcacctgatgagccagcccattcagctgccacacagtgaggcctcacgggggtatgggcagaatgctggcgagagccatgatgggaggctgggaagaaaagtttgctgaggaaattttggttagtattgcaagcccagtgagagggcgtctctggggagctgagacctgagtcatgcattcatttattctgcagacacttattaacgtccatgccaggtgcttggctacatgctagggacacaacagtgactaagactcttctgtcctgtggcacacacaatctagtgagggccgacagtgaactgacagccgaccatgttaatgcacaatcacaagtgcgaaaagcactgtgaaggaaaatgtgcagggtgctagtaggacatagagcagcagcatgtgaacttatctgggacatccggagcagcttcccgcggaagggacagctaagttgagattgggaagagtaaagagggaaggggagagggtctatacttagggaatagcctgtatgaaggccctggggtgggaaacagctgggtgaattggaaaacctgaaagaggccagtgtgattggaactaaaaagaccctccatgcaggaggctgtagcaggtgccctgcaggtgcacctttattactcccctcattccctacccagtgctaccatcgtctcctctgtacctgtgacatacatgctgtttttggctgcacacaatagaaaaactcaaaacaagaggtaaaagttaggtttctgactcatgaaagtagtctgaaggtaaccagtttagaccgttctgcaggaagcccttagggatccaagggccttccagctctctactctgtcatttgagggagcaggctatgtcctcatgacccagtgtggctatgggggctcctgctatcatatctgagttccaggctgcaggatggagaaaagacagcagaagaatacgtgcttgctttatatttaatagttcagaatttattcacatattcttatctagctgcaggggaggcaaggaaataattattctgattggtgaaactcccagctcaaaattagagttgtattactaacgaagaagagactggctatggagggacacgatttcagaggtgcttctgagctgctcgtgctgacctcagccctgtccttcctgcagaccctgctgaaggtcgtgtacgtggagaatgacatccagcacctgcaggacatgtcacacttcccagaccgggggagcgagaatgggacacccatggacgtgaaagccggggtgcgggtcatgcaggtcagtcctgacggccagcatttggcttcaggcgaccgaagtggaaatctgaggcaagtgggccctggcagtgtccagtgtacacctcccagctccagctcaggttctcagggcagtgggcagaagccctggccttggcacctcctgctgcccattgggaatgaggggctgtgaatagtaatcccatgaacagctcccattgggaacttaagctcgtaagaggcttccagaagggctgagagcagagtaactaccaggacctcagcagctagggtgtgcagattttgcctatagagtgtacaggcaagctcacatgactctagggcagcgtgacactttcaccagccacatggtaccagtgctgaactgtcaccgaagatgccagctggaggagggtcctggtggctctgggagaggggctatgagggtgggatagctgagagttcaggctgcttatgtgccctgttgaggtttggcaggatgttaccaacccagtaggtgctagtgggacataggccctgttgctgggaccaggtttaagatgacaaatgacagctgtgaccacctgggtattggagccactggggaatggaggagagttgggggaaactagaggggacataaaggggcagcagccaccaggcagccccaggagagtaggctacaagttttcaaactttcctgttgtcaagaagagcagaaagtgccgatttttttctgtgaaattcgataatttttaaatattggcacctgttttgatatcagtcactgtatgagaccagctcagtgtgtcagtgagctgcttacattgacatggcactgtctggagtggcaaaacggtaccaagagccaacatggggatagtgctcttcccccttggtgggcgctggcctgagcactgtgttgactgatttaatcctctcactgacccctgatgtaagtgatgttattggcacaaggtgtctggagtaagatcacacgggtagaatgaagaagctgggatgactcgatgactgatttcatttggggagaatcaggaaggtctagatttgagactcttttaacaatgagagactggaatcaaatgttctcatccatagctcctatcctggactatgacctctggcccctagcccctggcccctgtcctaccccagggaccacctctgatgcagccctacgtaaacacctgcccccctagaagactgtcctagatccctggggctctgttctggcccaggcaccacaaggggctgctgcctgctgaggtgctccctggttcaacacggctccctttacgatggcaggtttctaaatgagaaaagtggttgtgcatgtctagagtatttggccatgataaggggttctcattgttggtggcctggccattctgacctattctagaagtggtagagcacatggggctggggtgtggggcttcagcgggcggtgtgtgtctcccaggatccacgagctgcacttcatggacgagctggtcaaggtggaggcccatgatgctgaggtgctgtgcctggagtactccaagccagagacgggtgagcccgcagcaggggtggaatgggggtcaggcagggaggcagcccccctggcagggccacagaaaggggtagttggtgtctggtgggactgtggatgacagctgggagttttgtgttcggtaagggcccctgtagctggaccctgagaccagagtggctgggacttcagaaagcaagacacccgcaggcaggactcagcttgacttgcccgctgctggtgccagcacccaagccaaaggggtggatgtatgaatgagtgaattgtgaatgagaagatagattgattgttaggcattattttcaaaaagtttgaagcctatagaaatattgggagaatattataatgaacaccccataggcttcacccaaattcctcaattttttttttgagatggagtcttgctgtcacccaggctagaggggagtggcaccatctctgctgactgcagcctccacctctctggttcaagtgattctcgtgcctcagtctcccatgtagctgggattacaggtgcctgctgccatgcctggccaatttttgtatttttagtagagatggggtttcaccatgttggccaggttggtctcaaactcctgacctcaggtgatccgcccgccttggcctcccaaagcgctgggattagggcatgagccaccacacctgacctttttttttttttttttttttttgagacaagagtctcactctgtcgccctggccggagggcaatgacgcgatctcagttcactgcaacttccgcctcccaggttgaagcgattcccctgcgttcaagcgattctcctgcctcagcctctcgagagtagctgggattacaggcacgcccccaccacacccggctaatttttgtatttttagtacagacggggtttcaccatgttagcctaggctgaaggctaggaccatagtagggtctccagacctcatggtcctcttcattaaaacaacagaaaattccttctgggccatcagatgagatcatgagataggagaagatttccaagtgaagatttcgtttgtttcaagacagagtcttgctctgtcacccagatgatatatggatgatatatggtagcattttgtgtcctttttcttgtttatttttagcatagaaggtattgcacgatgctggtctcaaactcctgacgtcaggtgatccacccgccttggcctcccaaaatgctgggattacaagcgtgaaccaccatgcccggctcctcaagatgttttctaggctgggcacggtggctcatgcctgtaatcccagcactttgggagttacagagttggtggagttatatcctgatgtgattttccccatgttcttctttcgttctctcatcccccatgctgtgtgccccaccaacttgtcttgaaacatatcttcactcggttcgcctctcctgatctcccctctgcctcaggtcatgttattaggcctcagacatagcaagtgaccagagtagggaaggctggtggcagatgggagtctggccacaggcagtcaataggacctgaacaaggcccaggtagccagacctcagagggtgagaggacactggttttggaagaggctgagaggttgccagggctttacccagcacagacccagcaggcaagagcgctgggctctgctggggcgtctgctgtggatgtccctggaggagcgtccatgcgcccatcgagactcatcctccctgagctggtggtgaggaggtgaaatgccagggtgtgggggctctgggaaagaccacacagagctaagggagtggcccttgccaggcttgggccaagttggctacagttgaagaaccaaagaccccttctccgaggactgggcagcttggtcacactgcccttctgggaggccagggcacccacgcagccttcaggaaccagtctcattctctcctctcacagggctgaccttgctggcctcagccagtcgggaccggctgatccatgtgctgaacgtggagaagaactacaacctggagcagacgctggatgaccactcctcctccatcaccgccatcaagttcgctggtgagcccctttcttcccgctccctgcgccttgctagctaccctgctaaaaaaggattcattctttcaactctcctgtaaaatatatatccaaacaagtgaatacagtatctgtgtacagtatacagaataatgactggggccgggtgtaatggctcacacctgtaatcccaacactttgggaggccaaggagggtggatcacctgaggtcaggagttcgggaccttcctagacaacatggtgaaaccccgtctctactaaaaatacaaaaatttgctgggcggggtgttgtttctgtaatcccagctactcaggaggccgaggtgggagaattgcttgaacctgggaggtggaggctgcactccagcctaggcaacagagtgagaccctgtctcaaaaaaaaaagaataatggccaggtaccatggctcacacctgtaatctcagcactttgggaggccaaggcaggtagatcatgaggtcaggagttcgagaccagtctggccaacatagtgaaaccccatctctactaaaaatacaaaaaaattagccaggcatggtggtgtgcacctgtaatcccagctactcgggaggctgaggcaggagaattgtgtgaacccgggaggcggaggttgcagtgagccaagattgcgccagtgactccactccagcttgggtgacaatgcgagactttgtctcaaaaaaaaaaaaaagaagaatataggccgggcgtggtggctcatgcttgtcatcccagcactttgggaggctgaggcaggcagatcacctgaagctaggagtttaagaccagcctggccaacatagtgaaaccccgtctctactaaaaattcaaaaaaagtaaccgggcatggtggtgcacacctgtaatcccagctacttgggaggctgaggcaggagaatagcttgaatccaggaggccaaggttgcagtgagccaaaattgtttcactgcactccagtctgggtaacaagagcaaaactccatctcaaaaaaaataaaaataaaaaataagctgggcgtggtggccgaagtgagtatccacagttcttaggagcaaggtttgaactaggacgttgttgatagcagagactgttctaattgctcatggtcgtaatattgttaaatacggtacttggattcaccacgtgcaggttaagaagcagaacattaccagaggcttgcaggccttctctgggtccctcccaggttacccttcctcccttatatggggctcactcccttctgtgagccaatgactcctccttgagcaacatctaatacttgtatgtcaggcctggaccctctcaaatgtcctgtcatgaaggagcatgtgtgatgtgcccagactcagagttttatatttgttctgtcatttcatcctcaccaaactgttattctgtaaagaaatgagacggccgggggcatctcacgccattgcactccagcctgggcaacaagagcgaaactctgtctcaaaaaaaaagaaatgagaataataaaagcaagaatgtttctaatgcttaccatgtggcagtccctgttccaagggcttcacatcactctccagagaaggaactgtcaccatgcccattgtacggaccggaagttgaggctcaaaggggaggcccaggttcagagcagtgtttaacagctttgaccttggcaccagagaatgcctgggttcagtcctgcccctgtcctctctgtgtgccttgggacaaggactctgtgaacctctgtgttcatgcttgtccagtgggatgggtggtgagcattcaggaagacccgctacatgcatggggcctggcccaaggctcatgtggatcttgcagttgatcctgatggcacgagcctcccagcctgtctccactggtcgctgctgcagtcctgcctctactccgctactcaagtcacctatctcaatcccagactggagagggtgtcccttctttgtccccagcctttgtttctctatatgcccttgctctgcagagcctgccttggccacagctccacctgtgccccctcacacgtacagctcataccttacagagtcccacccagacccagcacccacctcaccacctttaggaagccttgatcccagcacagttgattgatggctcttgcagtggagttccccagctagggtcccctgcccatgtggcccagccctgcctaacacacagcgtcctcctcccctaggcaacagagacatccagatgatcagctgtggggctgacaagagcatctactttcgcagtgcccagcaggtagggtggcatggcctccttgggggctggggtggggggttgtcggggcattctctgaaggtcctgccggccctgccagggttcggatggactacactttgtccgtacccaccacgtagcagagaaaaccaccttgtatgacatggacattgacatcacccagaagtacgtggccgtggcctgccaggaccgcaatgtgaggtaaggggtggccctggacccttagctggcctggtctgccttgtcctaggctgtctgctttcctccctctgttcctctggtccccaagaagctgggaaggaattgagggacccagcaggtgttccttcttggtttttttttgtttttgtttttgaggcagagtcttgctctgttgcccatgctagagtgcagtggcaccattttagctcactgcaacctccacctcctgggttcaagtgattctcctgcctcagcctcccaagtagctggaattacaggcgcctgccaccatgcctagctaattttttgtatttttagtagagacgaggtttcgccatgttggccaggctggtctcgaactcctgacctcaggtgatattgcccacctcagcctcccaaagtgctgggattacaggcgtgagccaccgtgcccggccaccagcaggtatttcttagaagctgggctctcccaagcctggcctccaggtcagcagagggctttcttctggctctccctagagccggtgtgggatgactaaggtgctgatgtggcacataaactccctcattcacccgtattccctgagcacctaactgggctggatggtgctgggatcatggcagtggccaggatagccccaggccctccttcatggagctcacagtccagtagaatggacacggccacctcacagccacagacagtgacagagtggtcagagatgggggagcccaggggccctgtggagacacctgaccccacctgcggatcaagcaggacttcctggaggaagagacaccttagcctggggaggatgtggaggagcgagccagggggaggcagagagtgagtgtgcagagggcaaagcagtgcaaagaggctctgcaccccttcccagttctttctcatgcggtgccaagcactgagcttgcagtgtgtgggggagatgaacattaactcagtggataccccaggacaacctcagcttgagatggggtttcagtttcagtctaggcatcagatggggacaagaggtagcagggggcttccaggggaggggaggacagcaagagccagagaatgaggtggtggggtaggcggggccctgttggccgcaacatgcccctacttccccagagtctacaacactgtgaacgggaagcagaagaagtgctacaagggctcccagggtgacgaagggtccttgctgaaggtgaggagttggagacccctgtctgtctgctgccctgatgggccacctattgtgacggcccacacctgagacctgtgcccttggtccttcctcagtgcaccgcgctgcccagcaccttctcaggcctggttaaacaaggatgcttgcgagagggtggggagggtgaccccagctgtgtttcctttatttacagagcccttccccaagtggggcgtctaagtgggttccattttgagtggcagcagggtatggtgggaagaatcagaggcatgaactcccctcctggtttgcccacaccagccacgggtcactcaggacaaggggggaccttctcagagcctctggtctaggacagttatgggttcaggttctgcctcaggctgactgtgtgaccttgggcaagcatcatctcttgaaatgcacacagacagcttgtctcatagacttgttctctggaggagttcagtttgcacatgttcagtgcttagcacagggcctggctactgttgttactgctgcggtggttgttaatttcttcacgtgtcgaatgggagcgggagctcctgccctgccagagtcccatgtgctgtgcatgcagcacgggggagggaggggcccaggcctcatcataaggaagaagcaggcagctggagtgacatgtgggtccctttcctggcaggtccatgtggacccctcaggcaccttcctggccaccagctgctctgacaaaagcatctcagtgattgacttttactcgggcgagtgcattgccaagatgtttggccattcaggtgggtgtgcctctctgcttgggatgcctccccacccgcccacaccctctgactccgaaggcaagtgcagcctctctgctttgtttgcagaaattattaccagcatgaagttcacctatgactgtcatcacttgatcacagtatctggagacaggtgggacatggacctttgggagagttgtggctcagataccatgagcactgcactcagcctgcctgtgtagagagcatttctaaactgcccagtttggattgtgggagtcttggtgtcacacccagccctgagttcaaataccagctctaagctgggcatgatggctcacgcctgtaaccccagcactttgggacgctgaggcgggtggatcacttgagctcaggagttcgagaccagcctgggcaacatagcaaaaccctatctctacaaaaaattagccgggtgtggtcatgtacacctctagtcccagctactcaggagggggaagatggcttgaacctggtaggtagaggttgcagggagcacagatcatgccagtgcattccagccttggtgacagagcaagaccccgtctcaaaaaaaaaacaaaacactaaaaaaacatatcccagctctgccatttattttcttgtcaccttgagcaggttatttcccctgagcctcagtttgctcccctgtaaaagacaccaccgtttacatttaccttaaaaatggtgtgatgaggccgggcgcagtggctcacgcctgtgatcccagcactttgggaggcctaggtggatggatcatctgaggtcaggagttcaagaccagcctggtcaacatggagaaactgtgtctctactaaaaatacaaaaattagctgtgcgtggtggcaggcgcctgtagtcccagctacttgggaggctgaggcatgagaatgacctgaacctgggaggtagaagttgcagtgagctgagatcgcgtcactgcaccctagcctgggtgacagagcaagactctctcaaaaaaaaaaaaaaaagaaaattgtatggtgagaaatgaatgagatgatatacatacattctttagcacatgggtggtactcaaggaagtcccttttgtcactccctttgatttaccccagttcttccccacagcccccttcctcaggtcttgaggcctccagaacaggccctggtttgctgggatgccccagacctgggcccagggtgtggatgtggcaagtccagcacccctgcactaagcggataggggtgtgttttccaggagcatctggagaatggggtccaggctgtggtgtgggtggcttcagggtcagccacggcagcggctcccatgcttactcttcctctgccttgtgtgtctctctttgacctccgcagctgcgtgttcatctggcacctgggcccggagatcaccaactgcatgaagcagcacttgctggagattgaccaccggcagcagcagcagcacacaaatgacaagaagcggagtggccaccccaggtcctggcagcccctgcctgtccaccagagggatgagtccctgccagggccccatggagtgatgctggggacacagtggtggccaagacagccctaggccctgcccttagcacactcacagctgagtaggggagacagactttgaatatgcagttacagtaatagatacaaaaaggttttgtggatttttttaattttcgtaaataatagagacagagtcttgctgtgttgcccaggcttgtcttgaactcctgggcccaagtgatcctcccaccttggcctcacaaagtgctgggatcacaggtgtgagccactgcacccggctatgagaagggtattaaagtggaaaagcaaagtgtttggcgagcctctcagcactgtgatgggggatgccccaagcggctgtgggaacagagcagtccctgaccggccagccaaggggaggggtgggtagacaggggatctgaggggagggctgcagtggggccacgtgtcctcttactcccacgtgaaagctgtagcttcacttacttctttgaatcttctaaatatatttctttcaagtctttatgtagcaaagccaattttatttgcagagaactcatgttctggtttttgatttgaggttttggtttgggtattgctcattttgagtgggaggttttttggttttcttctcttctgctgctgggtgtgtctgtttttgccattggctccatgtggctcccagggcaatgtggagaccaggccttgacatgggccactggtcctgaggtcctgaggtggtgttagagatatcttgcttttgaggctcccactccacccccaagctatgaaccagggccctggcttcagtgcctgcctcatgccaagggtgttttagtttcccgtactcgggaagagccaccatcattgctaccacctacaggaagcccagcacaggactgcagccccgctgtctgcttggctttctgtcccattgctgtggccctgagagtttgcattcgtttgtagcctggcctttgttaatctcatctattgtggtgatgtgtttctagtggggagacggcatcaagtgagagacttgccagcaccatcttgaccagcagccaagaatatgttcacatggagcttagcacagggcccagccctaggcaagtccccaccaccagcccatttgcctgtattctctccttaccatcctcattcctggctttaggcaggatacgtatgtgtccacacctagtgagattcactccctgagccctggagagcaaacagaggatgatctggaggaagagtgtgagccagaagagatgctgaagacaccatccaaagatagcttggatccaggttggaaaaggggccctattttgaactatgtcagtgtagggaatcattgctgggttttgcccatgaccttgtttacagggcctggcacatattaaaactcaggagtcgacagggtgcggtggctgatacctgtaatcccagcactttgggaggccgaggtgggtggatcacctgaggtcaggagttggagaccagcctgaccaatatggtgaaaccccgtctcaactaaaaatacaaaaattagccgggcgtggtggcgtgcaactatagtcctagctactagggaggctgagacaggaaaattgcttgaacctgggaggcagaggttgcagtgagctgagatcgcgccactgcactccagcctgggcaacagagcaagactccgtctcaaaaataataataataataataatataaataaaataaataaaattcagtaatcaggcttagcgtggtggctcacacctggaattttagcactttgggaggctgaaatgggagggtcacttgaggccaggaggtcgagaccagcctgggcaacatagcgagagcccatctatgcaaaaaaaaaattttttaaagaaattagccaggcatagtggcacacatctgtagtcccaactacatgggaggctgaggcaggaggatcacttgaggccaggagtttgagaccagcctggcacgtaccaagaccccgttcctacaaaaagaaaaaaattagccaggcctggtggtgcacacctatagtcccagctacctgaaaggctgaggcaggaagatcgcttgagcccaggaattccatgttataatgagctatgattgcaccactgcactccagcctgaataatagagtgagatcctgtctgtagaaaaagaaagaaactcaataatcatatcagtcaagactctttcagtataaaagcaaccaggcttaagtcaggaagaggattttttggtgcctgaaaattggagaggattagctttcagcatggctagatccagatagacagatgatgttaaaaggaagatttttttttgtatcttttggctctgcttttcttcatgttggctttgctgatggacagactgtccctttactaggggaaaagatacccccagcaactacaggcttataaaactccatagagaatagaacacctctttcctatagtagctcaagcagagtcttagggttgtgtggctcatgtttctggtatctgctgtacccacttctgagccagttgttgtagctgtccacatctcagcatgtgatcacttctgagggcagagactgtagtcagctccatccactcacaccacctgaccaggcatcaaagatgtgtttgaggccgggtgtggtagctcacgcctgtaatcccagcactcagggaggccgaggcgggtggatcacctgaggtcaggagttcgagaccagcctggccaacatggtgaaaccccatgtctgctaaaaatacaaaaattagctgggcgtgatggcgtgcgcctgtaatagcagctacttgggaagctgagacaggagaattgcttgaacctgggagacggaggttgcagtgagctgagactgcgccactgcactccagcctgggtgacaaagcaagactccgtctcaaaaaataaatgaacaagtaaaaataaattgaattatgttgcggatattgtccggaatctttttcctctgcaaagtctctcatctacctgtatgttggtgaatacaaagcagacgcctgcgaaattttaagttattcccctccaggtggccatttaggtttttcctgattgcacatcactgttaatgaggctatggagtggagaccactcctaagcctcctcgaaatgtgaggacttctccaggagagagtctgaggagtagcaccactggatcctggagttattttattttactttaaaaaagttgttttattattttatttcactatttttgttgcccaggctggagttcaatagcacaatcatagctcactgtagccttgacctcctgggctcaagcaattttccctccttagcctgtggagtagctgggaccacaggctcaagctcccacacccagctaaatatgtgtgtatcaggggatggtgtgtgtagagacaaggtctcactgtgttgcccaggctggtctcaaacccctggcctgaagtatcctcccacctcgacctctcaaagtggtgggattacaggcttgagccagtatgcctggcctttattttaaaagagaaccccggctgggcgcagtggctcacacctgtaatcccagcactttgggaggccgaggcgagcggatcacgagttcaggagatcgagaccatcctggctaacatggtgaaaccccgtctctactaaaaatacaaaaaaaaaaaattagccgggcatggtggcgggcacctgtagtcccagctacttgggaggctgaggcaggagaatggcatgaacccgggaggtggaggttgcagtgagccgagatcgcgccactgcactccagcctgggcaacagagcgagactccgtctcaaaaaaagaaaaaaaaagagaaccccaagagttctccaaacccagttactgccccaccctgcattgcattaggctctccattgtccccacacttttcctgccatcctttggtagtattaagctttttcacctcggtcagtctcgtgagtcaaatatcgcatcccacggtttaagtttgcatttccctaacccccggtgctgttgagccttctgacttctgggttgtggtgttgcctctttggggactgcccggttatgtatgtggcctgtttgttgggttgtttgtcctcttttcatggattctgtgtctttccagatcctcgttgcctgctaaccaacggcaagctgccactgtgggcaaagcggctggtaagtcttcagggagagggttgctcaggggctggcagaggaaacgcctccccagctctgccttctggaagccctttttcctttccatgtccctcttttccctggagaagccctgtcatccttccaggctcagtgagacagccctttgttcatgatcagtgctctctgccaggcattgttctggatgtcagggacacaacagtgagcaagggaaacaaaagtctctcccttcacaggctcacttgcctgtgtgggcgaggaacaatatccccattaaataagtaaatgacgtagtaggttgggtgctgataagtgctgtggagggaaaagaatcaagaaggaaaatacgtcagccaggtgcagtgatacgtgtctgtggtcccagctactcaggaggctgaagtgggaggatcacttgagcccaggaggttgaggctgtagggaactgagaaggcaccactactacactccagcgtgggcaacagagtgagatcctgtctcaaaaaagagaaaaagaacaggggcccagcacggtggttcatgcctgtgatcccagcactttgggaggccaaggcaggttgatcacttgagcccaggagttcaagaccagcctgagcaatatagtgagaccccatctctacaaaaaataaaaaaattagccaggcatggtggtgcatacctgtagtcccaggtactcaggaggctgaagtgggaggattgtttgggccagggaggtcgaggatgcagggagctgcactccacagcactccagcatgagcaacagagccaacactttgtctcataaaaaaaataaaaataaaaaagaaaataaggagtgttggggggtgtcagttttaagtaaacaggaaaggcctcattgggaaaatgatgtttgagcagagttgaagcaagtgagacaggcagatactgggacgaatgttctagtcataacagcctatacgtgtaaaagccacgaggccaggagctcgagaccagcttaggcaacataatgagactcccatctctacaaaagattaaaaatagccaggcatggtggtgcacacccatagtcccagctactcaggagcctgaggcaggaggatcacttcagcccaggagttggaggctgcagtgatcgtgctactgcactccagcttggatggcagaacgagaccttgtctcttaaaaaaaaaaaaagaaaaagagaccgggtgcggtggctcacgcctgtaatcccagcactttgggaggccaaggcgggtgtaatccaaggtcaagagatcaagatcatcccggtcaacatggtaaaaccccgtctctactaaaaatacaaaaattagctgggcatggtggtgcatgcctatagtcccaactactggtaaggctgaggcaggagaatcacttgaacccaggaggcagaggttacagtgaaccgaaatcatgccactgcactccagcctggcgacagagtgagactccctctcaaaaaaaaaaaaaaagaaagacaatgtggattataagagacagaataagagaggtgaatgaaggatgatcccaaggttggggcatgagtaactggaaaaaacaactgaaacagggaatctttaggaggagcaggtttgtgcagaggaaatgagttgagttgtcagcatgttaactttgaaatacctaccagacatccatacagaaatgtagagcagtcacatgtgcaattctgaagtttcagagaaaagttcatgaatcccagctgggcattcccagcactttgggaggccgaaacaggattccttgagcccaagggtttgagaccagcctgagcaacatagtgagagtccacctctaccaaaaaccaacaaaatgggctgggcgcagtggctcatgcctgtaatcccagtactttgggaagccgaggcgggcggatcacttgaggtcagcagtttgagaccagcctggccaacatggcaaaaccccatctctactaaaaatacaaaaattagccaggtgtggtggtgggcacctgtaatcccagctactctggaggctgagacaggagaattgcttgaaactgagaggtggaggttgcagtgagccaaggtcacgccactgcactccagcctgggagacagagcaagacttcgtctcaaaaaaaaaaaaaaaaaaaaaaacagagaaaggttcacgctggagatatgtacctggaagttgtttctgaatggtattgaaagccaagagtccagatgggctgtgtgaaatgtccgtgtcgctccctgcagtgagtgagcactcagccagttgcctgactgtccgatatccttcaagctaggggacgatgatgtggcagatggcttggccttccacgccaagcgcagctaccagccccacggccgctgggcagagcgggccggccaagagcccctcaagaccatcctggatgcccaggacctggattgctactttacccccatgaagcccgagagtctggagaactccattctggattcactggagccacagagcctggccagcctgctgagtgaggtacacacttccaccgcagcctggcccatagccccggcaccgtgacggccccagggcctggcgccttaggctgactcccactccatgggggcagggaggattacatgagatggtgaagggcaggagggtgagccccaggtctgttgcacagcaagacttcccaaggcagacagggagtctttggaaagtgggtcacttgggggttaagagcttggatgctagagcaggcttgtacccaagtgggggacatttgggtagatcgagccctgaccctacccattcctgttgtgtgacctggagtaagaggcttacctctttgggcttcagtcttctaaaaagtagtcataatggggtcaggggcagtggctaacacctgtaatcccagcatttggggaggccaaggcaggaggattacttaacgatcacttgaggagttcaaggccagcctaggcaacgtagcaagatcccacctctacaaaaatattttttaaatttttttgtttgttttgtttttaaatggtaataacaatctcttctgccccagagggcttttacaggaatccatgcttaagtatagggcctgggctcttagaggtgcccgtgcaactttagctctttctctactattttccaaacaaaattcatttttatcctatcctataatttgtcatcttcattgtggtataatatacatccagtaacatgcacagattttaggtatacagcttgatgaactatctgtgtaattcacgtgtgtccactaccctgggcaaaatctggagtgttttctacctcatagaaacccccttctgcccttcccagtcaggtccccgcaccaggataaccagtgttctgacctctcaccaaggactgggtttcctattcttgaacttgatataaatagacacgtagagggttgggcctcctatttttggtgccacacctcttcctcatctgtaaagggactgataatgcaggggcagaccaggacaagctggttgcgagtggagggcatggcacaggccctggttcacagcctccagcagtggggctgctggcatggttcctggcgcactgttggtggccccagccatgcctgcctcagaatggctgtgctgtcttccccatagtcagagagtccccaggaagctggccgcgggcacccctccttcctgccccagcagaaggaatcatctgaggccagtgagctcatcctctactctctggaggcagaagtgacagtcacagggacagacaggtgggtgtcctttccaccaagggagccttagttggaggaacccccagctgatagctgcatcctggaagaagtgctctctgccttcccagtgggcttgtgggagtggggacagttgaggcctggatggggcaggagcccagccttagttccctggttccaggtggggtacaggagggcctgacctgggggaaggagggggcatttggaggaggcggggaggctgtcgcagtgctcctgcaggagcagcgggtacaggtgcctaggggctccgggtggggctagctgttgagtctccagctgaagtccttgttccctctctgcccccactggcactgcagccagtattgcaggaaggaggtggaggccgggcctggagaccagcagggcgactcctacctcagggtgtcctccgacagcccaaaggaccagagcccgcctgagggtgagtgcagggcaggcagggaccctgtgacagtctgtgcgttcagccaagcccctttctgggcaccgatggtgactttgacccagtactgaagctcagagtctgtcgaggaagacacatgtggtccctgctgctgcctgaggattctgggcccagctgcctacagctgagagcccagctctgccacctccttgatgtggaacttcccttattcataaaatggggggcagctgctcttaccatccctcctccagatggggaaactgagcccagggaagggtagccctggccctggctcaccagaatggtcaggctgtgggctcctgaccccgactctgtccttcagactcgggggagtcagaggccgacctggagtgcagcttcgcagccatccactccccagctccgcctcctgaccctgcccctcggtttgccacgtcgctgccccatttcccaggtaagcaggggccagacacgcaggggactcgctgctcgggcctggcttagggccagtcacaatgtctaagcacaggccctgcacttggagcccactgagcctggaagacggggatccctgcttctcagcctgcgggcaacagggcagggatgggtggggcccgctttctccatttcaggtggcgtctgctgtgactcatggtgttggctcctcttgtccctcccctccttccctgtcaggatgcgcaggtcccacagaagatgagctgtccctgcccgagggacccagcgtccccagcagctccctaccccagactccggagcaggagaagttcctccgccaccactttgagacactgactgagtccccctgcagaggtagggccctgcctcacccacacctgccgaggccgtctgtgcagcctgggcacagcattggcgtccctggagttggctccccagcagggccaggagggtgagtggagagcaactgcttcgttttttttgagacggagtctcgctctgttgccaggctggagtgcggtggcccaatcttggctcactgcaacctccgactccctggttcaagcaattctcctgcctcagcctcctgagtagctgggattataggcatccacaaccacgccctgctaattttttgtatttttagtagagatgaggtttcaccatgttggccagactggtctcaaactcctgcctcagatgatctgcccgccttggcctcccaaagtgctgggattacaggcgtgagccaccgtgcccggcccactgcttcactcttgacctgagcctcacgatgcctcctcacccactgcccctgctcgtaccctgtgtctgtacataagggtttctggggagtgccccgctgggctgtgggctggcctagggccagggctgctcggcgggaagggttatgagggtcccctcgggatcttcccctagagctcttccccgcagctctgggagacgtggaggcctctgaagctgaagaccacttcttcaacccacgcctgagtatctccacgcagttcctctcaagcctccagaaggcatccaggtagaagctggccaagcactgcccaccctctggctcctcaacagtgccccagggcaggctgaatgagaatcatcccccctgctctcctccccacaggttcacccataccttccctccccgggcaacccagtgccttgtgaagtctccagaggtcaagctcatggaccgaggcggaagccagcccagagcaggtactggctacgcctccccagacaggacccacgtgagtattgggcccacctccgtcagggcacggggctgggaaccctgaggccttgtcctcacctcagagctgtgcctgcaggtcctcgctgcagggaaggctgaagagaccctggaggcctggcgcccaccacgtgagtgccccagtcccagacggacagtcctgggtttctcggcgagtggccggatgtccagcctagctgtggggcgtgggggccctagccatcagttctgtgtggtggagtcagtgccatctgcttccgttacagctccctgccttacgagcctggcgtcctgtgtccctgcttcctccgtgctgcccacagacaggaatctcccaacgcccacatctgcacccaccccaggcctggctcagggtgtccatgccccctccacctgttcctacatggaggccactgccagctcccgtgccaggatatcacgcagcatctccctcggtgacagtgagggccctatcgtggccacactggcccagcccctccgtaggccatcgtccgttggggagctggcctccttgggccaggagcttcaggccatcaccaccgcgacaacacccagtttggacagtgagggccaagagcctgccctgcgttcctggggcaaccacgaggcccgggccaacctgagactgaccctgtcaagtgcctgtgatgggctcctgcagccccccgtggatacccagcctggcgtcaccgtccctgcagtgagcttcccagcccctagccctgtggaagagagcgccctgaggctccacggctctgcctttcgcccaagtctcccagctcctgagtcccctggccttcctgcccaccccagtaacccccagcttccagaggcccggcctggcatccctggcggcactgcctccctcctggagcccacctccggtgagtacagccctggagcaaggactgtcccctaagctcatcctgtgtgctagttggctcagctccaaagatggatacttgacctggccacagggactgtgccattcattcattcgtgcattaacttaaatatttaatgagcattacatgttgggctttgtgctaaaccctgggacatgggacatggtggtaaacaacacagagaactgacagcttcaatggggacaatgcccagactaaacctttaaggaacccgtcatatgtatcacgaagtgacacatgcttaggagggacagaggagggcgagggagtgcagggtggggacaggggttgggattacaaaccagaagataagaagaggcttcagggaggaggctgcattggagcagagacctgtaggagtgaaggggagggagccttggggacccagagaagtgttccagacagaagtacagcatggagtccacccagtcgctctggccgctcacaccaatggaatgcagctcatcttgctcattcccttctctctaccccaggtgcacttggtctgttacagggcagccctgcccgctggagtgagccctgggtgccggttgaagccctgcccccatctccccttgagctgagcagggtggggaacatcttgcacaggctgcagaccaccttccaagaagccctcgacctttaccgtgtggtgagctaagccccagagttgggaaagggttgaggggtctcttgagaccgcccggccttggtggcccctgacaaggctggcatcccttgcagttggtctccagtggccaggtggacaccgggcagcagcaggcacggactgagctggtctccaccttcctgtggatccacagccagctggaggctgaatgcctggtggggactagtgtggccccagcccaggctctgcccagcccaggacccccgtccccaccgacgctgtaccccctggccagcccagacctgcaggccctgctggaacactactcggagctgctggtgcaggccgtgcggaggaaggcacgggggcactgagggcgcagcccctccaccgcagccctgctgcttctgaggacttaggtattttaagcgaataaactgacagctttg

SEQ ID NO: 15877 - DNA, 50212 bp, Homo sapiens
gctgttccagtgggtcgtggcggtggcggcagcggcggttaggggatgtaacggtcgcccgcctccggcgtgacgatggcggccgtagggtccggaggctatgcgcggaacgatgcaggggagaagctgccctctgtcatggcgggagttccggcgcggaggggccagtcctccccgccccccgccccaccaatctgcctacggcggcggacgcgactctcgacggcctccgaggagacggtgcagaaccgggtgagaagctgctcgccatgtctaccccagttccaggcttcctaggtttcccctagtcccgtcctgagaactgtggccccgacatcagcccccggccagtcccctcaggttgttccctgccatgcctcgtcccctaacccccgcccctttagccacggcccctcccactttctcctcgctgctttcccggctccaccctcagcgttggagcaattcgggggttcctcgctggttcccacccgtggaaatgcattttgcttctgtaaatcacagcctagtcctgctatattttaacccccgttctatcgcctttagacgtcacgatcatagctcactgcagcctcactgccctggcccccgctgagtcattaaggtcccttcgagggttcggtccagagtgttacctgccccaactcttcctcgcttctaccccgccttctctcaccttctgcgatctctatcctttttcctcaccaaggtgggattcttaatccatattgtcactcaaaactatgagaaagacgtgagaagttatttataaaatctctgcagtgctgcctggggaggagggcgtacagaacagttccctaaatcctgagacagaaaaatggaaagaaatgatttcacagtaggtagaaggaattccattagcacagcggcaattaaaaaaattgttttccagctgtgtaggcacaaaatctgtttttataaaatggagatgataagaaccatactactggtagggcgcggtagctcacgtctgtaatcccagcactttgggaggccaaggtgggctgttcacctgagatcagttcaagaccagcctggccaacatggtgaaacccgtctctacaaaaagtagaaaaattagcccggcatgctagcgcgcgcctgtaatcccagctactcaggaggctgaggcgggagaaatcgcttgaacctgggaggcggaggttgcagtgagctgaggtcatgccactgcactccagcctgggcgacagagtgagactctgtctcaaaataaataaataaataaattatactattgcattggagggaaatgaaattttaattgtgatcttcttggcacggagtccagataaagggaggatacctggtagctgctggtggagcttgttcctgccccatgactttctcctgcactgtgattataccgcccactcctggctacagggctctggctgtacctcccatgtgctctctgtcaccaaggttcagtcacactggcctgcttttggttttcctgaggctccatattcttttctgcctcctggcctttgtgattggtgagtcctcagcctgggctttttgctgcaatctgcctgtctggctccttcccatccttcaagtctcagcctgaatgtcgctatcttgaaaggccttctcgaaccccattctaaagcaaacagccaccttcatctgtcacccagcaccctatacttcatagcctttatcttatatgttcctgaaagtgccctttgagctattaaactacatataacaatagcaaattcagagaggcgttatagcaaagtggctaagagcacagactgctgctgatggtatggttggacccaggcagcctgagcttaaactttagtcctgttcttcctggcaggttatgaacttcgctttttcttttctttttttttttttttgagatggggtcttactctgtcatccaggctgtagtgcactgggttgatctcggctcactgcagtctcagcctccctgggctcaggtgatcttcctgcctcaagcctcctgagtagctgggactgcaggcgcatgccaccatacctgactaatttttttgtgttttctggtagagacagggtctcgccgtgttggccaggctggtcttgaattactgagctcaagcgatctgcctgcctcggcctcccaaagtgctaggattacaggcgtgagctactgtgccccgccaagttatgaacttatctgtgcctcagttttcttatctgtaaaatgagaataatgatgtagaaatctctcatagggtatttgtgaggattcaatgaggttacatatcctaggcacttagaacaacactggcatatggcaagtactctattcatgttagctaatactgatattatgactgtgtatttggggtaatatttatttattttttttgtttggcagcacagagttgatctgtcttgcaaagacctagtctaaaagtgaccattcataccagggcccagtaatgctgatcgacagataagacaacatgagtgccatggcttggttgtttgtgttggaatcctggcactaccccttcctggatgggtaacccctcttggcctctgtttcctcaactgttttgttcctttttttttttgagacagagtctcactctgtcgcccaggatggagtgcaatggtgccatctcagctcactgcaacctccgcctcctgggttcaagcgattttactgcctcagcctcctgagtgcctgggattataggcatgggccaccacacctgactaatttttttgtatttttagtagagacagggtttcgccatcttggccaggatggtctcaaactcttgactgagccaccacacccagccttgtttaaattttaaatattactgttcatgtggttttttactcgttgaaaccgctcaaatttctggactgtgaatctgatgtggggaaactgtctacctttggtcactactgtgtctctcctgtacagcccaaagtgctagctttggagccagactgcctgggtttgtatatcaacattgccacttgcagatgtaggatcttgggcctcagacttcttacctgtaaaacaggggtgataatagagccttcttcgtggcttgttgggaggattcaagtcttttatacatataaaagtactaagaggccgggcacagtggctcatgcctgtaatcctagcactttgggaggccgaggcgggtgtatcacctgaggtcaggagttcgaggccagcctggccaacatggtgaaaccccatctctactaaaaatacaaaaattagccggacatggtggcatgtgcctgtaatcctagctactcaggaggctgaggcaggagaattgcttgaacctggaaggcggaggttgcaatgagccaagatctcaccactgactccagcctgggtgacagagcaagactccatctcaaaaacaaacaaaaaaaagtacttagaaacttattcacaggtcaccttctcaccgcggcattcgcccccttcccctgtgctcctaacctccttatctgctttcttctctcttgcacccatcattacttggcatctatttcacatatttgttctgctccttttctatgttctacatacccatcaccagtagaatgtgagccccccgagggcagggatttgtctcttcctcaccactctgtgcttttcacctagcgttgtatttgtcaaaggaatgttgagagaacaagtgttagctgctggtggatggcgtggccacagaagctcagtgtgggtgttgaatgtagcaggacctgaatgggtggccaaggcggctgcaccatgtggtgctggctagggtgggtgcctctgacttgggctttttctttgcaggtgtcactcgagaaggtgcttggcatcacagcccagaacagcagtggcctaacctgtgaccccggcacaggccatgtggcctacctggcagggtaagcagataagggcctcgacgtctaatcattgctagggaatttggagcttggaacctgaagccatccgtaaatcgctctgagcctcatatttttcacctgtagaatgtggagaatggggcctgcctctgagagctgtggagaggattccatagccccctctctgtctagaacagttcctggcatgtagtgagtgcaatgaaagcctttattatgactacaggggggaggtgacagcgattctgggaaagacaggtgattaaagtccacgctgtggtgtcaggtaacctggatttgtgtcccagctctgccatgtatgctgctctctgagcctcttcctctgcctctgtaaaacagagctggtgaccccctctgcttgcatagttgagaagactgaagaagatgctacagctgttcattccataaatactcatgtagcctggcactgtgctaaggacgtcccctctctgggtttgtttccttatctataaatgggcctaaatagtcgtgacctgacctggcagttgtgaggatttaaaacaattacatccctctttctctctttttgttttgttttgcttttttgagacagagtctggctgtgttgcccaggctagaatgcaatagtgtgaataacagctcactacagccccaacctcctgtgctcaagcgatcctcccatcttcacctcccatgtagctgggactacaggcacatgccaccacagccagctaattttttttagtggagatgagatctcactctgtcgcccaggctggtctaaaactcctgagctcaagtgatccctcctgccccatactcccaaagtgctgggattatagccagcttaaggtcttaattagcctagggcctgacagacattacctcagaggaagtgttggtttctatttaagaacatagcaatgttaaagtgccctagaattctcagcgtaaacacctggaggagggggaggaggaggagaccagagagaaccgagggagcttgtttatttgtgggcttttctggtgggaatagaatcatcccaggaccccaacactccccacagttgaggcacattttcctctttcttcccagctgtgtggtggtgattttggaccccaaggagaacaagcagcagcacatctttaacaccgccaggtaggctgaggcctgggcccggggcaggggtggaaccaggggcttggcacgcctcccctcccctacacagcctggagatactcatgggtaggtgctcactcattcacttacatgttggctcagcagcattcgcctgtgctgggtgctgttccgtgtgctggggacacagcagtgaccagaggagacgagaatctctgctggctagagcgagacagactgtaaactagtcagcaaattacgggctgatcatgatcagtgctatggaggaaatgatggaggatgtcttcgggcaggtttgtgggcagagaataggaggaaagccttatcagaaggctcagggaacgctgccttgactctgagacctgaaggaagcgagagggtgacccataagaagctgtagggagagcgcttcaggcagggggcacaggaagggcaaaggccctgcagtggttaagaatctccggcgctttagaagcagccagggatctgggtgcctggagaaaggagcagggaagatgaggctggaccaggcagaagccacatcccgtaggccttgcagccttgtagagggtctgcatagcatgctgagtgcagagagcagccacaggagggcaccacaggccaggaatgtgcttttcacccccagccctccagcagctctattccctgctttgcttttctccacaaaatttgctcccatctctgatatgctgtccagtttcctcattgatggtattcactgtgggtctccctcagtgtgagcactcttgagagcagggactttctctgagttcatttctgtgtccctagcaccaaagagcagtatctggcatattgatggctattttctaagagaaagacttaacatgatttgggttttagaaagatcccttcagctataagtttactggggaaggacccgctcctctgccttggggctaactgatcactgctaccctggggatgtggtcccaatagggctgtgacctttggaaggcacaccatgtccctccttggcatagctcaggctcagctcctttggcccagttctccaggtggatggataaggagtgggttttctcctgcccttatggtccctaaggtacggtccttaagctacggcaggttcttgttatctgacagaagtgcattccctcttgaaagtggctttttggaccttttgctcctaactgtgggttctgttactggtgataagggcagagctgggttccattcctggctcaagcgtctattcactgtggaatctcaggtgagacacttctttcagagccttggtctcctctgaaaataaaatagctgcctccaactgggagagcattcataaggcagcagctacaaaccagagtcacacacacttgcccaatatagtatgttttaaaggttggataagtggacaacatttcaagttttttaacacaaaaatccaaatgtcccttttgtttggagaagtgagaaattctctggcctctggggcccaaattcccctgtggcagtgaggggctgagcttagtgaaatttgtcaggcccgttgtggccagttcctcacacctgtgttgcctccctaatccctgtaggcagtggagtgggtggcctggatctatagtagatggtatgcaggtgtccgcccttggccaccagtgggtgtgcattaggaggtggtgtggccagtgtggggattttcactccaactgcatatcagaatcacctggtccctgtgcctcaccgcccccccaccgccacgcaagagaaagccaaatcagttgatctgggatgaaacttgggcattggcaattttgagactttttatattgaaataatttcagacttagaatagtacaaagagctcctatatacctatgtacctttcacatatttcacaaatgttagcttttttttcttttttttttttggacacagagtcttgctctgtcacccaggctgctggagtgcagtggcacagtctcagctcactgcaacttccacctcccgggttcaggtgattctcatgcctcagccccccaggtggctgggaccacaggcatgtgccaccatgcccagctagttttttgtgttttagtggagacggggttcatcatgttgcccaaggtggtcttgaactcctgagcttagacagtctgcctgcctcagcctcccaaagtgctaggattacaggtgcgagccactgcacttggccaaatgttagcattttaccacatttgctttatcattttttgtctatatacatattaatttgttctgaactatttgagaatcagttgtagacatgatgcccctatatctctaaatacttcacgccaggcatggtgattcacgcctgtaatctcagcactgtgggaggccttggaggcaggaagatcatttgaggtcaggagtttgagaccagcctggggaacatggcaaaaccctgtctctactaaaaatacaaaaattagccaggcctggtggcaggcgcctgtaatcccagctactcgggaggctgaggcaggagaatcgcttgaacccgggaggcagaggttgcagtgagccaagatcatgccactgcactccagcctgggtgacagagcaagagtccgtctcaaaaaaaaaaaaaaaaaaaaaaaaaacttaatcaaataaatacttcagtgtgtatttcctacaaaaaaaaatgacaatctttttaaactgtaatacatccagcaaaatcaggaaatgaaaattgatatatcactctcatccactccccagagggcaccattcaggagtcagcctttgtcccatgaatgtcctttatggccaaaggattctgtctagaatcacacattgcattgagttgtcccctcagtctctttcaggctgacgtggctcctctgtcttttcttgactttcaggatcttgacatttttttttttctttttgagatggagtctctgtcgtcaggctggagtgcagtggtgggatcctggctcactgcaacctgactccccagttcaagtgattctcctgcctcagcctcccgagtagctaggattacaggcatatgccaccatgtccggctaatttttgtatttttagtagagctggggtttccccatgttggccaggatggtctcgatctcctgaccttgtgatccgcccgccttggcctcccaaagtgctgggattacaggcgtgagccacagcacctggccacttttttttgtttttttgttttttgagacgaagtctcacactgtcgcccgggctggagtgcagtggggcgatcttggctcgctgcagcctccacctcctgggttcaagcgattctctgcctcagcctcctgagtagctgggactacaggcatgcgccaccgtgcctggctaatttttgtatttttttttagtagagacggggtttcactatgttggtcaggctggtcacgaactcctgacctcgtgatccacccgcctcggcctcccaaagtgctgggattacaggcttgagccactgcacccggccaatcttgacactgaggattgtagacgaggtattttgtagagtgtcccagcatttgggtttgtccaatgcctcctcacgggcagactcaggttctgcatctttggcaggaacagaccagaaggggtgctgtgttcttcctggtgcctcctctcaggaggtctcctatgactggtggtgttcactgggagcacttggccaaggtgttgcctgccagattcctccacttcaaagcctctcttttcacctttgtgattagcaggtatcctggggacatctttcctgagacagtgcaaatattatcttgttcctcaccaaactttcactcaactaatcttaggctttgacacttttcagatgctccccagggaaatctaatgtacagccaggactgagaactactggcttagaggtcagggctctgccctgtctggttaggtaactgcaggcaggggacttccttgtgttgcagtcacctcatctgccaagttggttcatgagagccctgactccatgaagcatgcttgaggaatcagtgcactgatggccagacagcatttgccagagggccaggcacaaggtcagggcatgcgacaggttagaggtggctacgggcaacagaaacccctccacagcatggcttaaaacccaagagcatgctcttcctgcatgtcataagtccagaggtgggcagcccaggggctgtgtctctgaacgccacattttttttttctgtctctctttttgagacagagtctcactctgttgcccaggctggagtgcagtggcgcgatcttggctcactgcaagctccgcctcctgggttcacaccattctcctgcctcagcctcccaagtagctgggactacaggcgcccaccaccacgcctggctaattttgtttttgtatttttagtatagacagggtttcaccgtgttagccagggtggtctcgatctcctgaccttgtgatctgcccacctcagcctcccaaagtgctgggattacaggcgtgagccaccgcgcccagccccacttctttttttctctagacggagtcttggtctgttgcccaggctggagtgcagcagcacgatcttggcttgctgcaacctctgcctcccgggttcaagcaattctcctgcctcagcctcccgagtagccgggattacaggctcctgccaccacacctggctattttttgtatttttagtagaggtggggttttgtcgtgttggccaggctgttcgcgaattcctgacctcaagtgaaccacccacccctctgcctcccaaagtgctgggattacaggcgtgaggcaccgcacccggcccccattccttctctcctgttccaccccatttattgtgaggcttctggtcttgaagtcacttcatggcccaagatggagttctggctgtcgtgtgcgtatttcaggaggggaactggtaggaagcagggcaaagggttccctttgacgagtatttcaggaagtcccacacagcatgtcagtttacttctccttggccagactaagtcatgtagctgtacctgcatagttgcaagcataaaactggggttatgtcagtaaggaaagagaggcgagtggatatccaggaggcagcttgccctgtttgttgcagtaaggagccacgggaagcctgggaagcaggttgacttgatgatgaatattccatgaagttgccaaagtctcacttagcgacatttacttagttatctacacaccaatttaccatctcacgtagggagacaattattagattgttaaggaacaaaggtaaaaataagattaaaagagagaagggagtagaaggaaaccatacaatctgggaacagtgaatcttgctgccagaaacctacgagctagcctgttcattcagtgcttgtgcaggctagctaggagtatcagaaacattttggctctttatggattttccagaacaccttgagtatttagcagtggagcacaggctgcaggctaccttgatgtgatgcctgccaggatcctcccatcagcaccacccgtttagttaggccaggcctgtaccatttcctgcatctctatttctcagtgttacagggtggatagggtcttaggatacccactgcggcagagggagaagaaagcagggtccgcatacagtgtctactccatttgggtttggtgtctcagggcggaaggggcctttgcatttacccccatttctctgtgtgctttgctgggcacaccagcggcactggctctgtgggagctgcttgagctcacctctgctggcctcttccgaggcttgggaggcagaagagggcagagtcctatcagagtcgccaggatggggtctggctggccaccctcagcggaaccagtgatcagctcttttctttatccccaggaagtctctcagtgctctggccttctcccctgatgggaagtacatagtgacaggggaggtgagtcgtgatcgtgactgagtgggagtcgggggctggggggtcttggaagccattccttctgctcccggcaggcctgggagtccctggaatagctccttcctgggccagaacagccctgtagcagatgggggaggtggcttttgggcacatcctgtggcaatgccatcttcggccttgacaaccctctagccctgcccagtacagagcccagcagcagtaacgaccccaccttccctagaatgggcataggcctgctgtgcgcatctgggatgtggaggagaagaatcaggtggcggagatgctaggccacaagtatggtgtggcgtgtgtggccttctcacccaatatgaagcacatcgtgtccatgggctaccaacatgacatggtgctcaacgtctgggactggaaggtaagagccgaccagcaggcctgtggcaggcagccagctgccacagcatcctatgtcttgggcacagggagagctacatgagaggacgcagtaaagtgctcactcacccaacagataacagctattgagcacctgtgacatgctgatcccttattgtagggcacaaggcaggctcccagctagaagcattatacatatttttatattgaccagctgtgaccttaggcaagtgacttaacatctctgtgagtctgtttcctcctctgttagatggatatagtagtacttatcttgttgagttgtgagactttaatgagttgataagcactggaaggctgggctttggaacagctgtggagctggcagaagtgggtaccaagtcctggctctgcccataacccactatgtgaccttgagcacatgacatctccccctctgagcctggtagggttggggagaagcgcctccctcgtggggcttttgagggattgaggaaatttcatgggttatcctgtgaagggctcagggcagggcccagagcaggagccccatctgtgacagccataggttgtgttgtccttacatcccagccgtgactgtccccaataccatgtgtgggctgcagagcttagacccttggagagagctctggaacatactgtcccatggggaccattccaagcctctgtcccttcctctgtcggtgaggaatgagcagggtgccccacataggtttccccatacagcagctccctggagggtcccaggaagacagacttggagtggggacgagcagggagttccagcctgagggcaaaggcacaaacagtccagtggaatgagtgctggcatgagcttctctgcacttattcttccagaaagacatcgtagtggcctccaacaaggtatcttgtagagtcattgccctctccttctcagaggacagcagctattttgtcactgttgggaaccgccatgtgaggttctggttcttggaagtctccactgagacaaaggtgagtttctgtccctgcccctttagccaggccctgagggagtcaccatcggtggcagcatggtctcctgtttctccctgagatttgagggcagcggtctcgggccatttggcctctcaggggcccagctgctgcttctgggcctactctcagggtgctgatgcacaggccctgccaggaaccccctgaccctgggaccagctctcattcttggactgctgctgtccagcccctctgtccagagtggcagggttctagtgttttcttcccttctccatttggaagagcttcttagagttctcctgttttgttgtgtcctatcatctggtcatgcagggcccagctgtgtggacaagtatctcactacgccctctgtgtctccaggtgacgagcacagtgccccttgtagggcgctcgggcatcctgggcgagctgcacaacaacatcttctgtggtgtggcctgcggtcggggccggatggcgggcagtaccttctgtgtgtcctactcgggcctcctctgccagttcaatgagaagagggtgctggagaagtggatcaacctgaaggtaccacctccctctctgccatcagctggacagactctttctcgtgatatgtgtctgcaggggtgctcatcagcattgaccacacaggttctgcttatgtgactagtggtgaatgacgcccactctctgagcttaaggttccacatctgtaaaatgggagtactgctgccctccccgcagagctgataaggaagtcacgtgagataacataggcaaggcagtgagcacggtgcttggtaccctgaaatgggctcaaggtgacagttgttttcccatgactatttgatctacttcacatttcttttctcctttgagcactctggctggtagaggattgcatttttttttaattaatttatttttttttattgatcattcttgggtgtttctcccagagggggtttggcagggtcttaggacaatagtggagggaaggtcagcagacaaacaagtgaacaaaggtctctggttttcctaggcagaggaccctgcgggcttccgcagtgtttgtgtccctgggtacttgagattagggagtggtgatgactcttaacgagtctgctgccttcaagcatctgtttaacaaagcacatcttgcaccgcccttaatgcatttaaccctgaatggacacagcacatgtttcagagagcacagggttgggggtaaggtcatagatcaacagcatcccaaggcagaagaatttttcttagtacagaacaaaatgaagtctcccatgtctacttctttctacacagacacagcaacaatctgatttctctatcttttccccacctttcccccttttctattccacaaaaccgccatcgtcatcatggcccgttctcaatgagctgttgggtacacctcccagacggggtggtggccgggcagaggggctcctcacttcccagaaggggcggccgggcagaggcaccccccatctcccggacggggcggcggcagggcggaggcggacccccacctccctccctgacgggccggctggctgggcaggggctgacccccacctccctcctggacggggcggctggccgggcgggggctaaccccccacctccctcccggacggagcggctggccgggcgggggctgactccccccacctccctcccggactgggcggctggccgggcgggggctgacccccacctccctccgggacggggcggctgctgggcggagacgctcctcacttcccagacggggcagctgccgggcggaggggctcctcacttctcagacggggcggctgccgggcggaggggctcctcacttctcagatgggacggccaggcagagacgctcctcacctcccagacagggtcgcggccgggtagaggcgctcctcacatcccagacggggtggcggggcagaggcgctccccgcatctcagacgatgggcggccgggcagagacgctcctcactttctagacggaatggcagccgggaagaggcgctcctcacttcccagattgggcagccgagcagaggggctcctcacatcccagacgatgggcggccaggcagagacgctcctcacttcccagacggggtggcggccgggcagaggctgcaatctcggcactttgggaggccaaggcaggcggctgggaggtggaggttgtagctagccaagatcgcgccactgcactccagcctgggaaacattgagcactgagtaaacgagactccgtctgcaatcccggcacctcgggaggccgaggctggcggaccactcgcggttaggagctggagaccagcccggccaacacagcgaaaccctgtgtttggtggagaccaaaaaaatacgaaaaccagtcaggcgtggcggcgcgcgcctgcaatcgcaggcactcggcaggctgaggcaggagaatcaggcagggaggttgcagtgagccgagagggcagcagtacagtccagctttggctcggcatcagagggagaccgtggaaagagagggagagggagaccgtggggagagggagagggagaccgtggggagaaggagagggagaggaggattgcattttttaaaaattggaggtaccattgatttaataacttttcagtcaaaaaagactacacaaaatacataaacttttatttatttttatttatttttactttttttttttttttgagatggcgtctcacttgttgccaaggctggagtgcagtggcgcaatctcagctcactacaagttccacctcccaggttcaagcaattctcctgcctcagcctcccaagtagctgggattacaggtgcctgccaccacgcacagctaatttttgtatttttagtagagacagggttttaccatgttggcctggctggtctcgaactcctgacctttagtgatccatccgtcttggcctcccactgcgcccggccataaacttttaaactaaagcatgatctatcgatacattgcagagcttctttcctttagtatctgaaggtttgagtcaaagctgttttcccatctggaatcagttgcccatttggctatccgcccgagcgttgtggtttcctctcctgttcctggcctgcctttgtgactcactctggagatcaccttcgaggttaatggcttgtggaagagttccaagttttatctctgtcctagttggttaaacatcattttctctttttcaagcaagtgaaaagctttcaatagatagatgtttatttcctaagcactaaatgactcataaattaagtccctgtagatttggaaaaactccttaaactgtatctagaggtctagcacttcctagtaggatagacagtcctttctagatactgtaacttttttctgtaccgctttggagtacagtctttatgaagttgtttgtaagcaaaagggaataaaatttaagcctaaaggctgggcgcgatggctcacatctgtaatcccaatgctttgggaggccaaggcaggtggatcacctgaggtcaggagttcaagaccagcctgaccaacatggtgaaaccccatctcaaaatacaaaaaattatctgggtgtggtggcggccgcctataatcccagctactctggaggccgaggcaggagaatcacttgaacccaggaggtggaagttgcagtgagccgagattgtgccattgcactccagcctgggcgcaacaaaaaactctatctcaaaaaaaaaaaaaaatttaagcctaaaattcaaccctgttactacaagtgacttacctgaagttgcagtctgctgaacaggtattttccatacacagctacgtttctctgtagacagcagtgacaattctgtttccgttcatgcctctgcctacctgctggcacatgtctttcaatagcagcagtatgctatatcctgatttcacaaatcttaaaatatgctaaaatgggtgtcttagacccaaggaactgtaagtcttctctggaggcctaaggctgctctgtcagtccccatatccccgggccaggccacgtgaagcaccaaatccactggggtcccttttgcccctacaggtctccctgtcttcctgcctctgtgtcagccaggagctcatcttctgtggctgcacagatgggatagtccgcatcttccaggcccatagcctgcactacctcgccaacctgcccaagccacactaccttggggtagacgtggcacagggcctggagcccaggtactgccctgtggggagagggaatgggaggggcccacccagagtctgtccactggcattcatccatgcttccagatccatctatctgtctgtccatcccacaaatacccatcatgactctcagccctgggcattacaaagcagaaaagtccttgccttccgaggcaagcctcacagtgagaagtgaggctgggtagggggaagaaacagtgagaaaacaaaggaataatatcatttcagatagcggtcagcatggtgaagaacagtgcagagcaggtgtgaatgtggcggagtgtttccatccacatggctgacccctactaagtggctgctaagtgccagccctgggctggaagcaggacatgcctattataatgaagcagcaaaatctctgcctctctgcagtatagcaagggggctcgatgataagcaagtacacgaaaaagataatttcaataggcatgagtgctttggggaacacagcagggactcgggaaggagagtgactggggtgggctgtgctgattgggtgcctggtgagaaggagctgctgtgtggagagctgggtcccagcagttgaggtgacagcacactgggcttgttacgttgcaggaatagtaagggactgtgtggccagagcccagtgtgtccggggaggatggtgggagatgaggccagtgtggggcgcctgtagtctatcctcaggtcagtgggcagttgctggggtttcgggcgttggggtaaatgaccaggccttacatgttaggtccctcagctgctgtgtcgagagtggatagaagcactaggctgtggctttcttctcctttgttgcaagtctgttttatggaattgggggctacctaaccagggggtgccaggtgcctagggctgcctctttgtggatttctggatgctagctcctgggtgccttttccacgacagggcctgaacaggggaactgggtgtcatgaaggaaaggagggggcgagcaacccacaggcagtgttgtgttgtagtagtcgggctcacagctctgctgtcttctgttgtgctctgtgaccttgggaaggtgactatacctccctgtgcttccgttttctcatgtgtaaaatacagtacctagctcttattgtggttgtgagaatttattgcaggtaaaactctcggcctggcacagtgtaaatgctcagtaaactgtagccttcatagggagaccccaggccaagggacagctccccagcctccttaggacacagaggctttttgatcatgcgttggtgaggccaagaagaggtgggacctgagatacatgcctattatctttctatgctcagagagagagcaggagcttgggttgggtgaaatgatgggcgataaatgttcataggaatcaaaaactcaattgctctcggggccaggcaaaaatttccggtttgtagcctctatatgaaaagcaaagcagaggaagagggaagagggaaaagtagaattggagcaggagagatggatggccacaaataccatgagggatggcattgccggggaggcatctccactgtcactagaggtggctgtcactactcagtgacattgatggtgattgattacccatgtggccttgttagcttcctcttccacaggaaggcggaagcagtctacccagatacagtggcactgaccttcgaccccatccaccagtggctgtcctgcgtgtataaggaccacagcatctacatctgggatgtcaaggacatcaacagagtgggcaaggtgtggtcagagctcttccacagctcctacgtttggaacgtggaggtgagccccccccccacccccttgcccctgcttggcctctgcacagttccccacagtttgggaacccattcagtaattccttcagaagatactcattgactccctcctatgcatcaggccctgtcctaggtgctgaggacacagacacaaaatccctgcccttaacaagctcacatttggatgggaaaggaaacctggaaacatcatcagtgaataacacgccaagcagcagtaaccctctgaagaaaaatgaggcggggaaggggaaggggaatgcaggtggtattctagagaggagaggggtcagggaaggcctccctgaggacatatgagcagagacctgcaggaaatcggggagtgagacctgcaactgctggggagaaccacaagcacagaggccctgcggcaggaacatgcactccacagagagctttgctgtggaggtcgtttatgtatttcactgctttttttaaaaaggagttgaagacggggcatggtggctcacacctgtaatcccaacactttgggaatctgaggcgggaggatcacttgagtccaggagtttgagaccagcctgggcaacacaagaccctgtctctacaaataatttttaaaaattagccaggcatggtagcacacacgtgtggtcccagctactcaagaggtggaggcaggaagatcacttgagcctgggatgtcaaggctgcagtgagctgtgattgtgccaccacactcccacactccagcctgggtaacagtgagaccatgtctaggaaaaaaaaaaaagttttgaagtttttattttctgagaatgaatttgtgggtttttaaaaattctctaaagttaaccaggcacagtggctcatgcctgtagtcccagcactttgggaaatcgaagtgggcagattgcttgagtccaggggttcgagatcagcctgggcaacatgaggaaaccccggctttacaaaaaatacataaaaattagccaggcgcgcctatagttgcagctactcggcaggggctgcggcaggggggctgaaaatttcttactgggaatgtttgtcctagagaaattgggttttcagtggccagattcaggatcgtgagaaagaactttgtccttttgaataggcagcattcagcctatgactctggttgaatctgtctgccttcatggggctgacgtttttgttgacagcactttttttccactcaaagaatgttttttaataacttttaaaattcctgtatgaaatttttaaaaatttgggataataggtgaaatattacagataaggctacagtccacattgatgacttccctgcccccagttctgctctctctcgccctcaccattatcaattttattatgggtgtcttcagttgattttctttgcatctccttattgtttatgtatatagctgttcaacaacagtatctgtggatagatcttttcatcagttctagaaaattctcagccaatactgcttctaccctcttctctctctttttttttttcagacggagtttcactcttgttgcccaggctggagtgcaatggtgtgatctcggttcactgcatcctccgcctcccgggttcaagtgattctcctgcctcggcctctcaggtagctgggattccaggcatgcgccaccacgccttgctaattttgtatttttagtagagacggggtttctccttgttggtcaggctggtcttgaactcccgacctcaggtgatccgcctgccttggcctcccaaagtgctgggattacaggcatgagccaccatgcccggcctattcgctctcttctaaggttctatctaactctaaggttctatctgtattcttcatgtttctgaaaataaaaatcacacaaaagatatgtagagtttatcaattattgttagcagctttttttcccccccaagacggaatctggctgtgttgcccagtctggagtgcaatggcacaatctaagctcactgcaacctccagctcctgcgttcaaacaattctcctgcctcagcctcccgagtagctgggattacaggcagccgccaccacgcctggctaatttttgtgtttttagtagagatggggtttaaccatgttggccaggctagtttcaaacccctgacctcaagtgatctgcctgcctcggcctcccaaagtgctgggattacaggcgtgagccactgtgcctggcctgttagcagctattgatgctcagttcctggacccttttatttattgagggttgcaatatggtgatattctaaatctataatttatttttattagttggactacttacgtgaagagatatttgctctcatctgccatttggtcacccagtgctatacttcatataggaaaggcaggagaaatacttgattctttccctttatttaccagttttcaagataatgaattggttccctatcctctaaaggtaactagttttatttaatatcattataaactcatatatatttaaatatatcagatatgttttaatctattgtaattattaactttattggagctcatatcatcccatctttggccagtgagagcctcttaacattggctcctgagccctttggacatgaccctagtatttcttgatagccaccttgctgcctgggatgccaatatgttccagtctcatcttgtacatttcctgtcacacatcaggaatcaaccatttctcgaaaagaccatgtttttttttttgggctgggtgcagtggctcatgcctgtaatcccagcactttggaaggctggggcaggggaattacccgagcccacgagtttgagaccaacctggccaacatggtgaaaccttgtctccactaaaatacaaaaaattagccgggcatggtggcaggcgcctgtagtcctagctacttgggaggctgaggcatgagaattgcttgaacccgggaggcagaggttgcagtaagccaagatcaagccactgcactccaatctgggtgacagagggagatcctatctcaaaaaaaaaaaaaagaaaaaagagaaagagaaggccagggtttttttttagtacaaattgggacttcagaatcacaggttgggtgttagggatgctcatcgctattgggtcgttcttccagaagcctagttcttaaggacacaggggatggtggaattagaatatccccagtaactcatttgctttttcccacattatacatgcaacagtctgagaatggacaacttttcaattctgaagatagttaaaacaattgtaatgcatatgttctctctgttctctccaatttttaaaatagttatactatatttacaggatctgaatatgtagccattatatactatagtgtctcccttttgacccctgtttattttggaatggggaattatatatgtgtgtatatatgtatgtgtgtgtgtgtatatatatatataaaatgataaaatatacatgacatcaagttcaccatttcaactattttaaattgtaccatttggtggcatttagtacacttacagtgtcatgcagccatcattactctctagtttcagaacattttcatcacccacccaccccaaaaaatcctgtatctgttaagcagtcctccccattccccactccccccatccatggaaatgactaatctgcttctgtctttatggatttgcctgttctgaatcttttcttttctctccttctttccttccttccttccttcctttttttttttttttttttgagatggagtctcactctgtcgcccaggctggagtgatgcagtggcacgatctcggctcactgcaagctccgcctcccgggttcacgccattcttcttcctcagcgtcctgagcagctgagactacaggcacacgccaccacacccagctaattttttgtatttttagtagagacgaggtttcaccatgttagccaggatggtctcgatctcctgacctcgtgatccgcccacctcagcctcccaaagtggtgggattacaggcatgagccaccatgccaggctgtttcctttcttttcctctttctttcttttttttttggatggagtctcgctttgtcacccagactggaatacagaggcacaatctcggctcactgcaacctccacctcccgagttaagctattcccatgcttcagtctctagagtagctgggattacaggcacatgccaccatgcctgatgaattttttgtattttagtagagacagggtttcaccatgttgcccaggctggtttcaaactcctgagctcaggtgatctgcccgcctcagcctcccaaagtgctaggattacaggcgtgagccaccatgcctgacctgaatattccttataagtgaaatcatagactatgtgggcttttgtgcctggctttcacttagcataatgttttcaagatttatccatgttgtagcatgtgtcagcacttcatgcctttttatggtggaataatatttcattgtacggatagaacacattttgttctctgttatcagttgacggccacttgggtttttttctaccttatggctgttgcgaataccactgctatgaacatgtaagtacaagtttttttgtttttttttttttgaaacggagtctcactctgtcgcccaggctggggtgcagtggtatgatctccgctcactgcaacctcaggctcccaggttcaagcgattcttctgcctcagactcctgagtagctgggattacaggcacgcaccaccatgcctggctaatttttgtttttttagtggagacacggtttcgccgtgttggccaggttggtctcaaactcctcgcctcaagtgatttgcccacctcggcctcccaaagtgcagggattacaggcgtgagccactgtgcctgacgtagttctttctttcagttacatcactttgtttctgagtttttgtaggttgtttttcataccttggatcattttttaaatatcttttaccttcttttgaaacagtaggcccagcgtggtggctcacgtcggtaatcccaacactttgggaggccgaggcaggtggatcacctgaggtcaggagtttgagaccagcctggccaacatggcaaaaccctgtctctgctaaaaatacaaaaaattagctggccgtggtggcgggcgcctgtaatcccagctacttggggggctgaggcaggagaattgcttgaacccgggaggcagaggttgcagtgagccaagatcgtgccattgcactccagcctgggcgacagggcgagactctgtcaaaaaaaaaaaaaaaaacaaagtaagttatagtttttatctttttttgtgaaaatatgtttctgctgtgcttttttttttttttcttttttaagagtaactattggatttgaccttggtcctttcctgttgttcatttttatgtgataccagtttttctgaaattttagaagttggtgtgcttcaggacagattttccaactacacaagaagaactctgtcttttcttttttttgtgggggtggggtggcatgttttgttttgtttttgaaaaggagtctcactgttacctaggctggagtgcagtggcatgatcacagctcactgaagcctcaacctcataggcacaagcagttctcctgcctcagcctcccgagtagctgggaccacaggcatgcactaccatgcccagctaattttttatttttggtagagatgggatctcattatactgcccaggcttgtttcaaacttgggctcaagcagtcctcctgcctcagcctcccaaagtgctgggattgcaggcttctgttatttttatactgtgttaaaatatggcagcctgctttctgatacttcctttttgtggtcctctttatctgttatgtctcttctttcgtctcaatctcctctttactttatttcttctgtccctgttgtgattggtcaatttcatttctactcttagcagtttctcttcagtgtggagctttgtcctggaaggacaaagttcacaggatcttctccagtccctttaggccttaccccttgcactcaactgctgttggggtggatgaaaccctcctactttcagctgctgttcagtttggcccagtgtgctttccaatgaacacctcttggctactttggaattatcctgttgctgggtctgtcagatgccttattacttctctgtctcccacatgcatgctgatgatatgtaggtcttgtgattggtggtggtttgtcccactcacttgtattttggggtttatgggagtattttgtcactgagttttgctataaatgttgtctgtaggtttgggttttgctatctggttgatgtttttcttatgtcgagattttgggagattaaaaaaattaatgccgctactatcatcttcccagttctcaatcttccgtattttgaaatctctttatatggtggctctttgtccttctcagcttcattctaaatatctttagttttgtctttcagttcacttaattttctcctcagttatatctaatctttggtttttaatgtttttatttttttattattttttttttgagacggagtctccctctgccgcccaggctggagtgcagtggcgtgatctcggctcactgcaagctccgcctcccaggttcacgccattctcctgcctcagcctcctgagtagctgggactacaggtgcctgccaccacgcccggctaattttttgtattttttttttttagtagagacggggtttcaccgtgttagtcaagatggtctcgatctcctgacctcgtgatcctcccgcctcggcctcccgaagtgctgggattacaggcgggagccaccatgcccggcctattttttatttttttatttttatttttttgagatggagtttcgctcttgttacccagactggagtgcaatggcgcgatcttggctcactgcaacctccgcctcccaggttcaagcaattctgctgcctcagcctcccaggttcaagcaattctgctgcctcagcctcccgagtagctgggattacaggtgtgcaccaccacgcccagctaattgtgtatttttagtagagacggggtttctccatgttgaggctggtctcaaactcctgacctcaggtgatccgcccacctcagcctcccaaagtgctgagattacaggcatgagccaccgcgcccggccaatatgtttttattattcatttctagaagctgttctgttttggtctttttcagccctgcttggttaatctttataatttctggttggctgcacacttttaatcttgtcaaaattatcttttagttcttcaaacatattgaatgtagttattttatattctgtctgataattccaatttgggtttttttattttgtttttggtttgtctgtctgtttgttttgagacacagtctcatatgttggccagagtagacttgaactgctggtctctagcagtcctcctgcctcagcctcccaagtagctgggactacaggcatgcgccacctcccctgatttaataattccagtatttaaagtcttgctagactctgttgcttctgctgcttcttgctgatggtacctcgttttcttttgtgcttagtcatgtttgattgagttccacatttcccttggaagtttatttgagggtatgtgttaaggcctaggctgaaggtgggacatggatgatatatggtagcattttgtgtcctttttttttcttgtttatttttagcatagaaggtattgcacgatacctgtttatctttaacttactttttttttttccatgaaaatgcaacagtaagtcatagtgctgtcattgagtcatcctttgccttgtcctctgggaactgtaggtgtatcctgagtttgaagaccagagagcttgtttgccatcaggatcctttctgacttgttcttcagacaacaccattcgcttctggaacttggacagcagccctgattctcactggcagaaaaacatcttcagcaatgtgagtggcttcctttgtgaaccatctttcaggaggaacaaagacctactgtaagcttgaatgcaggggcaggagagagtctgatggaccctagatgttaggttccatgagggcaagagccggcaaccaaggcaggtccctctctgcatcactgcctcttgtttctctttctcctgccccctctctgaggtggcacgctctatcctctctgattctttgccagttggctcctgctctgcagatgtgtggacgtggccactcccggcagcccaacacacccagcccaggtgaaattgcttcctaagtcttgagatggaattccctgggagagcacctgatgagccagcccattcagctgccacacagtgaggcctcacgggggtatgggcagaatgctggcgagagccatgatgggaggctgggaagaaaagtttgctgaggaaattttggttagtattgcaagcccagtgagagggcgtctctggggagctgagacctgagtcatgcattcatttattctgcagacacttattaacgtccatgccaggtgcttggctacatgctagggacacaacagtgactaagactcttctgtcctgtggcacacacaatctagtgagggccgacagtgaactgacagccgaccatgttaatgcacaatcacaagtgcgaaaagcactgtgaaggaaaatgtgcagggtgctagtaggacatagagcagcagcatgtgaacttatctgggacatccggagcagcttcccgcggaagggacagctaagttgagattgggaagagtaaagagggaaggggagagggtctatacttagggaatagcctgtatgaaggccctggggtgggaaacagctgggtgaattggaaaacctgaaagaggccagtgtgattggaactaaaaagaccctccatgcaggaggctgtagcaggtgccctgcaggtgcacctttattactcccctcattccctacccagtgctaccatcgtctcctctgtacctgtgacatacatgctgtttttggctgcacacaatagaaaaactcaaaacaagaggtaaaagttaggtttctgactcatgaaagtagtctgaaggtaaccagtttagaccgttctgcaggaagcccttagggatccaagggccttccagctctctactctgtcatttgagggagcaggctatgtcctcatgacccagtgtggctatgggggctcctgctatcatatctgagttccaggctgcaggatggagaaaagacagcagaagaatacgtgcttgctttatatttaatagttcagaatttattcacatattcttatctagctgcaggggaggcaaggaaataattattctgattggtgaaactcccagctcaaaattagagttgtattactaacgaagaagagactggctatggagggacacgatttcagaggtgcttctgagctgctcgtgctgacctcagccctgtccttcctgcagaccctgctgaaggtcgtgtacgtggagaatgacatccagcacctgcaggacatgtcacacttcccagaccgggggagcgagaatgggacacccatggacgtgaaagccggggtgcgggtcatgcaggtcagtcctgacggccagcatttggcttcaggcgaccgaagtggaaatctgaggcaagtgggccctggcagtgtccagtgtacacctcccagctccagctcaggttctcagggcagtgggcagaagccctggccttggcacctcctgctgcccattgggaatgaggggctgtgaatagtaatcccatgaacagctcccattgggaacttaagctcgtaagaggcttccagaagggctgagagcagagtaactaccaggacctcagcagctagggtgtgcagattttgcctatagagtgtacaggcaagctcacatgactctagggcagcgtgacactttcaccagccacatggtaccagtgctgaactgtcaccgaagatgccagctggaggagggtcctggtggctctgggagaggggctatgagggtgggatagctgagagttcaggctgcttatgtgccctgttgaggtttggcaggatgttaccaacccagtaggtgctagtgggacataggccctgttgctgggaccaggtttaagatgacaaatgacagctgtgaccacctgggtattggagccactggggaatggaggagagttgggggaaactagaggggacataaaggggcagcagccaccaggcagccccaggagagtaggctacaagttttcaaactttcctgttgtcaagaagagcagaaagtgccgatttttttctgtgaaattcgataatttttaaatattggcacctgttttgatatcagtcactgtatgagaccagctcagtgtgtcagtgagctgcttacattgacatggcactgtctggagtggcaaaacggtaccaagagccaacatggggatagtgctcttcccccttggtgggcgctggcctgagcactgtgttgactgatttaatcctctcactgacccctgatgtaagtgatgttattggcacaaggtgtctggagtaagatcacacgggtagaatgaagaagctgggatgactcgatgactgatttcatttggggagaatcaggaaggtctagatttgagactcttttaacaatgagagactggaatcaaatgttctcatccatagctcctatcctggactatgacctctggcccctagcccctggcccctgtcctaccccagggaccacctctgatgcagccctacgtaaacacctgcccccctagaagactgtcctagatccctggggctctgttctggcccaggcaccacaaggggctgctgcctgctgaggtgctccctggttcaacacggctccctttacgatggcaggtttctaaatgagaaaagtggttgtgcatgtctagagtatttggccatgataaggggttctcattgttggtggcctggccattctgacctattctagaagtggtagagcacatggggctggggtgtggggcttcagcgggcggtgtgtgtctcccaggatccacgagctgcacttcatggacgagctggtcaaggtggaggcccatgatgctgaggtgctgtgcctggagtactccaagccagagacgggtgagcccgcagcaggggtggaatgggggtcaggcagggaggcagcccccctggcagggccacagaaaggggtagttggtgtctggtgggactgtggatgacagctgggagttttgtgttcggtaagggcccctgtagctggaccctgagaccagagtggctgggacttcagaaagcaagacacccgcaggcaggactcagcttgacttgcccgctgctggtgccagcacccaagccaaaggggtggatgtatgaatgagtgaattgtgaatgagaagatagattgattgttaggcattattttcaaaaagtttgaagcctatagaaatattgggagaatattataatgaacaccccataggcttcacccaaattcctcaattttttttttgagatggagtcttgctgtcacccaggctagaggggagtggcaccatctctgctgactgcagcctccacctctctggttcaagtgattctcgtgcctcagtctcccatgtagctgggattacaggtgcctgctgccatgcctggccaatttttgtatttttagtagagatggggtttcaccatgttggccaggttggtctcaaactcctgacctcaggtgatccgcccgccttggcctcccaaagcgctgggattagggcatgagccaccacacctgacctttttttttttttttttttttttgagacaagagtctcactctgtcgccctggccggagggcaatgacgcgatctcagttcactgcaacttccgcctcccaggttgaagcgattcccctgcgttcaagcgattctcctgcctcagcctctcgagagtagctgggattacaggcacgcccccaccacacccggctaatttttgtatttttagtacagacggggtttcaccatgttagcctaggctgaaggctaggaccatagtagggtctccagacctcatggtcctcttcattaaaacaacagaaaattccttctgggccatcagatgagatcatgagataggagaagatttccaagtgaagatttcgtttgtttcaagacagagtcttgctctgtcacccagatgatatatggatgatatatggtagcattttgtgtcctttttcttgtttatttttagcatagaaggtattgcacgatgctggtctcaaactcctgacgtcaggtgatccacccgccttggcctcccaaaatgctgggattacaagcgtgaaccaccatgcccggctcctcaagatgttttctaggctgggcacggtggctcatgcctgtaatcccagcactttgggagttacagagttggtggagttatatcctgatgtgattttccccatgttcttctttcgttctctcatcccccatgctgtgtgccccaccaacttgtcttgaaacatatcttcactcggttcgcctctcctgatctcccctctgcctcaggtcatgttattaggcctcagacatagcaagtgaccagagtagggaaggctggtggcagatgggagtctggccacaggcagtcaataggacctgaacaaggcccaggtagccagacctcagagggtgagaggacactggttttggaagaggctgagaggttgccagggctttacccagcacagacccagcaggcaagagcgctgggctctgctggggcgtctgctgtggatgtccctggaggagcgtccatgcgcccatcgagactcatcctccctgagctggtggtgaggaggtgaaatgccagggtgtgggggctctgggaaagaccacacagagctaagggagtggcccttgccaggcttgggccaagttggctacagttgaagaaccaaagaccccttctccgaggactgggcagcttggtcacactgcccttctgggaggccagggcacccacgcagccttcaggaaccagtctcattctctcctctcacagggctgaccttgctggcctcagccagtcgggaccggctgatccatgtgctgaacgtggagaagaactacaacctggagcagacgctggatgaccactcctcctccatcaccgccatcaagttcgctggtgagcccctttcttcccgctccctgcgccttgctagctaccctgctaaaaaaggattcattctttcaactctcctgtaaaatatatatccaaacaagtgaatacagtatctgtgtacagtatacagaataatgactggggccgggtgtaatggctcacacctgtaatcccaacactttgggaggccaaggagggtggatcacctgaggtcaggagttcgggaccttcctagacaacatggtgaaaccccgtctctactaaaaatacaaaaatttgctgggcggggtgttgtttctgtaatcccagctactcaggaggccgaggtgggagaattgcttgaacctgggaggtggaggctgcactccagcctaggcaacagagtgagaccctgtctcaaaaaaaaaagaataatggccaggtaccatggctcacacctgtaatctcagcactttgggaggccaaggcaggtagatcatgaggtcaggagttcgagaccagtctggccaacatagtgaaaccccatctctactaaaaatacaaaaaaattagccaggcatggtggtgtgcacctgtaatcccagctactcgggaggctgaggcaggagaattgtgtgaacccgggaggcggaggttgcagtgagccaagattgcgccagtgactccactccagcttgggtgacaatgcgagactttgtctcaaaaaaaaaaaaaagaagaatataggccgggcgtggtggctcatgcttgtcatcccagcactttgggaggctgaggcaggcagatcacctgaagctaggagtttaagaccagcctggccaacatagtgaaaccccgtctctactaaaaattcaaaaaaagtaaccgggcatggtggtgcacacctgtaatcccagctacttgggaggctgaggcaggagaatagcttgaatccaggaggccaaggttgcagtgagccaaaattgtttcactgcactccagtctgggtaacaagagcaaaactccatctcaaaaaaaataaaaataaaaaataagctgggcgtggtggccgaagtgagtatccacagttcttaggagcaaggtttgaactaggacgttgttgatagcagagactgttctaattgctcatggtcgtaatattgttaaatacggtacttggattcaccacgtgcaggttaagaagcagaacattaccagaggcttgcaggccttctctgggtccctcccaggttacccttcctcccttatatggggctcactcccttctgtgagccaatgactcctccttgagcaacatctaatacttgtatgtcaggcctggaccctctcaaatgtcctgtcatgaaggagcatgtgtgatgtgcccagactcagagttttatatttgttctgtcatttcatcctcaccaaactgttattctgtaaagaaatgagacggccgggggcatctcacgccattgcactccagcctgggcaacaagagcgaaactctgtctcaaaaaaaaagaaatgagaataataaaagcaagaatgtttctaatgcttaccatgtggcagtccctgttccaagggcttcacatcactctccagagaaggaactgtcaccatgcccattgtacggaccggaagttgaggctcaaaggggaggcccaggttcagagcagtgtttaacagctttgaccttggcaccagagaatgcctgggttcagtcctgcccctgtcctctctgtgtgccttgggacaaggactctgtgaacctctgtgttcatgcttgtccagtgggatgggtggtgagcattcaggaagacccgctacatgcatggggcctggcccaaggctcatgtggatcttgcagttgatcctgatggcacgagcctcccagcctgtctccactggtcgctgctgcagtcctgcctctactccgctactcaagtcacctatctcaatcccagactggagagggtgtcccttctttgtccccagcctttgtttctctatatgcccttgctctgcagagcctgccttggccacagctccacctgtgccccctcacacgtacagctcataccttacagagtcccacccagacccagcacccacctcaccacctttaggaagccttgatcccagcacagttgattgatggctcttgcagtggagttccccagctagggtcccctgcccatgtggcccagccctgcctaacacacagcgtcctcctcccctaggcaacagagacatccagatgatcagctgtggggctgacaagagcatctactttcgcagtgcccagcaggtagggtggcatggcctccttgggggctggggtggggggttgtcggggcattctctgaaggtcctgccggccctgccagggttcggatggactacactttgtccgtacccaccacgtagcagagaaaaccaccttgtatgacatggacattgacatcacccagaagtacgtggccgtggcctgccaggaccgcaatgtgaggtaaggggtggccctggacccttagctggcctggtctgccttgtcctaggctgtctgctttcctccctctgttcctctggtccccaagaagctgggaaggaattgagggacccagcaggtgttccttcttggtttttttttgtttttgtttttgaggcagagtcttgctctgttgcccatgctagagtgcagtggcaccattttagctcactgcaacctccacctcctgggttcaagtgattctcctgcctcagcctcccaagtagctggaattacaggcgcctgccaccatgcctagctaattttttgtatttttagtagagacgaggtttcgccatgttggccaggctggtctcgaactcctgacctcaggtgatattgcccacctcagcctcccaaagtgctgggattacaggcgtgagccaccgtgcccggccaccagcaggtatttcttagaagctgggctctcccaagcctggcctccaggtcagcagagggctttcttctggctctccctagagccggtgtgggatgactaaggtgctgatgtggcacataaactccctcattcacccgtattccctgagcacctaactgggctggatggtgctgggatcatggcagtggccaggatagccccaggccctccttcatggagctcacagtccagtagaatggacacggccacctcacagccacagacagtgacagagtggtcagagatgggggagcccaggggccctgtggagacacctgaccccacctgcggatcaagcaggacttcctggaggaagagacaccttagcctggggaggatgtggaggagcgagccagggggaggcagagagtgagtgtgcagagggcaaagcagtgcaaagaggctctgcaccccttcccagttctttctcatgcggtgccaagcactgagcttgcagtgtgtgggggagatgaacattaactcagtggataccccaggacaacctcagcttgagatggggtttcagtttcagtctaggcatcagatggggacaagaggtagcagggggcttccaggggaggggaggacagcaagagccagagaatgaggtggtggggtaggcggggccctgttggccgcaacatgcccctacttccccagagtctacaacactgtgaacgggaagcagaagaagtgctacaagggctcccagggtgacgaagggtccttgctgaaggtgaggagttggagacccctgtctgtctgctgccctgatgggccacctattgtgacggcccacacctgagacctgtgcccttggtccttcctcagtgcaccgcgctgcccagcaccttctcaggcctggttaaacaaggatgcttgcgagagggtggggagggtgaccccagctgtgtttcctttatttacagagcccttccccaagtggggcgtctaagtgggttccattttgagtggcagcagggtatggtgggaagaatcagaggcatgaactcccctcctggtttgcccacaccagccacgggtcactcaggacaaggggggaccttctcagagcctctggtctaggacagttatgggttcaggttctgcctcaggctgactgtgtgaccttgggcaagcatcatctcttgaaatgcacacagacagcttgtctcatagacttgttctctggaggagttcagtttgcacatgttcagtgcttagcacagggcctggctactgttgttactgctgcggtggttgttaatttcttcacgtgtcgaatgggagcgggagctcctgccctgccagagtcccatgtgctgtgcatgcagcacgggggagggaggggcccaggcctcatcataaggaagaagcaggcagctggagtgacatgtgggtccctttcctggcaggtccatgtggacccctcaggcaccttcctggccaccagctgctctgacaaaagcatctcagtgattgacttttactcgggcgagtgcattgccaagatgtttggccattcaggtgggtgtgcctctctgcttgggatgcctccccacccgcccacaccctctgactccgaaggcaagtgcagcctctctgctttgtttgcagaaattattaccagcatgaagttcacctatgactgtcatcacttgatcacagtatctggagacaggtgggacatggacctttgggagagttgtggctcagataccatgagcactgcactcagcctgcctgtgtagagagcatttctaaactgcccagtttggattgtgggagtcttggtgtcacacccagccctgagttcaaataccagctctaagctgggcatgatggctcacgcctgtaaccccagcactttgggacgctgaggcgggtggatcacttgagctcaggagttcgagaccagcctgggcaacatagcaaaaccctatctctacaaaaaattagccgggtgtggtcatgtacacctctagtcccagctactcaggagggggaagatggcttgaacctggtaggtagaggttgcagggagcacagatcatgccagtgcattccagccttggtgacagagcaagaccccgtctcaaaaaaaaaacaaaacactaaaaaaacatatcccagctctgccatttattttcttgtcaccttgagcaggttatttcccctgagcctcagtttgctcccctgtaaaagacaccaccgtttacatttaccttaaaaatggtgtgatgaggccgggcgcagtggctcacgcctgtgatcccagcactttgggaggcctaggtggatggatcatctgaggtcaggagttcaagaccagcctggtcaacatggagaaactgtgtctctactaaaaatacaaaaattagctgtgcgtggtggcaggcgcctgtagtcccagctacttgggaggctgaggcatgagaatgacctgaacctgggaggtagaagttgcagtgagctgagatcgcgtcactgcaccctagcctgggtgacagagcaagactctctcaaaaaaaaaaaaaaaagaaaattgtatggtgagaaatgaatgagatgatatacatacattctttagcacatgggtggtactcaaggaagtcccttttgtcactccctttgatttaccccagttcttccccacagcccccttcctcaggtcttgaggcctccagaacaggccctggtttgctgggatgccccagacctgggcccagggtgtggatgtggcaagtccagcacccctgcactaagcggataggggtgtgttttccaggagcatctggagaatggggtccaggctgtggtgtgggtggcttcagggtcagccacggcagcggctcccatgcttactcttcctctgccttgtgtgtctctctttgacctccgcagctgcgtgttcatctggcacctgggcccggagatcaccaactgcatgaagcagcacttgctggagattgaccaccggcagcagcagcagcacacaaatgacaagaagcggagtggccaccccaggtcctggcagcccctgcctgtccaccagagggatgagtccctgccagggccccatggagtgatgctggggacacagtggtggccaagacagccctaggccctgcccttagcacactcacagctgagtaggggagacagactttgaatatgcagttacagtaatagatacaaaaaggttttgtggatttttttaattttcgtaaataatagagacagagtcttgctgtgttgcccaggcttgtcttgaactcctgggcccaagtgatcctcccaccttggcctcacaaagtgctgggatcacaggtgtgagccactgcacccggctatgagaagggtattaaagtggaaaagcaaagtgtttggcgagcctctcagcactgtgatgggggatgccccaagcggctgtgggaacagagcagtccctgaccggccagccaaggggaggggtgggtagacaggggatctgaggggagggctgcagtggggccacgtgtcctcttactcccacgtgaaagctgtagcttcacttacttctttgaatcttctaaatatatttctttcaagtctttatgtagcaaagccaattttatttgcagagaactcatgttctggtttttgatttgaggttttggtttgggtattgctcattttgagtgggaggttttttggttttcttctcttctgctgctgggtgtgtctgtttttgccattggctccatgtggctcccagggcaatgtggagaccaggccttgacatgggccactggtcctgaggtcctgaggtggtgttagagatatcttgcttttgaggctcccactccacccccaagctatgaaccagggccctggcttcagtgcctgcctcatgccaagggtgttttagtttcccgtactcgggaagagccaccatcattgctaccacctacaggaagcccagcacaggactgcagccccgctgtctgcttggctttctgtcccattgctgtggccctgagagtttgcattcgtttgtagcctggcctttgttaatctcatctattgtggtgatgtgtttctagtggggagacggcatcaagtgagagacttgccagcaccatcttgaccagcagccaagaatatgttcacatggagcttagcacagggcccagccctaggcaagtccccaccaccagcccatttgcctgtattctctccttaccatcctcattcctggctttaggcaggatacgtatgtgtccacacctagtgagattcactccctgagccctggagagcaaacagaggatgatctggaggaagagtgtgagccagaagagatgctgaagacaccatccaaagatagcttggatccaggttggaaaaggggccctattttgaactatgtcagtgtagggaatcattgctgggttttgcccatgaccttgtttacagggcctggcacatattaaaactcaggagtcgacagggtgcggtggctgatacctgtaatcccagcactttgggaggccgaggtgggtggatcacctgaggtcaggagttggagaccagcctgaccaatatggtgaaaccccgtctcaactaaaaatacaaaaattagccgggcgtggtggcgtgcaactatagtcctagctactagggaggctgagacaggaaaattgcttgaacctgggaggcagaggttgcagtgagctgagatcgcgccactgcactccagcctgggcaacagagcaagactccgtctcaaaaataataataataataataatataaataaaataaataaaattcagtaatcaggcttagcgtggtggctcacacctggaattttagcactttgggaggctgaaatgggagggtcacttgaggccaggaggtcgagaccagcctgggcaacatagcgagagcccatctatgcaaaaaaaaaattttttaaagaaattagccaggcatagtggcacacatctgtagtcccaactacatgggaggctgaggcaggaggatcacttgaggccaggagtttgagaccagcctggcacgtaccaagaccccgttcctacaaaaagaaaaaaattagccaggcctggtggtgcacacctatagtcccagctacctgaaaggctgaggcaggaagatcgcttgagcccaggaattccatgttataatgagctatgattgcaccactgcactccagcctgaataatagagtgagatcctgtctgtagaaaaagaaagaaactcaataatcatatcagtcaagactctttcagtataaaagcaaccaggcttaagtcaggaagaggattttttggtgcctgaaaattggagaggattagctttcagcatggctagatccagatagacagatgatgttaaaaggaagatttttttttgtatcttttggctctgcttttcttcatgttggctttgctgatggacagactgtccctttactaggggaaaagatacccccagcaactacaggcttataaaactccatagagaatagaacacctctttcctatagtagctcaagcagagtcttagggttgtgtggctcatgtttctggtatctgctgtacccacttctgagccagttgttgtagctgtccacatctcagcatgtgatcacttctgagggcagagactgtagtcagctccatccactcacaccacctgaccaggcatcaaagatgtgtttgaggccgggtgtggtagctcacgcctgtaatcccagcactcagggaggccgaggcgggtggatcacctgaggtcaggagttcgagaccagcctggccaacatggtgaaaccccatgtctgctaaaaatacaaaaattagctgggcgtgatggcgtgcgcctgtaatagcagctacttgggaagctgagacaggagaattgcttgaacctgggagacggaggttgcagtgagctgagactgcgccactgcactccagcctgggtgacaaagcaagactccgtctcaaaaaataaatgaacaagtaaaaataaattgaattatgttgcggatattgtccggaatctttttcctctgcaaagtctctcatctacctgtatgttggtgaatacaaagcagacgcctgcgaaattttaagttattcccctccaggtggccatttaggtttttcctgattgcacatcactgttaatgaggctatggagtggagaccactcctaagcctcctcgaaatgtgaggacttctccaggagagagtctgaggagtagcaccactggatcctggagttattttattttactttaaaaaagttgttttattattttatttcactatttttgttgcccaggctggagttcaatagcacaatcatagctcactgtagccttgacctcctgggctcaagcaattttccctccttagcctgtggagtagctgggaccacaggctcaagctcccacacccagctaaatatgtgtgtatcaggggatggtgtgtgtagagacaaggtctcactgtgttgcccaggctggtctcaaacccctggcctgaagtatcctcccacctcgacctctcaaagtggtgggattacaggcttgagccagtatgcctggcctttattttaaaagagaaccccggctgggcgcagtggctcacacctgtaatcccagcactttgggaggccgaggcgagcggatcacgagttcaggagatcgagaccatcctggctaacatggtgaaaccccgtctctactaaaaatacaaaaaaaaaaaattagccgggcatggtggcgggcacctgtagtcccagctacttgggaggctgaggcaggagaatggcatgaacccgggaggtggaggttgcagtgagccgagatcgcgccactgcactccagcctgggcaacagagcgagactccgtctcaaaaaaagaaaaaaaaagagaaccccaagagttctccaaacccagttactgccccaccctgcattgcattaggctctccattgtccccacacttttcctgccatcctttggtagtattaagctttttcacctcggtcagtctcgtgagtcaaatatcgcatcccacggtttaagtttgcatttccctaacccccggtgctgttgagccttctgacttctgggttgtggtgttgcctctttggggactgcccggttatgtatgtggcctgtttgttgggttgtttgtcctcttttcatggattctgtgtctttccagatcctcgttgcctgctaaccaacggcaagctgccactgtgggcaaagcggctggtaagtcttcagggagagggttgctcaggggctggcagaggaaacgcctccccagctctgccttctggaagccctttttcctttccatgtccctcttttccctggagaagccctgtcatccttccaggctcagtgagacagccctttgttcatgatcagtgctctctgccaggcattgttctggatgtcagggacacaacagtgagcaagggaaacaaaagtctctcccttcacaggctcacttgcctgtgtgggcgaggaacaatatccccattaaataagtaaatgacgtagtaggttgggtgctgataagtgctgtggagggaaaagaatcaagaaggaaaatacgtcagccaggtgcagtgatacgtgtctgtggtcccagctactcaggaggctgaagtgggaggatcacttgagcccaggaggttgaggctgtagggaactgagaaggcaccactactacactccagcgtgggcaacagagtgagatcctgtctcaaaaaagagaaaaagaacaggggcccagcacggtggttcatgcctgtgatcccagcactttgggaggccaaggcaggttgatcacttgagcccaggagttcaagaccagcctgagcaatatagtgagaccccatctctacaaaaaataaaaaaattagccaggcatggtggtgcatacctgtagtcccaggtactcaggaggctgaagtgggaggattgtttgggccagggaggtcgaggatgcagggagctgcactccacagcactccagcatgagcaacagagccaacactttgtctcataaaaaaaataaaaataaaaaagaaaataaggagtgttggggggtgtcagttttaagtaaacaggaaaggcctcattgggaaaatgatgtttgagcagagttgaagcaagtgagacaggcagatactgggacgaatgttctagtcataacagcctatacgtgtaaaagccacgaggccaggagctcgagaccagcttaggcaacataatgagactcccatctctacaaaagattaaaaatagccaggcatggtggtgcacacccatagtcccagctactcaggagcctgaggcaggaggatcacttcagcccaggagttggaggctgcagtgatcgtgctactgcactccagcttggatggcagaacgagaccttgtctcttaaaaaaaaaaaaagaaaaagagaccgggtgcggtggctcacgcctgtaatcccagcactttgggaggccaaggcgggtgtaatccaaggtcaagagatcaagatcatcccggtcaacatggtaaaaccccgtctctactaaaaatacaaaaattagctgggcatggtggtgcatgcctatagtcccaactactggtaaggctgaggcaggagaatcacttgaacccaggaggcagaggttacagtgaaccgaaatcatgccactgcactccagcctggcgacagagtgagactccctctcaaaaaaaaaaaaaaagaaagacaatgtggattataagagacagaataagagaggtgaatgaaggatgatcccaaggttggggcatgagtaactggaaaaaacaactgaaacagggaatctttaggaggagcaggtttgtgcagaggaaatgagttgagttgtcagcatgttaactttgaaatacctaccagacatccatacagaaatgtagagcagtcacatgtgcaattctgaagtttcagagaaaagttcatgaatcccagctgggcattcccagcactttgggaggccgaaacaggattccttgagcccaagggtttgagaccagcctgagcaacatagtgagagtccacctctaccaaaaaccaacaaaatgggctgggcgcagtggctcatgcctgtaatcccagtactttgggaagccgaggcgggcggatcacttgaggtcagcagtttgagaccagcctggccaacatggcaaaaccccatctctactaaaaatacaaaaattagccaggtgtggtggtgggcacctgtaatcccagctactctggaggctgagacaggagaattgcttgaaactgagaggtggaggttgcagtgagccaaggtcacgccactgcactccagcctgggagacagagcaagacttcgtctcaaaaaaaaaaaaaaaaaaaaaaacagagaaaggttcacgctggagatatgtacctggaagttgtttctgaatggtattgaaagccaagagtccagatgggctgtgtgaaatgtccgtgtcgctccctgcagtgagtgagcactcagccagttgcctgactgtccgatatccttcaagctaggggacgatgatgtggcagatggcttggccttccacgccaagcgcagctaccagccccacggccgctgggcagagcgggccggccaagagcccctcaagaccatcctggatgcccaggacctggattgctactttacccccatgaagcccgagagtctggagaactccattctggattcactggagccacagagcctggccagcctgctgagtgaggtacacacttccaccgcagcctggcccatagccccggcaccgtgacggccccagggcctggcgccttaggctgactcccactccatgggggcagggaggattacatgagatggtgaagggcaggagggtgagccccaggtctgttgcacagcaagacttcccaaggcagacagggagtctttggaaagtgggtcacttgggggttaagagcttggatgctagagcaggcttgtacccaagtgggggacatttgggtagatcgagccctgaccctacccattcctgttgtgtgacctggagtaagaggcttacctctttgggcttcagtcttctaaaaagtagtcataatggggtcaggggcagtggctaacacctgtaatcccagcatttggggaggccaaggcaggaggattacttaacgatcacttgaggagttcaaggccagcctaggcaacgtagcaagatcccacctctacaaaaatattttttaaatttttttgtttgttttgtttttaaatggtaataacaatctcttctgccccagagggcttttacaggaatccatgcttaagtatagggcctgggctcttagaggtgcccgtgcaactttagctctttctctactattttccaaacaaaattcatttttatcctatcctataatttgtcatcttcattgtggtataatatacatccagtaacatgcacagattttaggtatacagcttgatgaactatctgtgtaattcacgtgtgtccactaccctgggcaaaatctggagtgttttctacctcatagaaacccccttctgcccttcccagtcaggtccccgcaccaggataaccagtgttctgacctctcaccaaggactgggtttcctattcttgaacttgatataaatagacacgtagagggttgggcctcctatttttggtgccacacctcttcctcatctgtaaagggactgataatgcaggggcagaccaggacaagctggttgcgagtggagggcatggcacaggccctggttcacagcctccagcagtggggctgctggcatggttcctggcgcactgttggtggccccagccatgcctgcctcagaatggctgtgctgtcttccccatagtcagagagtccccaggaagctggccgcgggcacccctccttcctgccccagcagaaggaatcatctgaggccagtgagctcatcctctactctctggaggcagaagtgacagtcacagggacagacaggtgggtgtcctttccaccaagggagccttagttggaggaacccccagctgatagctgcatcctggaagaagtgctctctgccttcccagtgggcttgtgggagtggggacagttgaggcctggatggggcaggagcccagccttagttccctggttccaggtggggtacaggagggcctgacctgggggaaggagggggcatttggaggaggcggggaggctgtcgcagtgctcctgcaggagcagcgggtacaggtgcctaggggctccgggtggggctagctgttgagtctccagctgaagtccttgttccctctctgcccccactggcactgcagccagtattgcaggaaggaggtggaggccgggcctggagaccagcagggcgactcctacctcagggtgtcctccgacagcccaaaggaccagagcccgcctgagggtgagtgcagggcaggcagggaccctgtgacagtctgtgcgttcagccaagcccctttctgggcaccgatggtgactttgacccagtactgaagctcagagtctgtcgaggaagacacatgtggtccctgctgctgcctgaggattctgggcccagctgcctacagctgagagcccagctctgccacctccttgatgtggaacttcccttattcataaaatggggggcagctgctcttaccatccctcctccagatggggaaactgagcccagggaagggtagccctggccctggctcaccagaatggtcaggctgtgggctcctgaccccgactctgtccttcagactcgggggagtcagaggccgacctggagtgcagcttcgcagccatccactccccagctccgcctcctgaccctgcccctcggtttgccacgtcgctgccccatttcccaggtaagcaggggccagacacgcaggggactcgctgctcgggcctggcttagggccagtcacaatgtctaagcacaggccctgcacttggagcccactgagcctggaagacggggatccctgcttctcagcctgcgggcaacagggcagggatgggtggggcccgctttctccatttcaggtggcgtctgctgtgactcatggtgttggctcctcttgtccctcccctccttccctgtcaggatgcgcaggtcccacagaagatgagctgtccctgcccgagggacccagcgtccccagcagctccctaccccagactccggagcaggagaagttcctccgccaccactttgagacactgactgagtccccctgcagaggtagggccctgcctcacccacacctgccgaggccgtctgtgcagcctgggcacagcattggcgtccctggagttggctccccagcagggccaggagggtgagtggagagcaactgcttcgttttttttgagacggagtctcgctctgttgccaggctggagtgcggtggcccaatcttggctcactgcaacctccgactccctggttcaagcaattctcctgcctcagcctcctgagtagctgggattataggcatccacaaccacgccctgctaattttttgtatttttagtagagatgaggtttcaccatgttggccagactggtctcaaactcctgcctcagatgatctgcccgccttggcctcccaaagtgctgggattacaggcgtgagccaccgtgcccggcccactgcttcactcttgacctgagcctcacgatgcctcctcacccactgcccctgctcgtaccctgtgtctgtacataagggtttctggggagtgccccgctgggctgtgggctggcctagggccagggctgctcggcgggaagggttatgagggtcccctcgggatcttcccctagagctcttccccgcagctctgggagacgtggaggcctctgaagctgaagaccacttcttcaacccacgcctgagtatctccacgcagttcctctcaagcctccagaaggcatccaggtagaagctggccaagcactgcccaccctctggctcctcaacagtgccccagggcaggctgaatgagaatcatcccccctgctctcctccccacaggttcacccataccttccctccccgggcaacccagtgccttgtgaagtctccagaggtcaagctcatggaccgaggcggaagccagcccagagcaggtactggctacgcctccccagacaggacccacgtgagtattgggcccacctccgtcagggcacggggctgggaaccctgaggccttgtcctcacctcagagctgtgcctgcaggtcctcgctgcagggaaggctgaagagaccctggaggcctggcgcccaccacgtgagtgccccagtcccagacggacagtcctgggtttctcggcgagtggccggatgtccagcctagctgtggggcgtgggggccctagccatcagttctgtgtggtggagtcagtgccatctgcttccgttacagctccctgccttacgagcctggcgtcctgtgtccctgcttcctccgtgctgcccacagacaggaatctcccaacgcccacatctgcacccaccccaggcctggctcagggtgtccatgccccctccacctgttcctacatggaggccactgccagctcccgtgccaggatatcacgcagcatctccctcggtgacagtgagggccctatcgtggccacactggcccagcccctccgtaggccatcgtccgttggggagctggcctccttgggccaggagcttcaggccatcaccaccgcgacaacacccagtttggacagtgagggccaagagcctgccctgcgttcctggggcaaccacgaggcccgggccaacctgagactgaccctgtcaagtgcctgtgatgggctcctgcagccccccgtggatacccagcctggcgtcaccgtccctgcagtgagcttcccagcccctagccctgtggaagagagcgccctgaggctccacggctctgcctttcgcccaagtctcccagctcctgagtcccctggccttcctgcccaccccagtaacccccagcttccagaggcccggcctggcatccctggcggcactgcctccctcctggagcccacctccggtgagtacagccctggagcaaggactgtcccctaagctcatcctgtgtgctagttggctcagctccaaagatggatacttgacctggccacagggactgtgccattcattcattcgtgcattaacttaaatatttaatgagcattacatgttgggctttgtgctaaaccctgggacatgggacatggtggtaaacaacacagagaactgacagcttcaatggggacaatgcccagactaaacctttaaggaacccgtcatatgtatcacgaagtgacacatgcttaggagggacagaggagggcgagggagtgcagggtggggacaggggttgggattacaaaccagaagataagaagaggcttcagggaggaggctgcattggagcagagacctgtaggagtgaaggggagggagccttggggacccagagaagtgttccagacagaagtacagcatggagtccacccagtcgctctggccgctcacaccaatggaatgcagctcatcttgctcattcccttctctctaccccaggtgcacttggtctgttacagggcagccctgcccgctggagtgagccctgggtgccggttgaagccctgcccccatctccccttgagctgagcagggtggggaacatcttgcacaggctgcagaccaccttccaagaagccctcgacctttaccgtgtggtgagctaagccccagagttgggaaagggttgaggggtctcttgagaccgcccggccttggtggcccctgacaaggctggcatcccttgcagttggtctccagtggccaggtggacaccgggcagcagcaggcacggactgagctggtctccaccttcctgtggatccacagccagctggaggctgaatgcctggtggggactagtgtggccccagcccaggctctgcccagcccaggacccccgtccccaccgacgctgtaccccctggccagcccagacctgcaggccctgctggaacactactcggagctgctggtgcaggccgtgcggaggaaggcacgggggcactgagggcgcagcccctccaccgcagccctgctgcttctgaggacttaggtattttaagcgaataaactgacagctttgaggaa

SEQ ID NO: 15878 - DNA, 50144 bp, Homo sapiens
ggcgtgacgatggcggccgtagggtccggaggctatgcgcggaacgatgcaggggagaagctgccctctgtcatggcgggagttccggcgcggaggggccagtcctccccgccccccgccccaccaatctgcctacggcggcggacgcgactctcgacggcctccgaggagacggtgcagaaccgggtgagaagctgctcgccatgtctaccccagttccaggcttcctaggtttcccctagtcccgtcctgagaactgtggccccgacatcagcccccggccagtcccctcaggttgttccctgccatgcctcgtcccctaacccccgcccctttagccacggcccctcccactttctcctcgctgctttcccggctccaccctcagcgttggagcaattcgggggttcctcgctggttcccacccgtggaaatgcattttgcttctgtaaatcacagcctagtcctgctatattttaacccccgttctatcgcctttagacgtcacgatcatagctcactgcagcctcactgccctggcccccgctgagtcattaaggtcccttcgagggttcggtccagagtgttacctgccccaactcttcctcgcttctaccccgccttctctcaccttctgcgatctctatcctttttcctcaccaaggtgggattcttaatccatattgtcactcaaaactatgagaaagacgtgagaagttatttataaaatctctgcagtgctgcctggggaggagggcgtacagaacagttccctaaatcctgagacagaaaaatggaaagaaatgatttcacagtaggtagaaggaattccattagcacagcggcaattaaaaaaattgttttccagctgtgtaggcacaaaatctgtttttataaaatggagatgataagaaccatactactggtagggcgcggtagctcacgtctgtaatcccagcactttgggaggccaaggtgggctgttcacctgagatcagttcaagaccagcctggccaacatggtgaaacccgtctctacaaaaagtagaaaaattagcccggcatgctagcgcgcgcctgtaatcccagctactcaggaggctgaggcgggagaaatcgcttgaacctgggaggcggaggttgcagtgagctgaggtcatgccactgcactccagcctgggcgacagagtgagactctgtctcaaaataaataaataaataaattatactattgcattggagggaaatgaaattttaattgtgatcttcttggcacggagtccagataaagggaggatacctggtagctgctggtggagcttgttcctgccccatgactttctcctgcactgtgattataccgcccactcctggctacagggctctggctgtacctcccatgtgctctctgtcaccaaggttcagtcacactggcctgcttttggttttcctgaggctccatattcttttctgcctcctggcctttgtgattggtgagtcctcagcctgggctttttgctgcaatctgcctgtctggctccttcccatccttcaagtctcagcctgaatgtcgctatcttgaaaggccttctcgaaccccattctaaagcaaacagccaccttcatctgtcacccagcaccctatacttcatagcctttatcttatatgttcctgaaagtgccctttgagctattaaactacatataacaatagcaaattcagagaggcgttatagcaaagtggctaagagcacagactgctgctgatggtatggttggacccaggcagcctgagcttaaactttagtcctgttcttcctggcaggttatgaacttcgctttttcttttctttttttttttttttgagatggggtcttactctgtcatccaggctgtagtgcactgggttgatctcggctcactgcagtctcagcctccctgggctcaggtgatcttcctgcctcaagcctcctgagtagctgggactgcaggcgcatgccaccatacctgactaatttttttgtgttttctggtagagacagggtctcgccgtgttggccaggctggtcttgaattactgagctcaagcgatctgcctgcctcggcctcccaaagtgctaggattacaggcgtgagctactgtgccccgccaagttatgaacttatctgtgcctcagttttcttatctgtaaaatgagaataatgatgtagaaatctctcatagggtatttgtgaggattcaatgaggttacatatcctaggcacttagaacaacactggcatatggcaagtactctattcatgttagctaatactgatattatgactgtgtatttggggtaatatttatttattttttttgtttggcagcacagagttgatctgtcttgcaaagacctagtctaaaagtgaccattcataccagggcccagtaatgctgatcgacagataagacaacatgagtgccatggcttggttgtttgtgttggaatcctggcactaccccttcctggatgggtaacccctcttggcctctgtttcctcaactgttttgttcctttttttttttgagacagagtctcactctgtcgcccaggatggagtgcaatggtgccatctcagctcactgcaacctccgcctcctgggttcaagcgattttactgcctcagcctcctgagtgcctgggattataggcatgggccaccacacctgactaatttttttgtatttttagtagagacagggtttcgccatcttggccaggatggtctcaaactcttgactgagccaccacacccagccttgtttaaattttaaatattactgttcatgtggttttttactcgttgaaaccgctcaaatttctggactgtgaatctgatgtggggaaactgtctacctttggtcactactgtgtctctcctgtacagcccaaagtgctagctttggagccagactgcctgggtttgtatatcaacattgccacttgcagatgtaggatcttgggcctcagacttcttacctgtaaaacaggggtgataatagagccttcttcgtggcttgttgggaggattcaagtcttttatacatataaaagtactaagaggccgggcacagtggctcatgcctgtaatcctagcactttgggaggccgaggcgggtgtatcacctgaggtcaggagttcgaggccagcctggccaacatggtgaaaccccatctctactaaaaatacaaaaattagccggacatggtggcatgtgcctgtaatcctagctactcaggaggctgaggcaggagaattgcttgaacctggaaggcggaggttgcaatgagccaagatctcaccactgactccagcctgggtgacagagcaagactccatctcaaaaacaaacaaaaaaaagtacttagaaacttattcacaggtcaccttctcaccgcggcattcgcccccttcccctgtgctcctaacctccttatctgctttcttctctcttgcacccatcattacttggcatctatttcacatatttgttctgctccttttctatgttctacatacccatcaccagtagaatgtgagccccccgagggcagggatttgtctcttcctcaccactctgtgcttttcacctagcgttgtatttgtcaaaggaatgttgagagaacaagtgttagctgctggtggatggcgtggccacagaagctcagtgtgggtgttgaatgtagcaggacctgaatgggtggccaaggcggctgcaccatgtggtgctggctagggtgggtgcctctgacttgggctttttctttgcaggtgtcactcgagaaggtgcttggcatcacagcccagaacagcagtggcctaacctgtgaccccggcacaggccatgtggcctacctggcagggtaagcagataagggcctcgacgtctaatcattgctagggaatttggagcttggaacctgaagccatccgtaaatcgctctgagcctcatatttttcacctgtagaatgtggagaatggggcctgcctctgagagctgtggagaggattccatagccccctctctgtctagaacagttcctggcatgtagtgagtgcaatgaaagcctttattatgactacaggggggaggtgacagcgattctgggaaagacaggtgattaaagtccacgctgtggtgtcaggtaacctggatttgtgtcccagctctgccatgtatgctgctctctgagcctcttcctctgcctctgtaaaacagagctggtgaccccctctgcttgcatagttgagaagactgaagaagatgctacagctgttcattccataaatactcatgtagcctggcactgtgctaaggacgtcccctctctgggtttgtttccttatctataaatgggcctaaatagtcgtgacctgacctggcagttgtgaggatttaaaacaattacatccctctttctctctttttgttttgttttgcttttttgagacagagtctggctgtgttgcccaggctagaatgcaatagtgtgaataacagctcactacagccccaacctcctgtgctcaagcgatcctcccatcttcacctcccatgtagctgggactacaggcacatgccaccacagccagctaattttttttagtggagatgagatctcactctgtcgcccaggctggtctaaaactcctgagctcaagtgatccctcctgccccatactcccaaagtgctgggattatagccagcttaaggtcttaattagcctagggcctgacagacattacctcagaggaagtgttggtttctatttaagaacatagcaatgttaaagtgccctagaattctcagcgtaaacacctggaggagggggaggaggaggagaccagagagaaccgagggagcttgtttatttgtgggcttttctggtgggaatagaatcatcccaggaccccaacactccccacagttgaggcacattttcctctttcttcccagctgtgtggtggtgattttggaccccaaggagaacaagcagcagcacatctttaacaccgccaggtaggctgaggcctgggcccggggcaggggtggaaccaggggcttggcacgcctcccctcccctacacagcctggagatactcatgggtaggtgctcactcattcacttacatgttggctcagcagcattcgcctgtgctgggtgctgttccgtgtgctggggacacagcagtgaccagaggagacgagaatctctgctggctagagcgagacagactgtaaactagtcagcaaattacgggctgatcatgatcagtgctatggaggaaatgatggaggatgtcttcgggcaggtttgtgggcagagaataggaggaaagccttatcagaaggctcagggaacgctgccttgactctgagacctgaaggaagcgagagggtgacccataagaagctgtagggagagcgcttcaggcagggggcacaggaagggcaaaggccctgcagtggttaagaatctccggcgctttagaagcagccagggatctgggtgcctggagaaaggagcagggaagatgaggctggaccaggcagaagccacatcccgtaggccttgcagccttgtagagggtctgcatagcatgctgagtgcagagagcagccacaggagggcaccacaggccaggaatgtgcttttcacccccagccctccagcagctctattccctgctttgcttttctccacaaaatttgctcccatctctgatatgctgtccagtttcctcattgatggtattcactgtgggtctccctcagtgtgagcactcttgagagcagggactttctctgagttcatttctgtgtccctagcaccaaagagcagtatctggcatattgatggctattttctaagagaaagacttaacatgatttgggttttagaaagatcccttcagctataagtttactggggaaggacccgctcctctgccttggggctaactgatcactgctaccctggggatgtggtcccaatagggctgtgacctttggaaggcacaccatgtccctccttggcatagctcaggctcagctcctttggcccagttctccaggtggatggataaggagtgggttttctcctgcccttatggtccctaaggtacggtccttaagctacggcaggttcttgttatctgacagaagtgcattccctcttgaaagtggctttttggaccttttgctcctaactgtgggttctgttactggtgataagggcagagctgggttccattcctggctcaagcgtctattcactgtggaatctcaggtgagacacttctttcagagccttggtctcctctgaaaataaaatagctgcctccaactgggagagcattcataaggcagcagctacaaaccagagtcacacacacttgcccaatatagtatgttttaaaggttggataagtggacaacatttcaagttttttaacacaaaaatccaaatgtcccttttgtttggagaagtgagaaattctctggcctctggggcccaaattcccctgtggcagtgaggggctgagcttagtgaaatttgtcaggcccgttgtggccagttcctcacacctgtgttgcctccctaatccctgtaggcagtggagtgggtggcctggatctatagtagatggtatgcaggtgtccgcccttggccaccagtgggtgtgcattaggaggtggtgtggccagtgtggggattttcactccaactgcatatcagaatcacctggtccctgtgcctcaccgcccccccaccgccacgcaagagaaagccaaatcagttgatctgggatgaaacttgggcattggcaattttgagactttttatattgaaataatttcagacttagaatagtacaaagagctcctatatacctatgtacctttcacatatttcacaaatgttagcttttttttcttttttttttttggacacagagtcttgctctgtcacccaggctgctggagtgcagtggcacagtctcagctcactgcaacttccacctcccgggttcaggtgattctcatgcctcagccccccaggtggctgggaccacaggcatgtgccaccatgcccagctagttttttgtgttttagtggagacggggttcatcatgttgcccaaggtggtcttgaactcctgagcttagacagtctgcctgcctcagcctcccaaagtgctaggattacaggtgcgagccactgcacttggccaaatgttagcattttaccacatttgctttatcattttttgtctatatacatattaatttgttctgaactatttgagaatcagttgtagacatgatgcccctatatctctaaatacttcacgccaggcatggtgattcacgcctgtaatctcagcactgtgggaggccttggaggcaggaagatcatttgaggtcaggagtttgagaccagcctggggaacatggcaaaaccctgtctctactaaaaatacaaaaattagccaggcctggtggcaggcgcctgtaatcccagctactcgggaggctgaggcaggagaatcgcttgaacccgggaggcagaggttgcagtgagccaagatcatgccactgcactccagcctgggtgacagagcaagagtccgtctcaaaaaaaaaaaaaaaaaaaaaaaaaacttaatcaaataaatacttcagtgtgtatttcctacaaaaaaaaatgacaatctttttaaactgtaatacatccagcaaaatcaggaaatgaaaattgatatatcactctcatccactccccagagggcaccattcaggagtcagcctttgtcccatgaatgtcctttatggccaaaggattctgtctagaatcacacattgcattgagttgtcccctcagtctctttcaggctgacgtggctcctctgtcttttcttgactttcaggatcttgacatttttttttttctttttgagatggagtctctgtcgtcaggctggagtgcagtggtgggatcctggctcactgcaacctgactccccagttcaagtgattctcctgcctcagcctcccgagtagctaggattacaggcatatgccaccatgtccggctaatttttgtatttttagtagagctggggtttccccatgttggccaggatggtctcgatctcctgaccttgtgatccgcccgccttggcctcccaaagtgctgggattacaggcgtgagccacagcacctggccacttttttttgtttttttgttttttgagacgaagtctcacactgtcgcccgggctggagtgcagtggggcgatcttggctcgctgcagcctccacctcctgggttcaagcgattctctgcctcagcctcctgagtagctgggactacaggcatgcgccaccgtgcctggctaatttttgtatttttttttagtagagacggggtttcactatgttggtcaggctggtcacgaactcctgacctcgtgatccacccgcctcggcctcccaaagtgctgggattacaggcttgagccactgcacccggccaatcttgacactgaggattgtagacgaggtattttgtagagtgtcccagcatttgggtttgtccaatgcctcctcacgggcagactcaggttctgcatctttggcaggaacagaccagaaggggtgctgtgttcttcctggtgcctcctctcaggaggtctcctatgactggtggtgttcactgggagcacttggccaaggtgttgcctgccagattcctccacttcaaagcctctcttttcacctttgtgattagcaggtatcctggggacatctttcctgagacagtgcaaatattatcttgttcctcaccaaactttcactcaactaatcttaggctttgacacttttcagatgctccccagggaaatctaatgtacagccaggactgagaactactggcttagaggtcagggctctgccctgtctggttaggtaactgcaggcaggggacttccttgtgttgcagtcacctcatctgccaagttggttcatgagagccctgactccatgaagcatgcttgaggaatcagtgcactgatggccagacagcatttgccagagggccaggcacaaggtcagggcatgcgacaggttagaggtggctacgggcaacagaaacccctccacagcatggcttaaaacccaagagcatgctcttcctgcatgtcataagtccagaggtgggcagcccaggggctgtgtctctgaacgccacattttttttttctgtctctctttttgagacagagtctcactctgttgcccaggctggagtgcagtggcgcgatcttggctcactgcaagctccgcctcctgggttcacaccattctcctgcctcagcctcccaagtagctgggactacaggcgcccaccaccacgcctggctaattttgtttttgtatttttagtatagacagggtttcaccgtgttagccagggtggtctcgatctcctgaccttgtgatctgcccacctcagcctcccaaagtgctgggattacaggcgtgagccaccgcgcccagccccacttctttttttctctagacggagtcttggtctgttgcccaggctggagtgcagcagcacgatcttggcttgctgcaacctctgcctcccgggttcaagcaattctcctgcctcagcctcccgagtagccgggattacaggctcctgccaccacacctggctattttttgtatttttagtagaggtggggttttgtcgtgttggccaggctgttcgcgaattcctgacctcaagtgaaccacccacccctctgcctcccaaagtgctgggattacaggcgtgaggcaccgcacccggcccccattccttctctcctgttccaccccatttattgtgaggcttctggtcttgaagtcacttcatggcccaagatggagttctggctgtcgtgtgcgtatttcaggaggggaactggtaggaagcagggcaaagggttccctttgacgagtatttcaggaagtcccacacagcatgtcagtttacttctccttggccagactaagtcatgtagctgtacctgcatagttgcaagcataaaactggggttatgtcagtaaggaaagagaggcgagtggatatccaggaggcagcttgccctgtttgttgcagtaaggagccacgggaagcctgggaagcaggttgacttgatgatgaatattccatgaagttgccaaagtctcacttagcgacatttacttagttatctacacaccaatttaccatctcacgtagggagacaattattagattgttaaggaacaaaggtaaaaataagattaaaagagagaagggagtagaaggaaaccatacaatctgggaacagtgaatcttgctgccagaaacctacgagctagcctgttcattcagtgcttgtgcaggctagctaggagtatcagaaacattttggctctttatggattttccagaacaccttgagtatttagcagtggagcacaggctgcaggctaccttgatgtgatgcctgccaggatcctcccatcagcaccacccgtttagttaggccaggcctgtaccatttcctgcatctctatttctcagtgttacagggtggatagggtcttaggatacccactgcggcagagggagaagaaagcagggtccgcatacagtgtctactccatttgggtttggtgtctcagggcggaaggggcctttgcatttacccccatttctctgtgtgctttgctgggcacaccagcggcactggctctgtgggagctgcttgagctcacctctgctggcctcttccgaggcttgggaggcagaagagggcagagtcctatcagagtcgccaggatggggtctggctggccaccctcagcggaaccagtgatcagctcttttctttatccccaggaagtctctcagtgctctggccttctcccctgatgggaagtacatagtgacaggggaggtgagtcgtgatcgtgactgagtgggagtcgggggctggggggtcttggaagccattccttctgctcccggcaggcctgggagtccctggaatagctccttcctgggccagaacagccctgtagcagatgggggaggtggcttttgggcacatcctgtggcaatgccatcttcggccttgacaaccctctagccctgcccagtacagagcccagcagcagtaacgaccccaccttccctagaatgggcataggcctgctgtgcgcatctgggatgtggaggagaagaatcaggtggcggagatgctaggccacaagtatggtgtggcgtgtgtggccttctcacccaatatgaagcacatcgtgtccatgggctaccaacatgacatggtgctcaacgtctgggactggaaggtaagagccgaccagcaggcctgtggcaggcagccagctgccacagcatcctatgtcttgggcacagggagagctacatgagaggacgcagtaaagtgctcactcacccaacagataacagctattgagcacctgtgacatgctgatcccttattgtagggcacaaggcaggctcccagctagaagcattatacatatttttatattgaccagctgtgaccttaggcaagtgacttaacatctctgtgagtctgtttcctcctctgttagatggatatagtagtacttatcttgttgagttgtgagactttaatgagttgataagcactggaaggctgggctttggaacagctgtggagctggcagaagtgggtaccaagtcctggctctgcccataacccactatgtgaccttgagcacatgacatctccccctctgagcctggtagggttggggagaagcgcctccctcgtggggcttttgagggattgaggaaatttcatgggttatcctgtgaagggctcagggcagggcccagagcaggagccccatctgtgacagccataggttgtgttgtccttacatcccagccgtgactgtccccaataccatgtgtgggctgcagagcttagacccttggagagagctctggaacatactgtcccatggggaccattccaagcctctgtcccttcctctgtcggtgaggaatgagcagggtgccccacataggtttccccatacagcagctccctggagggtcccaggaagacagacttggagtggggacgagcagggagttccagcctgagggcaaaggcacaaacagtccagtggaatgagtgctggcatgagcttctctgcacttattcttccagaaagacatcgtagtggcctccaacaaggtatcttgtagagtcattgccctctccttctcagaggacagcagctattttgtcactgttgggaaccgccatgtgaggttctggttcttggaagtctccactgagacaaaggtgagtttctgtccctgcccctttagccaggccctgagggagtcaccatcggtggcagcatggtctcctgtttctccctgagatttgagggcagcggtctcgggccatttggcctctcaggggcccagctgctgcttctgggcctactctcagggtgctgatgcacaggccctgccaggaaccccctgaccctgggaccagctctcattcttggactgctgctgtccagcccctctgtccagagtggcagggttctagtgttttcttcccttctccatttggaagagcttcttagagttctcctgttttgttgtgtcctatcatctggtcatgcagggcccagctgtgtggacaagtatctcactacgccctctgtgtctccaggtgacgagcacagtgccccttgtagggcgctcgggcatcctgggcgagctgcacaacaacatcttctgtggtgtggcctgcggtcggggccggatggcgggcagtaccttctgtgtgtcctactcgggcctcctctgccagttcaatgagaagagggtgctggagaagtggatcaacctgaaggtaccacctccctctctgccatcagctggacagactctttctcgtgatatgtgtctgcaggggtgctcatcagcattgaccacacaggttctgcttatgtgactagtggtgaatgacgcccactctctgagcttaaggttccacatctgtaaaatgggagtactgctgccctccccgcagagctgataaggaagtcacgtgagataacataggcaaggcagtgagcacggtgcttggtaccctgaaatgggctcaaggtgacagttgttttcccatgactatttgatctacttcacatttcttttctcctttgagcactctggctggtagaggattgcatttttttttaattaatttatttttttttattgatcattcttgggtgtttctcccagagggggtttggcagggtcttaggacaatagtggagggaaggtcagcagacaaacaagtgaacaaaggtctctggttttcctaggcagaggaccctgcgggcttccgcagtgtttgtgtccctgggtacttgagattagggagtggtgatgactcttaacgagtctgctgccttcaagcatctgtttaacaaagcacatcttgcaccgcccttaatgcatttaaccctgaatggacacagcacatgtttcagagagcacagggttgggggtaaggtcatagatcaacagcatcccaaggcagaagaatttttcttagtacagaacaaaatgaagtctcccatgtctacttctttctacacagacacagcaacaatctgatttctctatcttttccccacctttcccccttttctattccacaaaaccgccatcgtcatcatggcccgttctcaatgagctgttgggtacacctcccagacggggtggtggccgggcagaggggctcctcacttcccagaaggggcggccgggcagaggcaccccccatctcccggacggggcggcggcagggcggaggcggacccccacctccctccctgacgggccggctggctgggcaggggctgacccccacctccctcctggacggggcggctggccgggcgggggctaaccccccacctccctcccggacggagcggctggccgggcgggggctgactccccccacctccctcccggactgggcggctggccgggcgggggctgacccccacctccctccgggacggggcggctgctgggcggagacgctcctcacttcccagacggggcagctgccgggcggaggggctcctcacttctcagacggggcggctgccgggcggaggggctcctcacttctcagatgggacggccaggcagagacgctcctcacctcccagacagggtcgcggccgggtagaggcgctcctcacatcccagacggggtggcggggcagaggcgctccccgcatctcagacgatgggcggccgggcagagacgctcctcactttctagacggaatggcagccgggaagaggcgctcctcacttcccagattgggcagccgagcagaggggctcctcacatcccagacgatgggcggccaggcagagacgctcctcacttcccagacggggtggcggccgggcagaggctgcaatctcggcactttgggaggccaaggcaggcggctgggaggtggaggttgtagctagccaagatcgcgccactgcactccagcctgggaaacattgagcactgagtaaacgagactccgtctgcaatcccggcacctcgggaggccgaggctggcggaccactcgcggttaggagctggagaccagcccggccaacacagcgaaaccctgtgtttggtggagaccaaaaaaatacgaaaaccagtcaggcgtggcggcgcgcgcctgcaatcgcaggcactcggcaggctgaggcaggagaatcaggcagggaggttgcagtgagccgagagggcagcagtacagtccagctttggctcggcatcagagggagaccgtggaaagagagggagagggagaccgtggggagagggagagggagaccgtggggagaaggagagggagaggaggattgcattttttaaaaattggaggtaccattgatttaataacttttcagtcaaaaaagactacacaaaatacataaacttttatttatttttatttatttttactttttttttttttttgagatggcgtctcacttgttgccaaggctggagtgcagtggcgcaatctcagctcactacaagttccacctcccaggttcaagcaattctcctgcctcagcctcccaagtagctgggattacaggtgcctgccaccacgcacagctaatttttgtatttttagtagagacagggttttaccatgttggcctggctggtctcgaactcctgacctttagtgatccatccgtcttggcctcccactgcgcccggccataaacttttaaactaaagcatgatctatcgatacattgcagagcttctttcctttagtatctgaaggtttgagtcaaagctgttttcccatctggaatcagttgcccatttggctatccgcccgagcgttgtggtttcctctcctgttcctggcctgcctttgtgactcactctggagatcaccttcgaggttaatggcttgtggaagagttccaagttttatctctgtcctagttggttaaacatcattttctctttttcaagcaagtgaaaagctttcaatagatagatgtttatttcctaagcactaaatgactcataaattaagtccctgtagatttggaaaaactccttaaactgtatctagaggtctagcacttcctagtaggatagacagtcctttctagatactgtaacttttttctgtaccgctttggagtacagtctttatgaagttgtttgtaagcaaaagggaataaaatttaagcctaaaggctgggcgcgatggctcacatctgtaatcccaatgctttgggaggccaaggcaggtggatcacctgaggtcaggagttcaagaccagcctgaccaacatggtgaaaccccatctcaaaatacaaaaaattatctgggtgtggtggcggccgcctataatcccagctactctggaggccgaggcaggagaatcacttgaacccaggaggtggaagttgcagtgagccgagattgtgccattgcactccagcctgggcgcaacaaaaaactctatctcaaaaaaaaaaaaaaatttaagcctaaaattcaaccctgttactacaagtgacttacctgaagttgcagtctgctgaacaggtattttccatacacagctacgtttctctgtagacagcagtgacaattctgtttccgttcatgcctctgcctacctgctggcacatgtctttcaatagcagcagtatgctatatcctgatttcacaaatcttaaaatatgctaaaatgggtgtcttagacccaaggaactgtaagtcttctctggaggcctaaggctgctctgtcagtccccatatccccgggccaggccacgtgaagcaccaaatccactggggtcccttttgcccctacaggtctccctgtcttcctgcctctgtgtcagccaggagctcatcttctgtggctgcacagatgggatagtccgcatcttccaggcccatagcctgcactacctcgccaacctgcccaagccacactaccttggggtagacgtggcacagggcctggagcccaggtactgccctgtggggagagggaatgggaggggcccacccagagtctgtccactggcattcatccatgcttccagatccatctatctgtctgtccatcccacaaatacccatcatgactctcagccctgggcattacaaagcagaaaagtccttgccttccgaggcaagcctcacagtgagaagtgaggctgggtagggggaagaaacagtgagaaaacaaaggaataatatcatttcagatagcggtcagcatggtgaagaacagtgcagagcaggtgtgaatgtggcggagtgtttccatccacatggctgacccctactaagtggctgctaagtgccagccctgggctggaagcaggacatgcctattataatgaagcagcaaaatctctgcctctctgcagtatagcaagggggctcgatgataagcaagtacacgaaaaagataatttcaataggcatgagtgctttggggaacacagcagggactcgggaaggagagtgactggggtgggctgtgctgattgggtgcctggtgagaaggagctgctgtgtggagagctgggtcccagcagttgaggtgacagcacactgggcttgttacgttgcaggaatagtaagggactgtgtggccagagcccagtgtgtccggggaggatggtgggagatgaggccagtgtggggcgcctgtagtctatcctcaggtcagtgggcagttgctggggtttcgggcgttggggtaaatgaccaggccttacatgttaggtccctcagctgctgtgtcgagagtggatagaagcactaggctgtggctttcttctcctttgttgcaagtctgttttatggaattgggggctacctaaccagggggtgccaggtgcctagggctgcctctttgtggatttctggatgctagctcctgggtgccttttccacgacagggcctgaacaggggaactgggtgtcatgaaggaaaggagggggcgagcaacccacaggcagtgttgtgttgtagtagtcgggctcacagctctgctgtcttctgttgtgctctgtgaccttgggaaggtgactatacctccctgtgcttccgttttctcatgtgtaaaatacagtacctagctcttattgtggttgtgagaatttattgcaggtaaaactctcggcctggcacagtgtaaatgctcagtaaactgtagccttcatagggagaccccaggccaagggacagctccccagcctccttaggacacagaggctttttgatcatgcgttggtgaggccaagaagaggtgggacctgagatacatgcctattatctttctatgctcagagagagagcaggagcttgggttgggtgaaatgatgggcgataaatgttcataggaatcaaaaactcaattgctctcggggccaggcaaaaatttccggtttgtagcctctatatgaaaagcaaagcagaggaagagggaagagggaaaagtagaattggagcaggagagatggatggccacaaataccatgagggatggcattgccggggaggcatctccactgtcactagaggtggctgtcactactcagtgacattgatggtgattgattacccatgtggccttgttagcttcctcttccacaggaaggcggaagcagtctacccagatacagtggcactgaccttcgaccccatccaccagtggctgtcctgcgtgtataaggaccacagcatctacatctgggatgtcaaggacatcaacagagtgggcaaggtgtggtcagagctcttccacagctcctacgtttggaacgtggaggtgagccccccccccacccccttgcccctgcttggcctctgcacagttccccacagtttgggaacccattcagtaattccttcagaagatactcattgactccctcctatgcatcaggccctgtcctaggtgctgaggacacagacacaaaatccctgcccttaacaagctcacatttggatgggaaaggaaacctggaaacatcatcagtgaataacacgccaagcagcagtaaccctctgaagaaaaatgaggcggggaaggggaaggggaatgcaggtggtattctagagaggagaggggtcagggaaggcctccctgaggacatatgagcagagacctgcaggaaatcggggagtgagacctgcaactgctggggagaaccacaagcacagaggccctgcggcaggaacatgcactccacagagagctttgctgtggaggtcgtttatgtatttcactgctttttttaaaaaggagttgaagacggggcatggtggctcacacctgtaatcccaacactttgggaatctgaggcgggaggatcacttgagtccaggagtttgagaccagcctgggcaacacaagaccctgtctctacaaataatttttaaaaattagccaggcatggtagcacacacgtgtggtcccagctactcaagaggtggaggcaggaagatcacttgagcctgggatgtcaaggctgcagtgagctgtgattgtgccaccacactcccacactccagcctgggtaacagtgagaccatgtctaggaaaaaaaaaaaagttttgaagtttttattttctgagaatgaatttgtgggtttttaaaaattctctaaagttaaccaggcacagtggctcatgcctgtagtcccagcactttgggaaatcgaagtgggcagattgcttgagtccaggggttcgagatcagcctgggcaacatgaggaaaccccggctttacaaaaaatacataaaaattagccaggcgcgcctatagttgcagctactcggcaggggctgcggcaggggggctgaaaatttcttactgggaatgtttgtcctagagaaattgggttttcagtggccagattcaggatcgtgagaaagaactttgtccttttgaataggcagcattcagcctatgactctggttgaatctgtctgccttcatggggctgacgtttttgttgacagcactttttttccactcaaagaatgttttttaataacttttaaaattcctgtatgaaatttttaaaaatttgggataataggtgaaatattacagataaggctacagtccacattgatgacttccctgcccccagttctgctctctctcgccctcaccattatcaattttattatgggtgtcttcagttgattttctttgcatctccttattgtttatgtatatagctgttcaacaacagtatctgtggatagatcttttcatcagttctagaaaattctcagccaatactgcttctaccctcttctctctctttttttttttcagacggagtttcactcttgttgcccaggctggagtgcaatggtgtgatctcggttcactgcatcctccgcctcccgggttcaagtgattctcctgcctcggcctctcaggtagctgggattccaggcatgcgccaccacgccttgctaattttgtatttttagtagagacggggtttctccttgttggtcaggctggtcttgaactcccgacctcaggtgatccgcctgccttggcctcccaaagtgctgggattacaggcatgagccaccatgcccggcctattcgctctcttctaaggttctatctaactctaaggttctatctgtattcttcatgtttctgaaaataaaaatcacacaaaagatatgtagagtttatcaattattgttagcagctttttttcccccccaagacggaatctggctgtgttgcccagtctggagtgcaatggcacaatctaagctcactgcaacctccagctcctgcgttcaaacaattctcctgcctcagcctcccgagtagctgggattacaggcagccgccaccacgcctggctaatttttgtgtttttagtagagatggggtttaaccatgttggccaggctagtttcaaacccctgacctcaagtgatctgcctgcctcggcctcccaaagtgctgggattacaggcgtgagccactgtgcctggcctgttagcagctattgatgctcagttcctggacccttttatttattgagggttgcaatatggtgatattctaaatctataatttatttttattagttggactacttacgtgaagagatatttgctctcatctgccatttggtcacccagtgctatacttcatataggaaaggcaggagaaatacttgattctttccctttatttaccagttttcaagataatgaattggttccctatcctctaaaggtaactagttttatttaatatcattataaactcatatatatttaaatatatcagatatgttttaatctattgtaattattaactttattggagctcatatcatcccatctttggccagtgagagcctcttaacattggctcctgagccctttggacatgaccctagtatttcttgatagccaccttgctgcctgggatgccaatatgttccagtctcatcttgtacatttcctgtcacacatcaggaatcaaccatttctcgaaaagaccatgtttttttttttgggctgggtgcagtggctcatgcctgtaatcccagcactttggaaggctggggcaggggaattacccgagcccacgagtttgagaccaacctggccaacatggtgaaaccttgtctccactaaaatacaaaaaattagccgggcatggtggcaggcgcctgtagtcctagctacttgggaggctgaggcatgagaattgcttgaacccgggaggcagaggttgcagtaagccaagatcaagccactgcactccaatctgggtgacagagggagatcctatctcaaaaaaaaaaaaaagaaaaaagagaaagagaaggccagggtttttttttagtacaaattgggacttcagaatcacaggttgggtgttagggatgctcatcgctattgggtcgttcttccagaagcctagttcttaaggacacaggggatggtggaattagaatatccccagtaactcatttgctttttcccacattatacatgcaacagtctgagaatggacaacttttcaattctgaagatagttaaaacaattgtaatgcatatgttctctctgttctctccaatttttaaaatagttatactatatttacaggatctgaatatgtagccattatatactatagtgtctcccttttgacccctgtttattttggaatggggaattatatatgtgtgtatatatgtatgtgtgtgtgtgtatatatatatataaaatgataaaatatacatgacatcaagttcaccatttcaactattttaaattgtaccatttggtggcatttagtacacttacagtgtcatgcagccatcattactctctagtttcagaacattttcatcacccacccaccccaaaaaatcctgtatctgttaagcagtcctccccattccccactccccccatccatggaaatgactaatctgcttctgtctttatggatttgcctgttctgaatcttttcttttctctccttctttccttccttccttccttcctttttttttttttttttttgagatggagtctcactctgtcgcccaggctggagtgatgcagtggcacgatctcggctcactgcaagctccgcctcccgggttcacgccattcttcttcctcagcgtcctgagcagctgagactacaggcacacgccaccacacccagctaattttttgtatttttagtagagacgaggtttcaccatgttagccaggatggtctcgatctcctgacctcgtgatccgcccacctcagcctcccaaagtggtgggattacaggcatgagccaccatgccaggctgtttcctttcttttcctctttctttcttttttttttggatggagtctcgctttgtcacccagactggaatacagaggcacaatctcggctcactgcaacctccacctcccgagttaagctattcccatgcttcagtctctagagtagctgggattacaggcacatgccaccatgcctgatgaattttttgtattttagtagagacagggtttcaccatgttgcccaggctggtttcaaactcctgagctcaggtgatctgcccgcctcagcctcccaaagtgctaggattacaggcgtgagccaccatgcctgacctgaatattccttataagtgaaatcatagactatgtgggcttttgtgcctggctttcacttagcataatgttttcaagatttatccatgttgtagcatgtgtcagcacttcatgcctttttatggtggaataatatttcattgtacggatagaacacattttgttctctgttatcagttgacggccacttgggtttttttctaccttatggctgttgcgaataccactgctatgaacatgtaagtacaagtttttttgtttttttttttttgaaacggagtctcactctgtcgcccaggctggggtgcagtggtatgatctccgctcactgcaacctcaggctcccaggttcaagcgattcttctgcctcagactcctgagtagctgggattacaggcacgcaccaccatgcctggctaatttttgtttttttagtggagacacggtttcgccgtgttggccaggttggtctcaaactcctcgcctcaagtgatttgcccacctcggcctcccaaagtgcagggattacaggcgtgagccactgtgcctgacgtagttctttctttcagttacatcactttgtttctgagtttttgtaggttgtttttcataccttggatcattttttaaatatcttttaccttcttttgaaacagtaggcccagcgtggtggctcacgtcggtaatcccaacactttgggaggccgaggcaggtggatcacctgaggtcaggagtttgagaccagcctggccaacatggcaaaaccctgtctctgctaaaaatacaaaaaattagctggccgtggtggcgggcgcctgtaatcccagctacttggggggctgaggcaggagaattgcttgaacccgggaggcagaggttgcagtgagccaagatcgtgccattgcactccagcctgggcgacagggcgagactctgtcaaaaaaaaaaaaaaaaacaaagtaagttatagtttttatctttttttgtgaaaatatgtttctgctgtgcttttttttttttttcttttttaagagtaactattggatttgaccttggtcctttcctgttgttcatttttatgtgataccagtttttctgaaattttagaagttggtgtgcttcaggacagattttccaactacacaagaagaactctgtcttttcttttttttgtgggggtggggtggcatgttttgttttgtttttgaaaaggagtctcactgttacctaggctggagtgcagtggcatgatcacagctcactgaagcctcaacctcataggcacaagcagttctcctgcctcagcctcccgagtagctgggaccacaggcatgcactaccatgcccagctaattttttatttttggtagagatgggatctcattatactgcccaggcttgtttcaaacttgggctcaagcagtcctcctgcctcagcctcccaaagtgctgggattgcaggcttctgttatttttatactgtgttaaaatatggcagcctgctttctgatacttcctttttgtggtcctctttatctgttatgtctcttctttcgtctcaatctcctctttactttatttcttctgtccctgttgtgattggtcaatttcatttctactcttagcagtttctcttcagtgtggagctttgtcctggaaggacaaagttcacaggatcttctccagtccctttaggccttaccccttgcactcaactgctgttggggtggatgaaaccctcctactttcagctgctgttcagtttggcccagtgtgctttccaatgaacacctcttggctactttggaattatcctgttgctgggtctgtcagatgccttattacttctctgtctcccacatgcatgctgatgatatgtaggtcttgtgattggtggtggtttgtcccactcacttgtattttggggtttatgggagtattttgtcactgagttttgctataaatgttgtctgtaggtttgggttttgctatctggttgatgtttttcttatgtcgagattttgggagattaaaaaaattaatgccgctactatcatcttcccagttctcaatcttccgtattttgaaatctctttatatggtggctctttgtccttctcagcttcattctaaatatctttagttttgtctttcagttcacttaattttctcctcagttatatctaatctttggtttttaatgtttttatttttttattattttttttttgagacggagtctccctctgccgcccaggctggagtgcagtggcgtgatctcggctcactgcaagctccgcctcccaggttcacgccattctcctgcctcagcctcctgagtagctgggactacaggtgcctgccaccacgcccggctaattttttgtattttttttttttagtagagacggggtttcaccgtgttagtcaagatggtctcgatctcctgacctcgtgatcctcccgcctcggcctcccgaagtgctgggattacaggcgggagccaccatgcccggcctattttttatttttttatttttatttttttgagatggagtttcgctcttgttacccagactggagtgcaatggcgcgatcttggctcactgcaacctccgcctcccaggttcaagcaattctgctgcctcagcctcccaggttcaagcaattctgctgcctcagcctcccgagtagctgggattacaggtgtgcaccaccacgcccagctaattgtgtatttttagtagagacggggtttctccatgttgaggctggtctcaaactcctgacctcaggtgatccgcccacctcagcctcccaaagtgctgagattacaggcatgagccaccgcgcccggccaatatgtttttattattcatttctagaagctgttctgttttggtctttttcagccctgcttggttaatctttataatttctggttggctgcacacttttaatcttgtcaaaattatcttttagttcttcaaacatattgaatgtagttattttatattctgtctgataattccaatttgggtttttttattttgtttttggtttgtctgtctgtttgttttgagacacagtctcatatgttggccagagtagacttgaactgctggtctctagcagtcctcctgcctcagcctcccaagtagctgggactacaggcatgcgccacctcccctgatttaataattccagtatttaaagtcttgctagactctgttgcttctgctgcttcttgctgatggtacctcgttttcttttgtgcttagtcatgtttgattgagttccacatttcccttggaagtttatttgagggtatgtgttaaggcctaggctgaaggtgggacatggatgatatatggtagcattttgtgtcctttttttttcttgtttatttttagcatagaaggtattgcacgatacctgtttatctttaacttactttttttttttccatgaaaatgcaacagtaagtcatagtgctgtcattgagtcatcctttgccttgtcctctgggaactgtaggtgtatcctgagtttgaagaccagagagcttgtttgccatcaggatcctttctgacttgttcttcagacaacaccattcgcttctggaacttggacagcagccctgattctcactggcagaaaaacatcttcagcaatgtgagtggcttcctttgtgaaccatctttcaggaggaacaaagacctactgtaagcttgaatgcaggggcaggagagagtctgatggaccctagatgttaggttccatgagggcaagagccggcaaccaaggcaggtccctctctgcatcactgcctcttgtttctctttctcctgccccctctctgaggtggcacgctctatcctctctgattctttgccagttggctcctgctctgcagatgtgtggacgtggccactcccggcagcccaacacacccagcccaggtgaaattgcttcctaagtcttgagatggaattccctgggagagcacctgatgagccagcccattcagctgccacacagtgaggcctcacgggggtatgggcagaatgctggcgagagccatgatgggaggctgggaagaaaagtttgctgaggaaattttggttagtattgcaagcccagtgagagggcgtctctggggagctgagacctgagtcatgcattcatttattctgcagacacttattaacgtccatgccaggtgcttggctacatgctagggacacaacagtgactaagactcttctgtcctgtggcacacacaatctagtgagggccgacagtgaactgacagccgaccatgttaatgcacaatcacaagtgcgaaaagcactgtgaaggaaaatgtgcagggtgctagtaggacatagagcagcagcatgtgaacttatctgggacatccggagcagcttcccgcggaagggacagctaagttgagattgggaagagtaaagagggaaggggagagggtctatacttagggaatagcctgtatgaaggccctggggtgggaaacagctgggtgaattggaaaacctgaaagaggccagtgtgattggaactaaaaagaccctccatgcaggaggctgtagcaggtgccctgcaggtgcacctttattactcccctcattccctacccagtgctaccatcgtctcctctgtacctgtgacatacatgctgtttttggctgcacacaatagaaaaactcaaaacaagaggtaaaagttaggtttctgactcatgaaagtagtctgaaggtaaccagtttagaccgttctgcaggaagcccttagggatccaagggccttccagctctctactctgtcatttgagggagcaggctatgtcctcatgacccagtgtggctatgggggctcctgctatcatatctgagttccaggctgcaggatggagaaaagacagcagaagaatacgtgcttgctttatatttaatagttcagaatttattcacatattcttatctagctgcaggggaggcaaggaaataattattctgattggtgaaactcccagctcaaaattagagttgtattactaacgaagaagagactggctatggagggacacgatttcagaggtgcttctgagctgctcgtgctgacctcagccctgtccttcctgcagaccctgctgaaggtcgtgtacgtggagaatgacatccagcacctgcaggacatgtcacacttcccagaccgggggagcgagaatgggacacccatggacgtgaaagccggggtgcgggtcatgcaggtcagtcctgacggccagcatttggcttcaggcgaccgaagtggaaatctgaggcaagtgggccctggcagtgtccagtgtacacctcccagctccagctcaggttctcagggcagtgggcagaagccctggccttggcacctcctgctgcccattgggaatgaggggctgtgaatagtaatcccatgaacagctcccattgggaacttaagctcgtaagaggcttccagaagggctgagagcagagtaactaccaggacctcagcagctagggtgtgcagattttgcctatagagtgtacaggcaagctcacatgactctagggcagcgtgacactttcaccagccacatggtaccagtgctgaactgtcaccgaagatgccagctggaggagggtcctggtggctctgggagaggggctatgagggtgggatagctgagagttcaggctgcttatgtgccctgttgaggtttggcaggatgttaccaacccagtaggtgctagtgggacataggccctgttgctgggaccaggtttaagatgacaaatgacagctgtgaccacctgggtattggagccactggggaatggaggagagttgggggaaactagaggggacataaaggggcagcagccaccaggcagccccaggagagtaggctacaagttttcaaactttcctgttgtcaagaagagcagaaagtgccgatttttttctgtgaaattcgataatttttaaatattggcacctgttttgatatcagtcactgtatgagaccagctcagtgtgtcagtgagctgcttacattgacatggcactgtctggagtggcaaaacggtaccaagagccaacatggggatagtgctcttcccccttggtgggcgctggcctgagcactgtgttgactgatttaatcctctcactgacccctgatgtaagtgatgttattggcacaaggtgtctggagtaagatcacacgggtagaatgaagaagctgggatgactcgatgactgatttcatttggggagaatcaggaaggtctagatttgagactcttttaacaatgagagactggaatcaaatgttctcatccatagctcctatcctggactatgacctctggcccctagcccctggcccctgtcctaccccagggaccacctctgatgcagccctacgtaaacacctgcccccctagaagactgtcctagatccctggggctctgttctggcccaggcaccacaaggggctgctgcctgctgaggtgctccctggttcaacacggctccctttacgatggcaggtttctaaatgagaaaagtggttgtgcatgtctagagtatttggccatgataaggggttctcattgttggtggcctggccattctgacctattctagaagtggtagagcacatggggctggggtgtggggcttcagcgggcggtgtgtgtctcccaggatccacgagctgcacttcatggacgagctggtcaaggtggaggcccatgatgctgaggtgctgtgcctggagtactccaagccagagacgggtgagcccgcagcaggggtggaatgggggtcaggcagggaggcagcccccctggcagggccacagaaaggggtagttggtgtctggtgggactgtggatgacagctgggagttttgtgttcggtaagggcccctgtagctggaccctgagaccagagtggctgggacttcagaaagcaagacacccgcaggcaggactcagcttgacttgcccgctgctggtgccagcacccaagccaaaggggtggatgtatgaatgagtgaattgtgaatgagaagatagattgattgttaggcattattttcaaaaagtttgaagcctatagaaatattgggagaatattataatgaacaccccataggcttcacccaaattcctcaattttttttttgagatggagtcttgctgtcacccaggctagaggggagtggcaccatctctgctgactgcagcctccacctctctggttcaagtgattctcgtgcctcagtctcccatgtagctgggattacaggtgcctgctgccatgcctggccaatttttgtatttttagtagagatggggtttcaccatgttggccaggttggtctcaaactcctgacctcaggtgatccgcccgccttggcctcccaaagcgctgggattagggcatgagccaccacacctgacctttttttttttttttttttttttgagacaagagtctcactctgtcgccctggccggagggcaatgacgcgatctcagttcactgcaacttccgcctcccaggttgaagcgattcccctgcgttcaagcgattctcctgcctcagcctctcgagagtagctgggattacaggcacgcccccaccacacccggctaatttttgtatttttagtacagacggggtttcaccatgttagcctaggctgaaggctaggaccatagtagggtctccagacctcatggtcctcttcattaaaacaacagaaaattccttctgggccatcagatgagatcatgagataggagaagatttccaagtgaagatttcgtttgtttcaagacagagtcttgctctgtcacccagatgatatatggatgatatatggtagcattttgtgtcctttttcttgtttatttttagcatagaaggtattgcacgatgctggtctcaaactcctgacgtcaggtgatccacccgccttggcctcccaaaatgctgggattacaagcgtgaaccaccatgcccggctcctcaagatgttttctaggctgggcacggtggctcatgcctgtaatcccagcactttgggagttacagagttggtggagttatatcctgatgtgattttccccatgttcttctttcgttctctcatcccccatgctgtgtgccccaccaacttgtcttgaaacatatcttcactcggttcgcctctcctgatctcccctctgcctcaggtcatgttattaggcctcagacatagcaagtgaccagagtagggaaggctggtggcagatgggagtctggccacaggcagtcaataggacctgaacaaggcccaggtagccagacctcagagggtgagaggacactggttttggaagaggctgagaggttgccagggctttacccagcacagacccagcaggcaagagcgctgggctctgctggggcgtctgctgtggatgtccctggaggagcgtccatgcgcccatcgagactcatcctccctgagctggtggtgaggaggtgaaatgccagggtgtgggggctctgggaaagaccacacagagctaagggagtggcccttgccaggcttgggccaagttggctacagttgaagaaccaaagaccccttctccgaggactgggcagcttggtcacactgcccttctgggaggccagggcacccacgcagccttcaggaaccagtctcattctctcctctcacagggctgaccttgctggcctcagccagtcgggaccggctgatccatgtgctgaacgtggagaagaactacaacctggagcagacgctggatgaccactcctcctccatcaccgccatcaagttcgctggtgagcccctttcttcccgctccctgcgccttgctagctaccctgctaaaaaaggattcattctttcaactctcctgtaaaatatatatccaaacaagtgaatacagtatctgtgtacagtatacagaataatgactggggccgggtgtaatggctcacacctgtaatcccaacactttgggaggccaaggagggtggatcacctgaggtcaggagttcgggaccttcctagacaacatggtgaaaccccgtctctactaaaaatacaaaaatttgctgggcggggtgttgtttctgtaatcccagctactcaggaggccgaggtgggagaattgcttgaacctgggaggtggaggctgcactccagcctaggcaacagagtgagaccctgtctcaaaaaaaaaagaataatggccaggtaccatggctcacacctgtaatctcagcactttgggaggccaaggcaggtagatcatgaggtcaggagttcgagaccagtctggccaacatagtgaaaccccatctctactaaaaatacaaaaaaattagccaggcatggtggtgtgcacctgtaatcccagctactcgggaggctgaggcaggagaattgtgtgaacccgggaggcggaggttgcagtgagccaagattgcgccagtgactccactccagcttgggtgacaatgcgagactttgtctcaaaaaaaaaaaaaagaagaatataggccgggcgtggtggctcatgcttgtcatcccagcactttgggaggctgaggcaggcagatcacctgaagctaggagtttaagaccagcctggccaacatagtgaaaccccgtctctactaaaaattcaaaaaaagtaaccgggcatggtggtgcacacctgtaatcccagctacttgggaggctgaggcaggagaatagcttgaatccaggaggccaaggttgcagtgagccaaaattgtttcactgcactccagtctgggtaacaagagcaaaactccatctcaaaaaaaataaaaataaaaaataagctgggcgtggtggccgaagtgagtatccacagttcttaggagcaaggtttgaactaggacgttgttgatagcagagactgttctaattgctcatggtcgtaatattgttaaatacggtacttggattcaccacgtgcaggttaagaagcagaacattaccagaggcttgcaggccttctctgggtccctcccaggttacccttcctcccttatatggggctcactcccttctgtgagccaatgactcctccttgagcaacatctaatacttgtatgtcaggcctggaccctctcaaatgtcctgtcatgaaggagcatgtgtgatgtgcccagactcagagttttatatttgttctgtcatttcatcctcaccaaactgttattctgtaaagaaatgagacggccgggggcatctcacgccattgcactccagcctgggcaacaagagcgaaactctgtctcaaaaaaaaagaaatgagaataataaaagcaagaatgtttctaatgcttaccatgtggcagtccctgttccaagggcttcacatcactctccagagaaggaactgtcaccatgcccattgtacggaccggaagttgaggctcaaaggggaggcccaggttcagagcagtgtttaacagctttgaccttggcaccagagaatgcctgggttcagtcctgcccctgtcctctctgtgtgccttgggacaaggactctgtgaacctctgtgttcatgcttgtccagtgggatgggtggtgagcattcaggaagacccgctacatgcatggggcctggcccaaggctcatgtggatcttgcagttgatcctgatggcacgagcctcccagcctgtctccactggtcgctgctgcagtcctgcctctactccgctactcaagtcacctatctcaatcccagactggagagggtgtcccttctttgtccccagcctttgtttctctatatgcccttgctctgcagagcctgccttggccacagctccacctgtgccccctcacacgtacagctcataccttacagagtcccacccagacccagcacccacctcaccacctttaggaagccttgatcccagcacagttgattgatggctcttgcagtggagttccccagctagggtcccctgcccatgtggcccagccctgcctaacacacagcgtcctcctcccctaggcaacagagacatccagatgatcagctgtggggctgacaagagcatctactttcgcagtgcccagcaggtagggtggcatggcctccttgggggctggggtggggggttgtcggggcattctctgaaggtcctgccggccctgccagggttcggatggactacactttgtccgtacccaccacgtagcagagaaaaccaccttgtatgacatggacattgacatcacccagaagtacgtggccgtggcctgccaggaccgcaatgtgaggtaaggggtggccctggacccttagctggcctggtctgccttgtcctaggctgtctgctttcctccctctgttcctctggtccccaagaagctgggaaggaattgagggacccagcaggtgttccttcttggtttttttttgtttttgtttttgaggcagagtcttgctctgttgcccatgctagagtgcagtggcaccattttagctcactgcaacctccacctcctgggttcaagtgattctcctgcctcagcctcccaagtagctggaattacaggcgcctgccaccatgcctagctaattttttgtatttttagtagagacgaggtttcgccatgttggccaggctggtctcgaactcctgacctcaggtgatattgcccacctcagcctcccaaagtgctgggattacaggcgtgagccaccgtgcccggccaccagcaggtatttcttagaagctgggctctcccaagcctggcctccaggtcagcagagggctttcttctggctctccctagagccggtgtgggatgactaaggtgctgatgtggcacataaactccctcattcacccgtattccctgagcacctaactgggctggatggtgctgggatcatggcagtggccaggatagccccaggccctccttcatggagctcacagtccagtagaatggacacggccacctcacagccacagacagtgacagagtggtcagagatgggggagcccaggggccctgtggagacacctgaccccacctgcggatcaagcaggacttcctggaggaagagacaccttagcctggggaggatgtggaggagcgagccagggggaggcagagagtgagtgtgcagagggcaaagcagtgcaaagaggctctgcaccccttcccagttctttctcatgcggtgccaagcactgagcttgcagtgtgtgggggagatgaacattaactcagtggataccccaggacaacctcagcttgagatggggtttcagtttcagtctaggcatcagatggggacaagaggtagcagggggcttccaggggaggggaggacagcaagagccagagaatgaggtggtggggtaggcggggccctgttggccgcaacatgcccctacttccccagagtctacaacactgtgaacgggaagcagaagaagtgctacaagggctcccagggtgacgaagggtccttgctgaaggtgaggagttggagacccctgtctgtctgctgccctgatgggccacctattgtgacggcccacacctgagacctgtgcccttggtccttcctcagtgcaccgcgctgcccagcaccttctcaggcctggttaaacaaggatgcttgcgagagggtggggagggtgaccccagctgtgtttcctttatttacagagcccttccccaagtggggcgtctaagtgggttccattttgagtggcagcagggtatggtgggaagaatcagaggcatgaactcccctcctggtttgcccacaccagccacgggtcactcaggacaaggggggaccttctcagagcctctggtctaggacagttatgggttcaggttctgcctcaggctgactgtgtgaccttgggcaagcatcatctcttgaaatgcacacagacagcttgtctcatagacttgttctctggaggagttcagtttgcacatgttcagtgcttagcacagggcctggctactgttgttactgctgcggtggttgttaatttcttcacgtgtcgaatgggagcgggagctcctgccctgccagagtcccatgtgctgtgcatgcagcacgggggagggaggggcccaggcctcatcataaggaagaagcaggcagctggagtgacatgtgggtccctttcctggcaggtccatgtggacccctcaggcaccttcctggccaccagctgctctgacaaaagcatctcagtgattgacttttactcgggcgagtgcattgccaagatgtttggccattcaggtgggtgtgcctctctgcttgggatgcctccccacccgcccacaccctctgactccgaaggcaagtgcagcctctctgctttgtttgcagaaattattaccagcatgaagttcacctatgactgtcatcacttgatcacagtatctggagacaggtgggacatggacctttgggagagttgtggctcagataccatgagcactgcactcagcctgcctgtgtagagagcatttctaaactgcccagtttggattgtgggagtcttggtgtcacacccagccctgagttcaaataccagctctaagctgggcatgatggctcacgcctgtaaccccagcactttgggacgctgaggcgggtggatcacttgagctcaggagttcgagaccagcctgggcaacatagcaaaaccctatctctacaaaaaattagccgggtgtggtcatgtacacctctagtcccagctactcaggagggggaagatggcttgaacctggtaggtagaggttgcagggagcacagatcatgccagtgcattccagccttggtgacagagcaagaccccgtctcaaaaaaaaaacaaaacactaaaaaaacatatcccagctctgccatttattttcttgtcaccttgagcaggttatttcccctgagcctcagtttgctcccctgtaaaagacaccaccgtttacatttaccttaaaaatggtgtgatgaggccgggcgcagtggctcacgcctgtgatcccagcactttgggaggcctaggtggatggatcatctgaggtcaggagttcaagaccagcctggtcaacatggagaaactgtgtctctactaaaaatacaaaaattagctgtgcgtggtggcaggcgcctgtagtcccagctacttgggaggctgaggcatgagaatgacctgaacctgggaggtagaagttgcagtgagctgagatcgcgtcactgcaccctagcctgggtgacagagcaagactctctcaaaaaaaaaaaaaaaagaaaattgtatggtgagaaatgaatgagatgatatacatacattctttagcacatgggtggtactcaaggaagtcccttttgtcactccctttgatttaccccagttcttccccacagcccccttcctcaggtcttgaggcctccagaacaggccctggtttgctgggatgccccagacctgggcccagggtgtggatgtggcaagtccagcacccctgcactaagcggataggggtgtgttttccaggagcatctggagaatggggtccaggctgtggtgtgggtggcttcagggtcagccacggcagcggctcccatgcttactcttcctctgccttgtgtgtctctctttgacctccgcagctgcgtgttcatctggcacctgggcccggagatcaccaactgcatgaagcagcacttgctggagattgaccaccggcagcagcagcagcacacaaatgacaagaagcggagtggccaccccaggtcctggcagcccctgcctgtccaccagagggatgagtccctgccagggccccatggagtgatgctggggacacagtggtggccaagacagccctaggccctgcccttagcacactcacagctgagtaggggagacagactttgaatatgcagttacagtaatagatacaaaaaggttttgtggatttttttaattttcgtaaataatagagacagagtcttgctgtgttgcccaggcttgtcttgaactcctgggcccaagtgatcctcccaccttggcctcacaaagtgctgggatcacaggtgtgagccactgcacccggctatgagaagggtattaaagtggaaaagcaaagtgtttggcgagcctctcagcactgtgatgggggatgccccaagcggctgtgggaacagagcagtccctgaccggccagccaaggggaggggtgggtagacaggggatctgaggggagggctgcagtggggccacgtgtcctcttactcccacgtgaaagctgtagcttcacttacttctttgaatcttctaaatatatttctttcaagtctttatgtagcaaagccaattttatttgcagagaactcatgttctggtttttgatttgaggttttggtttgggtattgctcattttgagtgggaggttttttggttttcttctcttctgctgctgggtgtgtctgtttttgccattggctccatgtggctcccagggcaatgtggagaccaggccttgacatgggccactggtcctgaggtcctgaggtggtgttagagatatcttgcttttgaggctcccactccacccccaagctatgaaccagggccctggcttcagtgcctgcctcatgccaagggtgttttagtttcccgtactcgggaagagccaccatcattgctaccacctacaggaagcccagcacaggactgcagccccgctgtctgcttggctttctgtcccattgctgtggccctgagagtttgcattcgtttgtagcctggcctttgttaatctcatctattgtggtgatgtgtttctagtggggagacggcatcaagtgagagacttgccagcaccatcttgaccagcagccaagaatatgttcacatggagcttagcacagggcccagccctaggcaagtccccaccaccagcccatttgcctgtattctctccttaccatcctcattcctggctttaggcaggatacgtatgtgtccacacctagtgagattcactccctgagccctggagagcaaacagaggatgatctggaggaagagtgtgagccagaagagatgctgaagacaccatccaaagatagcttggatccaggttggaaaaggggccctattttgaactatgtcagtgtagggaatcattgctgggttttgcccatgaccttgtttacagggcctggcacatattaaaactcaggagtcgacagggtgcggtggctgatacctgtaatcccagcactttgggaggccgaggtgggtggatcacctgaggtcaggagttggagaccagcctgaccaatatggtgaaaccccgtctcaactaaaaatacaaaaattagccgggcgtggtggcgtgcaactatagtcctagctactagggaggctgagacaggaaaattgcttgaacctgggaggcagaggttgcagtgagctgagatcgcgccactgcactccagcctgggcaacagagcaagactccgtctcaaaaataataataataataataatataaataaaataaataaaattcagtaatcaggcttagcgtggtggctcacacctggaattttagcactttgggaggctgaaatgggagggtcacttgaggccaggaggtcgagaccagcctgggcaacatagcgagagcccatctatgcaaaaaaaaaattttttaaagaaattagccaggcatagtggcacacatctgtagtcccaactacatgggaggctgaggcaggaggatcacttgaggccaggagtttgagaccagcctggcacgtaccaagaccccgttcctacaaaaagaaaaaaattagccaggcctggtggtgcacacctatagtcccagctacctgaaaggctgaggcaggaagatcgcttgagcccaggaattccatgttataatgagctatgattgcaccactgcactccagcctgaataatagagtgagatcctgtctgtagaaaaagaaagaaactcaataatcatatcagtcaagactctttcagtataaaagcaaccaggcttaagtcaggaagaggattttttggtgcctgaaaattggagaggattagctttcagcatggctagatccagatagacagatgatgttaaaaggaagatttttttttgtatcttttggctctgcttttcttcatgttggctttgctgatggacagactgtccctttactaggggaaaagatacccccagcaactacaggcttataaaactccatagagaatagaacacctctttcctatagtagctcaagcagagtcttagggttgtgtggctcatgtttctggtatctgctgtacccacttctgagccagttgttgtagctgtccacatctcagcatgtgatcacttctgagggcagagactgtagtcagctccatccactcacaccacctgaccaggcatcaaagatgtgtttgaggccgggtgtggtagctcacgcctgtaatcccagcactcagggaggccgaggcgggtggatcacctgaggtcaggagttcgagaccagcctggccaacatggtgaaaccccatgtctgctaaaaatacaaaaattagctgggcgtgatggcgtgcgcctgtaatagcagctacttgggaagctgagacaggagaattgcttgaacctgggagacggaggttgcagtgagctgagactgcgccactgcactccagcctgggtgacaaagcaagactccgtctcaaaaaataaatgaacaagtaaaaataaattgaattatgttgcggatattgtccggaatctttttcctctgcaaagtctctcatctacctgtatgttggtgaatacaaagcagacgcctgcgaaattttaagttattcccctccaggtggccatttaggtttttcctgattgcacatcactgttaatgaggctatggagtggagaccactcctaagcctcctcgaaatgtgaggacttctccaggagagagtctgaggagtagcaccactggatcctggagttattttattttactttaaaaaagttgttttattattttatttcactatttttgttgcccaggctggagttcaatagcacaatcatagctcactgtagccttgacctcctgggctcaagcaattttccctccttagcctgtggagtagctgggaccacaggctcaagctcccacacccagctaaatatgtgtgtatcaggggatggtgtgtgtagagacaaggtctcactgtgttgcccaggctggtctcaaacccctggcctgaagtatcctcccacctcgacctctcaaagtggtgggattacaggcttgagccagtatgcctggcctttattttaaaagagaaccccggctgggcgcagtggctcacacctgtaatcccagcactttgggaggccgaggcgagcggatcacgagttcaggagatcgagaccatcctggctaacatggtgaaaccccgtctctactaaaaatacaaaaaaaaaaaattagccgggcatggtggcgggcacctgtagtcccagctacttgggaggctgaggcaggagaatggcatgaacccgggaggtggaggttgcagtgagccgagatcgcgccactgcactccagcctgggcaacagagcgagactccgtctcaaaaaaagaaaaaaaaagagaaccccaagagttctccaaacccagttactgccccaccctgcattgcattaggctctccattgtccccacacttttcctgccatcctttggtagtattaagctttttcacctcggtcagtctcgtgagtcaaatatcgcatcccacggtttaagtttgcatttccctaacccccggtgctgttgagccttctgacttctgggttgtggtgttgcctctttggggactgcccggttatgtatgtggcctgtttgttgggttgtttgtcctcttttcatggattctgtgtctttccagatcctcgttgcctgctaaccaacggcaagctgccactgtgggcaaagcggctggtaagtcttcagggagagggttgctcaggggctggcagaggaaacgcctccccagctctgccttctggaagccctttttcctttccatgtccctcttttccctggagaagccctgtcatccttccaggctcagtgagacagccctttgttcatgatcagtgctctctgccaggcattgttctggatgtcagggacacaacagtgagcaagggaaacaaaagtctctcccttcacaggctcacttgcctgtgtgggcgaggaacaatatccccattaaataagtaaatgacgtagtaggttgggtgctgataagtgctgtggagggaaaagaatcaagaaggaaaatacgtcagccaggtgcagtgatacgtgtctgtggtcccagctactcaggaggctgaagtgggaggatcacttgagcccaggaggttgaggctgtagggaactgagaaggcaccactactacactccagcgtgggcaacagagtgagatcctgtctcaaaaaagagaaaaagaacaggggcccagcacggtggttcatgcctgtgatcccagcactttgggaggccaaggcaggttgatcacttgagcccaggagttcaagaccagcctgagcaatatagtgagaccccatctctacaaaaaataaaaaaattagccaggcatggtggtgcatacctgtagtcccaggtactcaggaggctgaagtgggaggattgtttgggccagggaggtcgaggatgcagggagctgcactccacagcactccagcatgagcaacagagccaacactttgtctcataaaaaaaataaaaataaaaaagaaaataaggagtgttggggggtgtcagttttaagtaaacaggaaaggcctcattgggaaaatgatgtttgagcagagttgaagcaagtgagacaggcagatactgggacgaatgttctagtcataacagcctatacgtgtaaaagccacgaggccaggagctcgagaccagcttaggcaacataatgagactcccatctctacaaaagattaaaaatagccaggcatggtggtgcacacccatagtcccagctactcaggagcctgaggcaggaggatcacttcagcccaggagttggaggctgcagtgatcgtgctactgcactccagcttggatggcagaacgagaccttgtctcttaaaaaaaaaaaaagaaaaagagaccgggtgcggtggctcacgcctgtaatcccagcactttgggaggccaaggcgggtgtaatccaaggtcaagagatcaagatcatcccggtcaacatggtaaaaccccgtctctactaaaaatacaaaaattagctgggcatggtggtgcatgcctatagtcccaactactggtaaggctgaggcaggagaatcacttgaacccaggaggcagaggttacagtgaaccgaaatcatgccactgcactccagcctggcgacagagtgagactccctctcaaaaaaaaaaaaaaagaaagacaatgtggattataagagacagaataagagaggtgaatgaaggatgatcccaaggttggggcatgagtaactggaaaaaacaactgaaacagggaatctttaggaggagcaggtttgtgcagaggaaatgagttgagttgtcagcatgttaactttgaaatacctaccagacatccatacagaaatgtagagcagtcacatgtgcaattctgaagtttcagagaaaagttcatgaatcccagctgggcattcccagcactttgggaggccgaaacaggattccttgagcccaagggtttgagaccagcctgagcaacatagtgagagtccacctctaccaaaaaccaacaaaatgggctgggcgcagtggctcatgcctgtaatcccagtactttgggaagccgaggcgggcggatcacttgaggtcagcagtttgagaccagcctggccaacatggcaaaaccccatctctactaaaaatacaaaaattagccaggtgtggtggtgggcacctgtaatcccagctactctggaggctgagacaggagaattgcttgaaactgagaggtggaggttgcagtgagccaaggtcacgccactgcactccagcctgggagacagagcaagacttcgtctcaaaaaaaaaaaaaaaaaaaaaaacagagaaaggttcacgctggagatatgtacctggaagttgtttctgaatggtattgaaagccaagagtccagatgggctgtgtgaaatgtccgtgtcgctccctgcagtgagtgagcactcagccagttgcctgactgtccgatatccttcaagctaggggacgatgatgtggcagatggcttggccttccacgccaagcgcagctaccagccccacggccgctgggcagagcgggccggccaagagcccctcaagaccatcctggatgcccaggacctggattgctactttacccccatgaagcccgagagtctggagaactccattctggattcactggagccacagagcctggccagcctgctgagtgaggtacacacttccaccgcagcctggcccatagccccggcaccgtgacggccccagggcctggcgccttaggctgactcccactccatgggggcagggaggattacatgagatggtgaagggcaggagggtgagccccaggtctgttgcacagcaagacttcccaaggcagacagggagtctttggaaagtgggtcacttgggggttaagagcttggatgctagagcaggcttgtacccaagtgggggacatttgggtagatcgagccctgaccctacccattcctgttgtgtgacctggagtaagaggcttacctctttgggcttcagtcttctaaaaagtagtcataatggggtcaggggcagtggctaacacctgtaatcccagcatttggggaggccaaggcaggaggattacttaacgatcacttgaggagttcaaggccagcctaggcaacgtagcaagatcccacctctacaaaaatattttttaaatttttttgtttgttttgtttttaaatggtaataacaatctcttctgccccagagggcttttacaggaatccatgcttaagtatagggcctgggctcttagaggtgcccgtgcaactttagctctttctctactattttccaaacaaaattcatttttatcctatcctataatttgtcatcttcattgtggtataatatacatccagtaacatgcacagattttaggtatacagcttgatgaactatctgtgtaattcacgtgtgtccactaccctgggcaaaatctggagtgttttctacctcatagaaacccccttctgcccttcccagtcaggtccccgcaccaggataaccagtgttctgacctctcaccaaggactgggtttcctattcttgaacttgatataaatagacacgtagagggttgggcctcctatttttggtgccacacctcttcctcatctgtaaagggactgataatgcaggggcagaccaggacaagctggttgcgagtggagggcatggcacaggccctggttcacagcctccagcagtggggctgctggcatggttcctggcgcactgttggtggccccagccatgcctgcctcagaatggctgtgctgtcttccccatagtcagagagtccccaggaagctggccgcgggcacccctccttcctgccccagcagaaggaatcatctgaggccagtgagctcatcctctactctctggaggcagaagtgacagtcacagggacagacaggtgggtgtcctttccaccaagggagccttagttggaggaacccccagctgatagctgcatcctggaagaagtgctctctgccttcccagtgggcttgtgggagtggggacagttgaggcctggatggggcaggagcccagccttagttccctggttccaggtggggtacaggagggcctgacctgggggaaggagggggcatttggaggaggcggggaggctgtcgcagtgctcctgcaggagcagcgggtacaggtgcctaggggctccgggtggggctagctgttgagtctccagctgaagtccttgttccctctctgcccccactggcactgcagccagtattgcaggaaggaggtggaggccgggcctggagaccagcagggcgactcctacctcagggtgtcctccgacagcccaaaggaccagagcccgcctgagggtgagtgcagggcaggcagggaccctgtgacagtctgtgcgttcagccaagcccctttctgggcaccgatggtgactttgacccagtactgaagctcagagtctgtcgaggaagacacatgtggtccctgctgctgcctgaggattctgggcccagctgcctacagctgagagcccagctctgccacctccttgatgtggaacttcccttattcataaaatggggggcagctgctcttaccatccctcctccagatggggaaactgagcccagggaagggtagccctggccctggctcaccagaatggtcaggctgtgggctcctgaccccgactctgtccttcagactcgggggagtcagaggccgacctggagtgcagcttcgcagccatccactccccagctccgcctcctgaccctgcccctcggtttgccacgtcgctgccccatttcccaggtaagcaggggccagacacgcaggggactcgctgctcgggcctggcttagggccagtcacaatgtctaagcacaggccctgcacttggagcccactgagcctggaagacggggatccctgcttctcagcctgcgggcaacagggcagggatgggtggggcccgctttctccatttcaggtggcgtctgctgtgactcatggtgttggctcctcttgtccctcccctccttccctgtcaggatgcgcaggtcccacagaagatgagctgtccctgcccgagggacccagcgtccccagcagctccctaccccagactccggagcaggagaagttcctccgccaccactttgagacactgactgagtccccctgcagaggtagggccctgcctcacccacacctgccgaggccgtctgtgcagcctgggcacagcattggcgtccctggagttggctccccagcagggccaggagggtgagtggagagcaactgcttcgttttttttgagacggagtctcgctctgttgccaggctggagtgcggtggcccaatcttggctcactgcaacctccgactccctggttcaagcaattctcctgcctcagcctcctgagtagctgggattataggcatccacaaccacgccctgctaattttttgtatttttagtagagatgaggtttcaccatgttggccagactggtctcaaactcctgcctcagatgatctgcccgccttggcctcccaaagtgctgggattacaggcgtgagccaccgtgcccggcccactgcttcactcttgacctgagcctcacgatgcctcctcacccactgcccctgctcgtaccctgtgtctgtacataagggtttctggggagtgccccgctgggctgtgggctggcctagggccagggctgctcggcgggaagggttatgagggtcccctcgggatcttcccctagagctcttccccgcagctctgggagacgtggaggcctctgaagctgaagaccacttcttcaacccacgcctgagtatctccacgcagttcctctcaagcctccagaaggcatccaggtagaagctggccaagcactgcccaccctctggctcctcaacagtgccccagggcaggctgaatgagaatcatcccccctgctctcctccccacaggttcacccataccttccctccccgggcaacccagtgccttgtgaagtctccagaggtcaagctcatggaccgaggcggaagccagcccagagcaggtactggctacgcctccccagacaggacccacgtgagtattgggcccacctccgtcagggcacggggctgggaaccctgaggccttgtcctcacctcagagctgtgcctgcaggtcctcgctgcagggaaggctgaagagaccctggaggcctggcgcccaccacgtgagtgccccagtcccagacggacagtcctgggtttctcggcgagtggccggatgtccagcctagctgtggggcgtgggggccctagccatcagttctgtgtggtggagtcagtgccatctgcttccgttacagctccctgccttacgagcctggcgtcctgtgtccctgcttcctccgtgctgcccacagacaggaatctcccaacgcccacatctgcacccaccccaggcctggctcagggtgtccatgccccctccacctgttcctacatggaggccactgccagctcccgtgccaggatatcacgcagcatctccctcggtgacagtgagggccctatcgtggccacactggcccagcccctccgtaggccatcgtccgttggggagctggcctccttgggccaggagcttcaggccatcaccaccgcgacaacacccagtttggacagtgagggccaagagcctgccctgcgttcctggggcaaccacgaggcccgggccaacctgagactgaccctgtcaagtgcctgtgatgggctcctgcagccccccgtggatacccagcctggcgtcaccgtccctgcagtgagcttcccagcccctagccctgtggaagagagcgccctgaggctccacggctctgcctttcgcccaagtctcccagctcctgagtcccctggccttcctgcccaccccagtaacccccagcttccagaggcccggcctggcatccctggcggcactgcctccctcctggagcccacctccggtgagtacagccctggagcaaggactgtcccctaagctcatcctgtgtgctagttggctcagctccaaagatggatacttgacctggccacagggactgtgccattcattcattcgtgcattaacttaaatatttaatgagcattacatgttgggctttgtgctaaaccctgggacatgggacatggtggtaaacaacacagagaactgacagcttcaatggggacaatgcccagactaaacctttaaggaacccgtcatatgtatcacgaagtgacacatgcttaggagggacagaggagggcgagggagtgcagggtggggacaggggttgggattacaaaccagaagataagaagaggcttcagggaggaggctgcattggagcagagacctgtaggagtgaaggggagggagccttggggacccagagaagtgttccagacagaagtacagcatggagtccacccagtcgctctggccgctcacaccaatggaatgcagctcatcttgctcattcccttctctctaccccaggtgcacttggtctgttacagggcagccctgcccgctggagtgagccctgggtgccggttgaagccctgcccccatctccccttgagctgagcagggtggggaacatcttgcacaggctgcagaccaccttccaagaagccctcgacctttaccgtgtggtgagctaagccccagagttgggaaagggttgaggggtctcttgagaccgcccggccttggtggcccctgacaaggctggcatcccttgcagttggtctccagtggccaggtggacaccgggcagcagcaggcacggactgagctggtctccaccttcctgtggatccacagccagctggaggctgaatgcctggtggggactagtgtggccccagcccaggctctgcccagcccaggacccccgtccccaccgacgctgtaccccctggccagcccagacctgcaggccctgctggaacactactcggagctgctggtgcaggccgtgcggaggaaggcacgggggcactgagggcgcagcccctccaccgcagccctgctgcttctgaggacttaggtattttaagcgaataaactgacagctttgagg

SEQ ID NO: 15879 - DNA, 36216 bp, Homo sapiens
gtggagccggcgcgggcgggctgctgaggtggctgtcgccggctccgagctgcggcttcccgggccgagcccccgatggaggccgaggccgcggacgctcccccgggcggggttgagtcggcgctcagctgcttctctttcaaccaggactgcacgtaagctgcgactcggcccctgccagggaggtgggggacagagtgtcaggacccaggggtgtcgtcctgagagcagcttgtggcttccgcctcgaggcggcctcggcgggagggccggtgtctgcttcggacgcattgggatcttgttatccccgtaccccttcagtggggtttgccgcaccccccaccccaccccactcccagtgtcctcccagagcgacaaggttgggccaagggtgaaagcagggagttcgcaaagggagtggtggggctgcgggggccacggaatatggggggagcagggcggtgggaaagccagtgaccaaagtgggtgtctggggaagagagacagtggccaaaagaaagagatgagaaaggagaggaagttgcaagttgacccaggactctgtagttggggcccaggaagatgagagtacaggaaaaactttcccatttgtccttgagcatctcaacgtggcatctgggcagggcctcggacaaagaggcagcctatccctgcggccaggccagcccctgtcccatccccgacgcagggcatcgtgcctgcccgctctggatggaagaaacctttggatttctttggctgttttcacatcgcccacccagccaggcaggatctccttctcggagtccaagactcttttcccgggcgcagactgctttctctccaggaaacaggagctccaccctgttgtttttgagtggatttttaatgttttacttcgatgttcacatttgggctttgagagggagctgggctgaagtgtgtttcaggcatctgcaggattctgtgacttacaggcaaacgcctgtttctttccctattttcatggaagcgagccctggggaccatatggaatcatctttttggaatgtgcaccctgagcatcaggcggggatgaccgattcccagtttcccacttcctgctgtaccagtttctgtgccttggctgctggtgactgagctacgctaatattgatccttcagtggtgtaattaaggccattatgtaccattagccaccctggcttccattccctttatgtttctgtttaaaaacacccggtgctgaacaatatgcctttgtttgaaaaacccatatgtgtaatcatgtaatcgagtagctctacagcttggttatttgagtgactttcaagtttttcttgaccacaatccacaatacgaaatatgtattgcaacatcacccaatacccataacacatacactattcacaaaatatcatgtgcaattttctgtgtcctttttttctaagctgcttgtgactcactgaattgcgttttaggatccactcatgagttgagacctgcagtttataaaaatgctggtatagataaaatcctgatgttctgtaagaaacattttgcaagagggcatggctgttgaaatgcctgggtgatgttttccttcccaattgaacacaagttaagaaagggggttagtttgcttgtaagtagtaaatgttctaaattctgctttgtaacatcattagatttgacaaaaaagggtgttaatttatactctagccattaaataacgcaaagtcccagctttctacagaaattgaataagaatgttattttcaaaacggtagggtgctttgaaagttaatttccttactccctactgttagttttattttcttggatggaagctctgctgggcagctttgccttgcctataaataaaagttcttgtcacagtcagttgctttgagccacagagggtatgacattggattttaaaataagtcaagccccttactgaatacatttaggtgtattgccatgtctttttctataaatgtaggctgaatttgggatccagtatttccaaagaaggtaggtgaaaacagcaaacccttaccagtcccctacgctcatacttcgtgattggtacttgtgctatacactttgggtactttttttttttttttttttgagacagtcttgctctgtcacccaggctggagtgcagtggtgtggtcttggctcagtgcagcctctgcctcccagggttcaagcgattctcctgtctcagcctctcaagtagctaggattacaaacgtgtaccaccacactcagctaattttttgtatttttagtagagacggggttttgccacattgcccagcttggtcttgaactcctgacctcaagtgatccacccacctcagcctcccaaaatgctgggattacagatgtgacacactatgcccagcctactttgggtacattttaaatttgattaatgataaatatttgtcccaagctctgtttccatgagtggtgattagaattttgtttctacagaaagactttatggatgaaataaggtctaagtctaaattccttgattcagagtcttttgtggccattgatcaatcacgtaaaacatcacataaaacatcactctgtgattttctcatatgtagaattcttctggtccaggagcagggcttatgtttgaaaattactttaaattgctgtcactttgcattaatgttataagactctagttacagtatttctttccttacttgcaaactttacaaacctcatttcgcagccaaacacatctatatttatgtgaaaaagtttatgtgaagaaagtttaaaaacaataacactacaaaatacattttgaagttttaagatgctctgggcttacttttccagttgctgtttgtcatcatgaatacctcagtctaggtactaaatgccagttctaagtgcacagctgcaaatgtctaacccaccagtttagctacttagcaggttggagggctgcgagacgtcaccagctaccttgtggattaaaagtttactgtagttgccctatccctgtgtcccagggaagaacaaatgtctgggtagggaaaaaaaattccagggaaaatcatgtgaccttctcttttttaggctagtgaaacaagagccttggccatccaggcttgtaatagtaagttgcttattttagtatatgcttccctgtaaagagtgaatttcaccttgccttccagagaagcacacttctgtgagtgtgctccgggtcagattctgttcatcacttaggtgcggagggcacagctggaaagagctgggtgaggattcccagctgctgaacaaagttgactttgatgtttactttcaacacaaggccaagaaaatctggattcacgtcctgtctttatctcctcattgaaaaatgaaaaattaagagaaccagattttttttaagaggcactttgattgtcctagataaatgtttagtttgtattttgtttgttggttgtgatgattgctttgtaggatatagtagaaagcagagttctccaacttgggctgctcattagaatacttgaacttcaaatccaattaaacttcccagctgagtttaatatacatccaggtgtgagagctactagtatgaagtatcaggacatttttctggaaactgatgaaaggaagcatctattaaattttacctactaatgacctactatgcctactttgaaagtgtatttcttagaccaggcatggtggctgatgcctaagcactttgggaggccgaggcaggtggattacttgaggccaggagttcaagaccagcctagtcaacatggtgaaaccctgtctctactaaaaatacaaaaattagcctggcgtggtggtgcatgcctgtaatcctcactgctcgggaggctgaggcaggagaattgcttgaacccaggaggcggaggttggagtgagctgtgatggcaccactgcactccagcccgggtgacagagcgagactccctctcaaaaaaaaaaaaaaaaaggaaaagaaaagcaaagcatgtttcttcttataagcaacaaacaaataaagttatgaaggaaagaaaaactgatttatctggtaaagtgcctctcagacaacaagaaggccccctcgttgtgttggaggtagagctttcagctattatgaatattcttaaacattcaatttttcctgttatctgcccagtgggaaaaacatgtctgctagatttgacattttgttggatgacagagctcatgcagtttcatgccccttgatcatttcacttttttttttaagttgcctttgactttttcttcttttcttttgctcttcctgcctgtcaagacatgcgtcaccatttaggaagttaccaaggatctaagctcctgcagatgcttgtttactgtacccctgaggctagggggcaaaaggcatctatttgcagacagatctgttgttagaatacctgtcgttattcccatgctgtcattatcctccacagatccctagcaactggaactaaagccgggtataagctgttttctctgagttctgtggagcagctggatcaagtccacggaagcagtaagtgtgtgtgagagagacctcagggatctgcaggagaaccagagcctccttctaggctttaatctgcggtgctaccaagctgcctatttttcccttccttagccatcaaacttagggagtcaagatttttagatttaaatataaatcgttgccactacttgctttaaaccacaagcacttagatctggcaacagtttaagtaacattttctttttatagaagaaattatttgtgtgaaatcatattattgagactttttcacatgcttatatgcacagtcattaatttttataactgtcaaacctaaaggacacttgtgacattttctttctttctttttttgagatggagtcttgctctatcacccaggctggagtgcagtggcacgatcttggctcactgcaacctccacctcctgggttcaagtgattctcctgcctcagcctcccaagtagatgagattacaggcacatgccaccaaacccagctaatttttgtatttttagtagagacggggtttcaccacgttggccaggctggtctccaactcctgactttgagttatctgcccattttggcctcccaaagtcctgagattacaggcgtgagccacctcacccagccacctgtgacttatttttgccattatattggcaccataagatactgataacattgattcagttttggaagtatttgtttgaagaaggcaacggtatcctatttacatagcccatgtcaatgatgttgaagcatgtctagtgaacactgtaaataattcactagaaatgtgacttccttattttgtcagggtgatggtttatgccatcataatagcgaacaatatacaacctttcagtttcctggaaaaaaagtggttcagtaaataatattttgggctcctactttatttgtaagatgttattgttattacaccatttttgtgaattttttgctctatgtctgtcccacattgttccctgtgggccttttccaagtggaagaaaggcacacatatgaaaagaatgtgctcagaaagataccaaagccgtaacctttgtgctcaggagggtcattaactaacttcttcctgagtacagaagtactttcctcgtcataatactgatgtccagatggttttcagcaggaaagagatccagggagcacagcaagatagggggtggggggagtacagatttaactgtgttactgtcccctcccatattggcacccctctagcaggacaagaagaattctgaagcagaagttcccaactgagaagtcacgcctttgaaatctctcagggaaagggtagatgaaaattgttcaaatattccaaacatgtttgacagagcaaacagtggagccctagggtctggaggggagattctgccactcagacagcatcagaggcagctgtctgcctttgctctgacttgcagtctagtcactagtgttttctttttcttttcttgagacggagtcttgcttgtcgcccaggctggagtgcagtgttgtgatctcggctcactgcaatctcttcctcctgggttcaggtgattctcatgcctcagcctcccgagtagctgagattacaggtgtgcaccaccatacctggctaatttttaaaatatttttagtagagatggggtttcgccatgttggccaggctggtcttgaactcctggcctcaagtgattctcctgcctcagcctcccaaagtgctgggattactaggcgtgagccgccatgccaggccactagtgttttctttactttagatatttggaaaggactctgaaagtgctccctgggagagggtaaaaagccacctggcagggtggggggcatggtggatcactgtcaatgcaagctcagagagggcgcctggccggcaagacccggagaacctttggaacctggcctgcgccgggcccagtgtcatggaggctggaatccttcttggaagtgatcaatccatgtaacctcccggctgcttttcctcccagatgaaatcccggacgtctacatcgtggagcgcctcttctccagcagcctggtggtggtagtcagtcacacaaaaccacggcagatgaacgtgtatcacttcaagaaaggcacagagatctgtaattacagctactccagcaacatcttgtccataaggctgaaccggcaagtaagtggggaaatccctcagggtttcaaagcttctgctaacgggagccaaacaaaaagatggacatctttcaagatcaatgtctgtaaaacaagcttccaattctaatgagaatgttaacactcaggccccgtgtcccgggggtattgtaaacagagtctactccaggtgctggttgtaacgttgttttccctagacctctggctcatgtttccagaacgttggtccctgactggtaggctgcaccctctccctagggtacagattgggcaccgcagggatgggtcagagctctggcttggacagtcccatgagccaccgcaagagcaccttaaatcagaggagcgactcttctggttttgccctagatagtgtcattcattgcagatgttggggcaataccactgagcaggagatgcctgagagtgaagtgggggctccctgggtcaggaaagctgcccttctcccaccacgtcctcagctctcctggaaggtctgctattcagccttgggttctcatttttctttttcccagctaacccttgaagactttttgttttttttgtagcattttctttgttgaaggattattctgatctcaaataggcaatatgttctcttttaaaatataaattcttattcagtaagtattgggggtgttagcagatttccttttgaattgctgggttttcattttgggttgttgtttctgtttttgagacagggtcttgccctattgcccaggctggaatgcagtggcacaatcttggctcactgcagcctccatctcccaggctcaaacaatcctcccacctcaacctcctgagtagctgggactacaggtgggcaccaccacgcccagctaatttttctgtatttttttatattgccagagtgtattcgtctattctcacattactctaaagaactaccggagattgggtaatttataaagaaaataggtttcactgggtcaaggttctgcaggctgtacaggaagcacggcagcatctgcttctggggagggctcagggagctttgattcatggcggaaggcaaagcgggagcaggcgtcttacgtggcaggagcaggaccaagagacgggtggggggtactacccactattaaacaaccaggtctcgtgagaactcactcactctatggtgggggatggtactaaaccattcataagaactctgccaccttcctccaacactgaagattacaattcgacatgagatttggggagggacactgatctgaatcatattacagtgtttccccatgttgcccagtctggtctcaaactcctgggctcaaggatcctccttggcctcgcagagtgctggaattacaggcatgagccaccacgcttggccaaattactgtgaaggcaggcactgtgctggtgtgttcaccattatacgacctggtagaaaaggcagtgcttggtagatacgtgctcataaatatctgtttcctgactgactgttaaataagtaaataaacaaagagattctttatgtgaccatgcagatttatctattcaattaagtattcccagagcggttgctgcattcattgaggacaatgttttcttctgtctttgtctaaactcttaagtactaattaattttttttaacaaatgagacaaataaatgctttttaaatttatgagaaggaagggattgtttctttgaattgatcaactctttcaaatgaaaatccacttaagtccacctaaagcagtgcggtgaaaaatagctggagaaagagaagtgggaccttttaagtagggagtagcaggagtaagaaagaaaagaaacctgcattcttggcaagggagggaaaggcagtttgagagttttctgattgaaggcttttagatgaaattcttgactcaggtgttttcactgaaatctgttggtagcagattaagtttcgctgctaaactttttatccttgcatatagtagtaatccgtatacaaggttaaatgtctgtttttggcacctgatgatctttttaagattgtttaggcaaatgatctgtaaagaccggaaccctcaaatagcgtctattgtatttgcttgtatgatttctctctttctgtctggtatattcattagcaaatgggacaaggaaggcctatttgagtgtccgagtctgttaacctttaggtgccagcctccccttaatataatactcattaactgtgaggttctcctcccccaccttctaaagaacactgatgcaccaggaactgtcagcaattcatggcaaagccacgaaccaagatctaacagttctcggaaccaagatctaacgtcggaaccaagatgagcatcggttcattggaaccaatatctaagagttctcccttcctttacatttcttctccgacaagaatgatttgaaacaggtctgggaagtattgggggtttgcttttcttaaaactttcaggtttgggacttaaattttggtttaagcaactcagctgctgcagcctctcttgccaggtagggattctgtggtgtccgggaggactgcccactctggggaaatgataaaggcccaaggggagtgtgtcctgttctattctgtagcactcagtctgctacttcctcaggccttcagacagcacagtttcttttttgaaaaacaggaaaaagttaaagatttggataaggtgttataaggatccaaaatcccttttatcttttttttttttttttttttttgagatagagtctcactctgttgcccaggctggagtgcagtctcagctcaccacaacctctacctcccgtgttcaagcaattctcctgcctcaccctcccaagtagctgggactacaagcacctgccaccacgcccggctaatgtttttgtatttttagtagagatggggtttcaccatgttagccaggatgttctcgatctcctgacctcgtgatccacccacctcggcctcccaaagtgcagggattacaggtgtgagccaccgcacctggccccaaatcccttttttctaagtatataggaaggaaagggccaagtgtggtcccagcacttcaggaggccgaggcaggaggatcgcttgagcccaggagtttgagtccagcttgggcaatgtaacgagacctagtctttactaggtctttactataaaaataaattagctgggcatggtggcacttgcccgtaggcctagctacttgggaggctgaggcaggaggatcgtttaagcccaagagttgaaggctgcagtgagctatgatcacgctgctgcattccagcctaggtgacacagcaagaccctgtctctataaaaaataaaaatttaaaaatttaaaaaagaagaacacttaggaattgtcatatgtttcatttttagttaatgttatttctcttgtattgaactgaggaaatatattttatggaatcaagacagctgtatgatgtatttagatttgcatacttttacagttcttttgcagtctcctcccaggggcccttgctatccagatggaggctgattggctcgaagcctctgaggccaaatctgtggtgttctagggcagatgctataaatattttgtaattgataaaaggagttattgcttataaaacctagaaaagtagatgaaattcaaagcaacagacaaggagctgagttgaaggcaagaccatggttctgcgggggctgaaaactgatagttaaaaaagcaatcagcagcatcgtgcccaccccagaagcatgctctcacacgaactaagagtgcatcctcgttccctcccagtgttttctctctgtttccctctgcgtttagtcttatctgcagccagcatgagggtgacctgaaattcagctgagtgagccgcagagcagatggtgccatcagagctcttgggaaaaaaatgcagatcagatcagatgggctagatgtagatgctgtttctaggagaggcatatgtcaaggccccgctatcccagggattgggtgtggggctgggaggggacacaagaggatatcagaaacctctgaacagaaggaagcatagaaccacgtagttctaaccacggcatgtgctggcaaaaggcacagtgattggataagtcagagaatatttcacagaggaacactcatatttatcatcaattttgagaacctgttagaatttttttaaccctcagtccccagtctcagacctacgacagagccttaggtaaaactgagaaagggctgggcacagtagctcatgcttgtaatcccagcactttgggaggccgaggcaggaggagctcttgagctcaggaggtagactaacctggacaacatagtgaaacccgggtctctacaaaaaataccaaaaaattagccaggcatggtggcgcacacctgtagtccctgccacccgagaggctggggtgggaaaatggactgagccccagaggttgaggctacagtgatctgtaatcctgccactgcactgcagcctgggtgacagaacgagaccctgtctgaaaaaaaaaaaattgagaaatgtgtttaaattttatttttctgcttggttaacactgatgaccttcatcattctgagccatggatagtcttccttggggaatagcagggcaggcttttcccaggagcagagcctgcctcttttgtgtggtattttttggtaccttcccttctagctgatgttccctggaataaaaggagctggctgagaccagtggttcttgagcctcagtgtgcatcgcaatcacctggtattcgtctaaaaacttcccaaaccagaatctccggggagagcccagggcttgctccttgggcagctccttgggcatccaggtctaagaaacactggcctgaggggagccaagtcaggcatgtgcaggggtggtcggcagctgctcagatgtgcgaggagctgcccaaccagaaatgccttcctgacacctcctcaccagcaccgatgtctgcccttgtactgggctatgcgttatattcctttaaacacccgatacatcaaccctgtggcctgttttcacttagctgagagcacagccattgggaagaggctctgaacctgacaagctttcatgtggagaggaagagaagggtctggcagcagtggggagagcaagcaccagagagaggagcccaggaaggaacagtggggacgtggggcactggggtgttcaaatggggccgaagcccttctccttttccctttgccagggctcagacagcggcccaaaagcaggcctggaggagagtctgagtagaaataagttagagctggtaattattcagagaggggtaaaacctaagatttggtgatggagagaaagcaaagaaacccatttttatataggagggagacctgtgctataaacactgaaaggcagcctgttagatggcagtggaaactacagaaggcacatgaaattgtcttacatggcacagggggtctgatcagaaagtgttcagaagtcctgttgaacgcggtggctcaggcctatcatcccagcactttgggaggccgaggcgggcagatcacctgaggtcgggagttcgagaccagcctgatcaacatggtgaaaccccgtctctactaaaaatacaaaattagccaggtgtggtggtgcatgcatgtaatcccagctactcaggaggctgatgcaggagaattgtttgaaccctggaggcagaggttgcagtgagctgagattgcgccactgcactccagtctgggtgacagagtgagactccttctcaaaaaaaaaaaaaaaaaaaaaaagtgttcaggatccctgttctaaggaaagaaggagaaggaagagagggagggaggaatggagggagggaagaaggaaggagagaagtaaaaacaatcttaatttctaataaaatttcttaagatcttgcattttatgcttgtgttcaggtggatgattacatgtgtatgtgtgtacatccataaacacaatcttcaaaatgcatcatcaaaattctgctttaggcttagaatcaagttaggactcatatgaaagatgaatgatttggatttggtcagggtctttgtaaggaacggttcggtagactgataagtctgtgtgattacagaggctgctggtttgcctagaagagtccatttatattcacaacattaaagacatgaagctgttgaagaccctcctggatattcctgcaaacccaacaggtgagctccaaaaatggaacaaatgtccctgaaatttcatgtcctggtgcttctttcccaagctttattttcctccaaattgcgaacgtgaagcagtgtttgctttttgagtcttagtgaggtttatctcgaagctttgtcttaatggcggcagattcaaattatgtcaggctgtgtgtcctgcaggggggctgtgtgcccttcattgcagtccaagaataacaacaccctttgtctgggacccatatcagcaaatgtgtcaaggcacgtaaggtagacatgtaaaagatttcaagcatctgctgttgaaaagtgtttacccctaattgttttttgtggttcgttcagtacagagtaggcgtgataattagaagcaggtttcaacttggcgtgtctgcatggccagcaaaaagacaatctgaaccataaagaatatgttttattacatgacaaagaaatctctctacttcgacgatatgctaggatattaaaccttactgaattctcgggatttaacactatttaatacattcctggtgtataagaagaggaatggtttggatttgttatattgaaatagcagatgacattatatgaattcatcaagctaggagtaaacaagaaagaattccttcattgtgtggtggggtgaggagtcagcacactggaacaacttgtacatttaatgactccagattaatatttgcagattatatttcagtttggtatcattgaacaactgcttctattatatttcagtttagtatcattgaacaactgcttctatttgctgtttctgagttatttggctttcactgaatttcaagatctatctgggtgccatccaagtcacctagactttttgaaccttggttcccttatgaataatacccatctcccagggttggctgagaattaaacaaggtaatgtttgtgaaagtgaccagcacaggaactgccatgcatgaaatacttctgatgccttctcttcattccaattctataaatggcccttggctgttgatttcagtgctttcacatttcagctatggcaaaaggatattttaaaagaacaaagctagccgggtgcggtggctcacacctataatcgcagcacattgggaggccgaggcgggtggatcacctgaggttaggagttcaagaccagcctgaccaacatgaagaaaccctgtctctaccaaaaaaatacaaaaattagctgagcatggtggcgagtgcctgtaatcccagctacttgggaggttgagacaggaaaattacttgaacccaggaggcggaggcttcagtgagctgagatcgcaccactgcactccagcctgggcaacagatcgagactctgtctcaaaaaacaatgaataaattaaaaataaataaataaataaaagaacaaagccattgaggctgttagggagttctgtgagataatgactttgaagcacattttctgaaatggaagacggtacgtgaagaagctgtgggtggtaagtttttcccttagaaatgagaggctgaaatcatctggacaagtatctattgcagacattctttgtgcttggcaccatagtaggcaccattaggcaacctcataccaggagcccaaaatctagttgtcacgagttcccttcaacagtctgtctgaggtggtctgagacaggtgcgccagcagcctttggcaggggtggaaccatgtttaactctggggtgcggacacagttgaagggagcatgtgctcttctgatcaggaatgagaggcccctgaatctgcatagagcttgaggctggcagggcctgagctgggccttcagggatttggggagggacatcgggcatgcagaaagctagaagctgcctgtggctctcagtttctctgaagagaggggagtggacagtaaatgccacttactcctcacacctgttgcacacttgacccccagaggacagggttgcttcaggactgagcaccctcccttgcaaacagatgtttctcctttttttttttttttttttgagacacagtctcactctgttgcccaggctggagtgaggtggtgcaatctcagctcactgcaaccttcgcctcccggattcaagtgattctcattcctcagcctcctgagtagctgggactacaggtgcctaccaccacacccagctaattttttgtatttttagtagagataggatttcaccatgttggccaggctggtcttgaactcctgtcctcaagtgatccgcccgccttggcctcccaaagtgctggaattataggcatgagtcagcatacttagccaccatttactcttattttttagcaaatatagttgtttttctgtagttcagaaaactcactggttgccttactttctgcagcttaaacagagagaaaataaggtttaaaagtgcagggctatttgtgttccctgttagagacagtgtatattgtttgtaaagggaatcgattttatctcaagaaaaatgagaaacaatagcagagacttcctctgtctcagataaaagaatgcctccttatgaaaggatccagggataggttgagtatttcttctgaaagaccaggagcaaactgtgtctttttagacctctgatgttctttggagatatagcccaaggtgttttaaatgctcacgtttataattatcacctcaacttctcctgagctccctttctactgcagtaaaatggagatgatcatttttagcccccagagttgccacggagagcgttacctgaggttgtggcctgggtgggcaaaggtgggtccgccctgtccatgcgggcagtcagactcactccgcagccctctctgtcccataggacagccttgcacaggtcagagctgcgcttcagtgacatgaccaggtcctcactcgggaaccttcagaggactccgccctgccaattatacattccccagaggccaggagtcgccttatctgttctcatcctctagtttattttctgaacaaagaaataagatggaaactgtgactgttgattttataaatccttgctgggtacagaaggaagacacaatcactcgtctaattgtcttcagcacacaaatcctgaatgcattttgacttcataaactacaagtaaattagctatacagagttcgcctgttgcctcacacttggtatctaacgcagctgtaaatttccttctttctgtctgtttgtgtcatgcccgttcctgttgtgtcagagattgcaggctgtttcctttaaagagcttggccagacaggggctcgaagttaatttcctgctagcacagcagtctgctctgagcagtcaagggtggaaatctccatgaaagtcctgccaactgcagacctcccagtatggaggaggtggtcacagagctgaccaccttttatgggatattgagggagcgttccataccacacagcaatgcagatcattgaacagttcatggtttcttccccagcaagacctctttcttgtttgaaaatgctaataaaagtggtataaatgcttcccttttgtaggagcatagggcatttgctgtacaaagaagatgtctttctatttttgaaaatcggaaagcgtaacctgagacattaatcaactcagagggaactgcattttataaatcactgttaacttacctaaagtttgacatgcaatactttaaataccaagatgagaatcatttagaatcatgggacttcctttgaattccactgatgatgccattggttcttgagttgagagcaggcacttcttttccagctgtagaagaattacagccaaacaattacagtggaattatagctgccagtgacttatgaaaatatgtgtcaagctataacacatccaaaagccccatcagaacctcattcctaggtagaaaaaagactggaagaaaatatgctcagatgttcagaacagtgaaaagcctctgggttttagaattgtgggtgattttttttctccttatattttctaggctttgcaaatgttctacaccatcacttttatattatacaataatatttttaaagcccatatccttccttaaaaaggctttgtgtaacacctgtaacagaaagaggagactggcagaatggcaatagccaagctaaggaaaactcttcttgcttgccttgggtggttcccaagatacgaagatacattcgtgtggctcgttggatttttctgacacttgggccatagggaagtcacagtaggcttttctggggaccttcattaagtctgtaagggtaggaaggcaggattccttgtctaaattcagatggattggtagaggtgcgagcctggaggcaaaactgtcaaataagtggtatgtgtcagagtatgcctgccctcactcttatcctttgtccctttcttgttagcatctagtgtcaaccagttctataataggtattgcagaaagttcaatattagcttagaaagtttaaacgtttcttcccttctgggaatatttatgttttaacataagactctgaagcacagctggaggtatgcgtccaaggcttctgctccaagactgcttagctctctctgccacaaagacacgcccagtattttcagagggaagaagtaagaaacgaaggcttggcatcttgaagtgttaaatctggaaagacctctatatcacggtagccttcatttcacagacaggaaacaggcctgaaagagcagcaaataactcggccagagtttcacagtacatagcagacctcagtcttgaactcatgtcctcagcctatctctaaccagataaatattcctgaaacatgccttaaaataaaatttgaaaatcttttttgagataaaattcacatcctatacaattcacccgtttaaaatgcatggttcaatagcttttggtatattcacggaattgtgtaaccatcaccacaattaattttagagcattttcatcgccccaaaccttgtacctctaagccatcactccctatgcccccagccataggcaacccctaatctactttctgtctctattagattatggatttctctattctggacattttatatcaggagactcatacaatatcggttcctttgtgactgacttctttcacatagcctaatgtttccaaggttcttctgtgttgtagcatgtatcaatactttatttttcttgctggataatattctattataaaaatatatcacattttctttatccatttatcagttgataacatttgggttatttccactttttgacttatgaataatgctgccatgaacattcatatacaagtttttgtgtggacatatgttaaatttctcttgggtgtatatgtaggagtggaatttctaggtcatatgagaactttatgtttagcttttgaagaactgctaaacgttccagagcactgccccattttacattcccaccagcggtgcataagatcccagtttctccatatcctcaccaacatttatctgtctttttcactatagtcatcctagtggttgtacagtggtatctcatcgtgtttttaacacagcctttttaaaaacatatgtgctaggccaggcacgatggctcacgcctgtaatcccagcactttgggaggccgaggcagatggatcacctgaggtcacgagttcgagacagcctggccaacatggtgaaaccctgtctctactgaaaatacaaaaattagctgggcgtggtggcacacgcctgtaatcccagctacttggcaggctgagacaggagaatcgcttgaaccaaagaggcggaggttgcagtgagccaagatcgcaccactgcactgcagcttgggcaacagagtaagactccatctcaaaaaacaaagcaaaacatatgtgctgagaaaccttcagcagttacacactgcatttgtaaggtcttaactctttagtttggtacgctagtccttgtaagatttccacagtcttcacatcttttctgccagccgcctctttgggaacccagcacacaagacaaccagatctcctgactgccttccctccccagtttcacaagactagaatcccttctgcctgcctagctgttcttgaaatttcatttggatagcaaagaattcagaaggggtgaggaattggggtttccagagcaaaactggaaatggacgagtggcctcttctaaggctggggccaggaatgaccttgtatcgccaaaggggtggcagggctgccagaacgtgcagttaaaggttccggggctcagccacttcctcccgtagctatgcatggcaagtgataagaggacagccctgctgtggactcagcaaagccagagcaggaaatgagacctaggttccaactctaaatgtttactttctttttcctttgctctccttcctcagcagattagttgaggtatgtttcagcctgacctaaagttttttcttatacttttagaagaaacccacttaatatactaacttgtaatagacgccagtcactttttttttttttttttttttttttaagagagatgtctctcttgcgtgatctcaaagtttctggtaacactttggtttctatggaattgctggaattcactgctatcatgtgcacctctattcatctaaaccattgttttgaaaatcctttacttaaatgctcccttcttgaatccccttataaataaaaacagcttatgttggttcagtggtttgatgggctgtttactcttccggaatattattgaagcatcttaaatccaaaatgtcctctttatttagtttgtctcaatgtctaggcacaccatcttgactgcagacgcagacctcaaataaacttcctcctcgggaggtacccatttcccttatcaaggcagggcatttggctcagaaattgctcggtttctttttttttttttcttaagacagaacctcactctcacccaggctggagtgcagtggcactatcttcactcactgcagcctccacctccaggtttaagcaattctcctgcctcagcctcccgagtagctgggactacaggcacatgcaaccacacctgactaatttttgtatttttaatagagacagggtttcactatgttggccagcccgatctcgaactcctgacctcaggtgacccacctgcctcggcctgccaaagtgctgggatcacaggtgtgggccaccttgcctggcctgaaatttctcagtttctaaataggttcttggcagctcctcttctccaacttgaagttactggccaacagtatataatcatctgcagaaagaccaatatgtactgacttttcactataggaagatttatttcagttttgaggaaatctcttgtaaccctagaggataatggaattggaagaaaagtagatgctgtttcagagtcctggggtaaaatgtaaaaatgagcaatatatacacacacacacacacacacatatatatatatttttttttttttgagacggggtctcactctgtagcccaggctggagtgcagtggcacgatctccactcactgcaacctttgcctcctgggttcaagcgattctcctgcctcagcctcccaagtagctgggactataggcacgcaccaccatgcccagctatttgtatttttagtagagatggggtttcaccatgttggccaggcttgtctggaactcctgacctcaagtgatccgcccgcctcaaagtgctggaattacaggcatgagccactgtgcccggcaagtctcattgtttcactgtagcaaggacgcagccagtgttaaatcaggaggtcttcccctgtgaagttgctttattggaagccttaatcagaagaatcatcagcggaaagcagttgtctgcaaagccattcctccccttgccagtaggtggcactgtagctgtactgttttcagatgccctctccagccgtgcaatctctcccttggccccaggcttctcatgttctgtttcttctttgccaggtctatgtgctctctctatcaaccattccaattcttacctggcctatcctggaagcctgacttcaggggagattgtgctttatgatggaaactccctggtaagttgacggtgacctggctgagccaacccacctgccttggctgtgtggtcatggaaggagatagataaggacgccctgccgtcgggggctggaggcggtgggagtaagcaatactggggagttgttcaagagaaggtgatactatttcccctcgggcttgctgtgagtcaacctcaccataagccagctggccaggccaagttagacatctgcagcataatgaaaaccacttgccagcagggggccagttgtctccctgaatgtgtcaccctgtcccatgccacagcctgagacagtgtgcaggtgtttcatattccctgccctctggtctctgaggcatccctgagcgggacaagattgctgtgggaagttgcctaaagatgcgtgcagggcgcgcctgcgacggcatcacactgcatcaggtgctccgttcgtggccaccttcccaagggcaggaaaagggatggaaatggagtggcccttgaagccaaatcttgattcaccagaaaatgacacacagcttacatgcagatggcctgggggacagaggaagagacagggagctggacaaaggagggagaaaggagaaaagaggaaggggagggaggtgaaatccatcttccctcctccgcagcatctgtatccatttttccttttcaccaacagaaaacagtctgcactattgctgcccatgagggaacactagctgccatcaccttcaatgcctcaggctccaaactagcaagtgcgtctgaaaaagtgagtccactcccaccaacacctctgtctgggtttcgctggatggctcctgccgtgcgcagggatgggattgaacaaacctggtgacatgaagactgactggtctctgggcccactcagaatttgtttcagagggagaatttctggcctctgcatgtgtggtatattcatgcatttgttaattcaataggccaggggcctgcaatatgcaagatacaagacactttgcatgaaaactcgtggtcttatgaagaaatgtacgtgtacatcagccgtagagacggacaaatgctacaccttataaacacagtacagtgcaaaccaaatgctttactttgctatttagagaaattgatgtcttctgcctggaataatcagagaaagtgatccaattgaattttttttttttttttgaggtggagtctagctctgtcgcccaggctggagtgcaatggcgcaatctcggctcactgcaacctccgcctcccaggtttaagtgattctcctgcctcagcctcccgagtagctgagattacaggcacatgctgccacgcctggctaattttttgtattttagtggagacggggtttcacttcactgtgttgcccaggctggtcttgaattcctgagctcaggcaatccacccgccttggcctcccaaagtgctaggattacaggcgtgagccaccacacccggcctcaaattgaaattctaagaaaccagagcagttgggtgaacacacacatgcacacacacatacacgcagagccttgggcacaggtggaagggaaaaggtagacagagggtgtttataacattttccaagaattgttgatatggcacataaataaacatgcctctatgctcaacgtggtgttcttcctcctcagagacagatgttcaaaaccaataaaacaaactcctctctaaagggacatctctgtgtaaagccactaatggttatgaaatgtccacctgctttcttttccagggcacagtcatccgggtgttctctgtccctgatgggcaaaagctctatgagttccggagagggatgaaaaggtctgtgttcaatgtcaaacccattttaaagtccccgcagaagtcccgcagggaccgctggcagctgtctagggagaggacagagagtggctctgtgccctccactcacctggaggaagtgtaactactctcccaggtaattgactcccaggctttacttagggctcagcaaaactgaaagccgagatgctgttttaacacagttcagccgtgagagtccctttttgatgtgtgtgtgggcggccggcacaggagaaatgagagagccagggagtcacaatccaaaaataatttctgatttccttccatggaaataaaggacgatgtaaagtgtgactgtttgggatcttatcggatgtaggtttgcagccagatcagtgcacagagcaactggaagattccaagatgccaggaaggcacagttcctcccttctgctgacagaggcagggctataccttgtttcttctcacataaataagactatgggccgggcgcggtggctcacgtctgtaatcccagcactctgggaggccaaggcaggcagatcacctgaggaccagcctggccaacatggtgaaacaccgtctctactaaaaatacaaaaattagctgggtgtggtggtgtgtgcctgtaatcccagctacttgggaggctgaggcaggagaatcgcttgaacccaggaggtagaggttgcagtgagttgagatcaagccaccgtactccagcctgggcaacagagcgagagactctgtctcaaaaaaaaaaaaaaaaaaaaaaaaaaaaaaaaaaaaaactatgaccctttgtgaatctttctgacattaatttctaaatatgagcaccacagtgtttaagggatctgggtctacctaggctcttcaggatacatctgattttcttataaagctgatctctgagttataaggccataactcccatttctcttgctcactgacccatgtgttgctgtgcttgtaggtatgtgacaatcagctctctagtgttcagtatggattcacaattcctctgcgcctccagtaacaccgagacggtacacatcttcaagctggaacaggtcaccaacaggcaagtactccgcggggcaccaaatgctcattaaacgaaaggagtcaggcctaggctcttctactggcatgaatgatctcttttctttctgaacacccaatcttggcttcacttgggacttcacctaagtgatggagtgtgtgttagcaaaactttggaggcatgatgcacaaaagcaaaaaactgggagccacccacgtgagttcacgtcctggctctgcctcttaggagcccagagatcccgggaagataatttagatctgtgtccttcagtttcctcatctgcaaaatgaacataacagtagtattaaatgagtctgcagatctaaagtgttcagcatcgtgcctggcacataggaagcactaagaagtgttagctgatatagctgtaaatataacaatatatttatttatcattgttgccagcagcaccactgagcgcttgggaagcacctgcaatttctcagggcttaagaagctgtctgaaaagtgaaagaaaagcctaaaaaatggataaaatctctagggaaagagtaaaaagaacttcagggcagacaatgagctttgagttacacctgtgcagaatgggggttggaaaattctggaaagatggaggagtgagaaaggagcagcccccagtgtttcataccccacggtggggggcaaggattctagagaaagagcgctttgaaaacgttaccccaacctgcagagaaaggcaggatcaggacagaaagcctactgtatctggggagttggttgctggtacccttggatggagtttcagaagaggaaggtgtagaggctgggcaccatatcacgctgatacatgctaacacatacgtaacagaggccgggcaccttatcacgctgatacatgctaacacatacatgacagaggccgggcaccttatcaatgctgacacatgcggacctcatgatccacccgcctcaacctcccaaagtgctgggactataggcaaacagccacatttatgatttcacagttctgcagcccagaatggcaggactgggtcttcttctcagcatgacacaaggctgaaagagaggtgccaagatttctctgacttgcccttctgccatctttttctgccaccagttggagaaagctatttttaaaggcatgtgtgattaaagcaagcccacgctgcctgaggtcacctgagccatgtcacatatcacagccatgggactgacgtcccctcatctctagaatccttgtctccccccacccccagtggtgtatgaaacactgggggcggctcccttctcgctccttcatctttccagaactttccaacccccaatctgcacaggtgtaacccaaagctcattgtttgtcctgaggttctttttactctttccctggagattatatccactttttaggattttctttcacttttcagacagcttcttaagccctgatcttttttggagccttaattcatcatctgttgtcatgggtttgagcactagagggcggctgagctgttaagatgccgttcaaccccaaggttccacgagtgagtgatcgcaattgctgctgcagccccgcctccactggggattattatcagagattgattttccactccaggctctcccgtttctgtctgtgagcacaggtgaccaggagcagaacctccaagctgttctgggttctccgctcaacctgtccacgggtgttcatatgtccccggcggttacggctcacacgtgcctcttcagccctgcttcgctggccagggcccttgaacgtgtctttagcacctcgtgctggtccagccgttactcttacatttggtctgactttccagtctctttcaaccaataccagtccatcctatatcatcttgctgattaatcttctgaaaatgtccctttgaacatgacacctcctcctcagacacctttattcccctttgaccttgggaatgaagtcccagctcctcccgtccccctgagtcagacctgctgcagagcccagcagccaccacccccagaacctcctcatttcctccagccacagagacaccatcccataaaacagtatgcgccacgtgccgggctccatgctcagtccccagcatccttagttctcccagcaaccctgtcagggaggttgtgatgatgattcctgtttcccaaatgaggaaatctggacacggaaacgttaaggaacctcatccgcctctcccttcctctgtggtcctggactagctcctgcctggaccatctgtgcagcaccgcatattaactgctcacgtggtttttctttgtatacacccgtgctctctcaatctggaatgcagggtctggatcgtacacctctttgtaaaccccagcccggagcacagggctgtgggacagacagtacaaggatgtctcaggatgcttcggatcacagaaccctagcagtgcacctagcatagtcactttcagatgagaacatgaaggcccagagaggtttgtccaaagaccccctagcccattggtagcatagtaaagaatacctcccagagctctgagctgcagggcgagcttcccaccaggacctaatcctgcagacaagcagcctctcagcagttgcctgctcctgggaactcatatggcaaccttggttctcaatgtgccaccctctgtgtggggcagagctgggggttgtctctcaccaacagaacagtcaccccctttgtctggcagaggccttgggatgaagttccatgactgtaggcgacatcccaggtccctttgcatgatctccatcattacacatgctgggtacctgggtgactccagggttatctacaatcaaacaccacccaaagtgtcttgcccggaggtttgctacccactcagtctggctcaggaggccttcacgttgagatctgtctgttcttccatgagcccggcacagtcccaagcttatttaatggtacctggatatcaagtccatctcactctctaccctaactctcttctggaaatctaggaatcagactagtcatcagataagccttctttaataggggaaagcagtagcattgggaaccttttaacagctttacaatggctcttctgaagaacaaacaagcccttgatgctctttagttattgccagaataatacgtcctggattgttctcagtgggcagaacattatgctaaggcacagtctctccctgctgcggggagtgtggctaatgacgcttgggtgtggagattcctgggtgcgtgtggggcctgcagcccagtcccatcgttgcctgtgcattactccctagtcgaccagaagagccttcgacctggagtggctacatgggaaagatgtttatggctgctaccaactacctccctacccaggtgtcagacatgatgcatcaggacagggcttttgccactgcacgcttgaacttctccggacagaggaacatctgtaccctctcaacgtacgtacaatgacacccactctgaacaagaccacactttcgtcaatgtatttttccaaagcacaaaaatccccaaacctgaaaagaaaaaaagaaaacttgccccaggctgggcacggtggcttacatctgtaatcccggaaccttgggaggccaaggcaggcagatcatctgaggtcaggagtttgagaccagcctggccaacgtggtgaaatcccgtctctactaaaaatacaaaaattagccgggtatggtggtgcgtgcctgtagtcccagctacttgggaggttggggcaggagaatcgcttgaacccaggaggcggaggttgcagtgagccgagatcatgccactgcactccagcctgggcgacagagcaagactccatctcaaaaaagaaaaagaaaacttgccccaaaggaagggtgagcggaatcaaacccctgcttttcctatctgacttcaatacggattctcagggggcagccagaagttggcatgggaattttagccttctggttataatgacactgtcttaaaaacaattcttatttttatgtaattatgtaaaaagcctccagatctgttttctaggttcggactcctatggggctgacagatgttttaagaagtttaaaggagtttattcaaaagttgaacatttttaaaatttcacaaaactaaccagcaaagacagtaagccaatcctccatttaccccctttctgtcttggttaagggcagagacacatgtcagagggagactgcgtcccatgtagggagctaatgtgttcactagctattgcttctcgcagggtcgcagcatctacactcacttgcctcatccacactgtcacgttcaaagacaagaaataatcctgaaagtagatcccaaggccagaatgcaaaggaatagccagaagcccagaccagatcagtgggctaagggtttgtcaaaggcagaatctggtgacagctagggtgaggggggctttgtcattggaagcgaatccatcgcccatcttcgttgtcatcacggtttatgttttccttggcccttaggatccagaagttgccacggctgctagttgcgtcatccagtggacacctttatatgtacaatttggatcctcaggatggaggagagtgtgtcttaatcaaaacccacaggtgaagagactgcttttcaaaagacagcctttcgagagctggtcgtgtagagttgtcccttcgccaagaacgacaagcttcagtgcccttgcattgatttgttcttcactggcagtctcagtggcaaacctctagtgggcaagtgctctgcaccgggctctgtgtcaggtgccctcagcatgtggtaatcatctggaaaagtgccaggattaataacacacaagatggtctccccctcagcctatgctcctaacacagccctgagctcacagtgggtgttcaaaaatattccctgccaccaggtgtggcggctcacacctgtaatcccggcactttgggaggccgaagcgggtggatggcttgagtccaggtgttcaagaccagcctgggcaacatggtgaaaccccatctataccaaaaacaaatacaaaaattagccggttgtggtggcacacacctgtagtcccagctactcaggaggctgaggtgggagaatcacctgagcctggagaggttgaggcagtgagccatgatcacaccattgcactccagcctggacaacagagtgagaccctgtctcaaaataaaaaaaaaaaaaaacctattccctgcatggaattgaaaagtgctctaccagtcatgttgactcacgcctgtaatcccaatactttgggaggccaaggagggcggatggcttgagctcaggagtttgagaccagcctgagaaacatggtgaaaccccatccttacaaaaagaaaaaatataaaaattagccaggcatggtggtacatgccttgtagtcccagctacttgggaggcagaggtggggggatcacctgagcccaggaaggtcaagactgcagtaagctgtggtcacaccactgcactgcagcctgggcaacagagtgagaccctgtctcaaaaaagaaaagaaaacaaaagaaaagcactcatgccttctgtgaacaggcacagactgagctctcctgctgtggccagggcaccagagctgccaccgccccccaccgatggctgctctccttgctagcatgtcctcacctgtgtgtactgggaagagcagaggactaatctttgtctagccaatgtaagagaaagaggccattttgacggtgtgtgactgcccctggcagttgcaggtcacttcagctcatcctggcccagcagcgtgtgggtaggtctacaatttaaacccacagagttggcgggcggatcacctgaggtcaggagttcgagaccagcctggccaacatggtgaaacccagtctctactaaaaatacaaaaattagccaggcgctgtggtgggtgcctgtagtcgcagctactcgggaggctgaggcaggagaatcgcttgaacccaggaggcggaggttgcagtgagccgagattgcgccactgcactccagcctgggcaatagagcaagaccctgcctcaaaaataaataaataacccacagagctgagcacaggcttcttcatgcttttcctttggaaggtgtcctagatatatgatgatttcttttttctttcacctcctcttgattgtcacaagtagcttgcttggctcaggaacaacagaagagaataaagaaaatgacctcagaccttccttacctcagtcttatgcagcgaccgtagccagaccaagtgcatcttcagcctccacggtgccaggtgggtggacacggggccaacaggggagcatctccaacagtgacctccctccccttctccctgcacgctccctccccttcccccttcactgttacctgggggtggagtgccctccctccccttcccccttcactgttacctgggggtggagtgctctccttgaattttttattttctcacaggtgaggccatggtaatagcctttaaacctgggaccctcaacctggcaaggcatcacacgatacggtctttttcctaacaagtggtgttaaccctttgcctcttcaaaaattccaatgaggccaggcacattggctcacacctgtaatcccagcactttgggaggctgaggccagcggatcactggaggccaggggtttgagaccagcctagccaacatggtgaaaccccatctctacttaaaaaatagaaaaattagctgggcatgttggcacacacttgcaatcccagctactccggaggctgaggcaggagaattgcttgaaccagagaggcggagattgcagtgagctgagatcataccactgcactccagcctgggtgaaagagtgagactctgtttcaaaaaataaaaactaaactaaaatttccaaagagcctgtagtcctagccactcaggaagttaaattgaggcagaaggatcccttaggctcaggagttcgagaccagcctgggcaacatactgagaccctacctcaacaaagaaaaattcaaagaggtaggatgcctcaggcatctgaagtggaaaggcaggtcaggcttaaagatggcagatggtgaggattatgacttgtcctaggcacagtacctccagggggaagacagacagcccctttgcttcctttgccctttatttgagcccccgctccccacccgccaggtcatggcataaaagcagatccccagtgcttgtttcatgtctctttcttggtttccaggttattctgaggacggcggggcgctgcgaggagaagttattcctgaacatgagtttgcgacgggaccagtgtgtcttgatgatgagaatgagtttcctcctgtgagcattaggaacccgtaactgggcggctcagtctgtgtgcttagaaggaaaccttcgcctcatacgagaggcagagtccctttccctgttttctaatctataacaactaattctctgctctagtatttggaaagccataggatatttgttgtactgtgtgcttcgaatcctacagagtaggctttaggtgtcgagctaaaccctgatggcattagagtcaccgaatactaatccagggagtcttggtggcctccctccagccagaggcctgcgatcccttactttgcttctgtagcactgactttgctgcctggaaggtaggaacacgtgacttgtctaaaacttattttcctgaggctcccatggatgcgtttgcagaatgctgccttccttgtgctggaggggatggtttcagagggctgggctgtgtgttcaggactctgagctgagttgctgcactctgtgaaccagcttgaccctcacttacctgcagctctggccggcagacccgcacctccccagcagttgcagacactcattaagaaacaagtggccgggtgcggtggctcacacctgtaatcccagcactttgggaggccgaggctggaggattgcttgagcccaggagttagagaccagcctgggcaacacagcaaaaccccatctccaccaaaaaaaaaaaaaaaaaagaaaagaaaaaattagccgggtgtggtgtcacgtgcctgtagtcccagctattcgggacgctgagatgggaggatcacctgagcctgggaggtcgaggctgcagtgagctctgattgtgccactgcactccagcctaggtgaaagagtgagactctatctcaaaaagaaaagaaaagcaattgtgtgctctgtggagggcagcaggtgcagggcaggagcttgcccgagcacctttagctgggtttcccagcaacctgctcagcctgttcccacagctagggccctcggggctggctgagtgctgggcgtggcttcttccatcacctggaactgaagacaagattccctcctgagagcctgctggggcttccttaactgctgattcttcaggctcccatctggagtaacatatagaccgctcttgtgagcttcagtcaaaacatcccagatagtcaacctgaaatcatttcgagatggaagtactgatttgttttgttttgtttttgagacggagtcttgctctgtcacccaggctggagtgcagtggtgtgatctcggctcgctgcagcctctgcctcctgggttcaagcaattctcctgcctcagcctcccgagtagctgcaattacagatgtgcgccaccatgcccaactaatattttgtatttttagtagagacggggtttcaccatgttggtcacgctggtctcaaactcctgacctcaagtgatccactcgtctcggcctcccaaagtgctaggattacaggcgtgaaccgccgcacccggccggaagtagtgtttgggccaagacttggagcatcagctcctagagccagagaggagctgccacttgggcactgaaacaatgtccattaggctttgttatggaaacttctcctgatcattgttttgtgtccattgagcttccaattgtaaaaggatggagtgcaggtctggcttctttctcccgcagatccgtggaaccctctagtgagcacatttggcttagaaaacaaagctgcggtggggccctgcatgcagggctggggctgttgttttgtgatttcccacatcggctctgcgggtcggtcgcagcgtgagcttttacatttctggctttcaataggcaggttgtcagagacgtggctggcaagtgaagtttatatctcagtggcggagagcagttgttcttaaaaatactaattataaacttcaaaacctctgttggcatgctgcctaactataaaccagttgttttacctttgggttctcatggccccaactggccttaaagggcgttcttctgcaccctcaagaggcggtggttatttacctgaagtcgaggcttccaggatccagagcactctaggtcagacaccgtggggacaaatgtgaccattctactctgtcagggtttaccacatccagacactcactaggttccgtttcactaattttggtaaaagtctgtaactactataaaatattattagattcttaattgtaatcgcagtaagccttgcaacctcttatagttacagaattggggtaatgtggatattagtatctaggaggtagttccttgccaaagaacctgtataaaataataggtaccttgtgcagatcatttatttggggtaaaaaggaaaaggggaggtgcttaattgaagaaccagtaagaaagtttgtcctgaggcctgtgtgcccattcagtgccaggaagctgggcatgagccagttgtttcttctccctcctaaggaccaaatgagtgaaagttggttgaaattgcatcaggaattcttatttatacgcaagaaatacttcctgccagtgagagtggtcactgaacaaggtccctagaacaggtgttagacccttgtgagtgtcaagcagcccctgtgtgcagggctgtgtcgtggcagccaccaacctctcagtctgccctccagcctgcaggtagatggtgatgaggggcagtgctcccactaaggcactgtctcagtagcaggcaggcttctccatctcaccatgtaaggaccagaggcatgcatgctcctgggatgctctatcaatatggcccatctcagtcatgcctgaattggcagaaatgttcagcgagggatgctagggaacttcctctctgtctccttattctgaattgtcatgcctattgcaaatctctgtgcagaattcacatctttactcacattccttaaaatcttctaggaccacaaaaggctcttggagtctcagcttggttaaaatcgcctctcttgtagtgacgaacaaacataggcttgcctgagtagtctgctacaggagctctgtgagccgctgccttaagaacgcgggtcatcactagtgatcttttcagaacacatactgacacttccctgcgtaggatcacgcttgcctccttgggatttacttttgctctgagagcagtgaaagaaaagagacttgatcatttctggtgccttagaaagctgctacattcgggaggatgagaagcttttgtttcaggaacaagccaacctgtacaagtctctgtattttgtgagactagtcccaatcttgtgagcaagagtcaggaaatcaggcccaagggtataaactgaccttcccttttttttttttttttttttttttgagatgatagagtctcactctgtccctcaggctagaatgtgttggcgtgatctccactcactgcaacctccacctcctaggttcaagtgattctagtgcctcagcctcccaagtagctggggtttcaggcatgctaccatgcccagctaaattttgtatttttagtagagacaggatttcaccatgttggccaggctggtctcaaactcctgacctcaggtgatcacccccctcagcctcctaaagtgctgggattacaggtgtgagccactgcgcccagcctaaactgacttttttttttttgagatggagtcttgctccatcgcccaggctggagtgcagtggtgcgatctcggctcactgcagcctccacctccccggttcaagcgattctctcctgcctcagcctcccgagtagctgggattacaggtgagcgccaccatgcccggctaatttttgtattttttagtagcgatggggtttcaccatgttggccaggctggtctcaaactcctgacctagtgatccacccacctcagcctcccaaagttctgggattacaggcgtgagccaccgcgcccagcctaaactgactttttaatagtgattgagcagtccatgtttacaagtaagatgagccttttaaaaatatatacatatacatataaatacatacacacacacacagagacatttttatagtcagtattttctagaactgtgtcatacttgtctacacctaaataagctgggtgaccattctgtggccatgagcgagttcagacagaaaaattccacagtgcccagcctctccctgctcactctgcatgggcacagacctgttgataatgcacctgcctaccagcctcttcctgagaagagtaaggccattctgttttgattttggtagataatcttgtgccgtggaaatcagaagggcaaaacgaagcagtcatgatgagaagcacacctcagaaatcaggacatcccccctatcaggtggttttggagaaaacaaggaaggcggaagaatggagtgcaattgtgtgagcagaaaggggggcaggaatcccgggtgctccactgcttaaaccacaggacctggttaactcctcaccaagcttcccacgaccctggttgccaatgggcgcgggagacattgtatacacatcatgctatttaaaatacgttcaaactatagtgtaaatgctaattaaccatattggtatataaccggaattttatattaaaaggggcctcctttttaaatatatgccgtgtaaaaaatgtacttataggaacatctctttgaattgtatttcttgtatattacatacttagagagagactcttttagccaggcaaagtcttttttggctgtggctggaataaatcatttattacttgggagtcccattttggacactaataataaaatcatggcaatgca

SEQ ID NO: 15880 - DNA, 35966 bp, Homo sapiens
gggctgctgaggtggctgtcgccggctccgagctgcggcttcccgggccgagcccccgatggaggccgaggccgcggacgctcccccgggcggggttgagtcggcgctcagctgcttctctttcaaccaggactgcacgtaagctgcgactcggcccctgccagggaggtgggggacagagtgtcaggacccaggggtgtcgtcctgagagcagcttgtggcttccgcctcgaggcggcctcggcgggagggccggtgtctgcttcggacgcattgggatcttgttatccccgtaccccttcagtggggtttgccgcaccccccaccccaccccactcccagtgtcctcccagagcgacaaggttgggccaagggtgaaagcagggagttcgcaaagggagtggtggggctgcgggggccacggaatatggggggagcagggcggtgggaaagccagtgaccaaagtgggtgtctggggaagagagacagtggccaaaagaaagagatgagaaaggagaggaagttgcaagttgacccaggactctgtagttggggcccaggaagatgagagtacaggaaaaactttcccatttgtccttgagcatctcaacgtggcatctgggcagggcctcggacaaagaggcagcctatccctgcggccaggccagcccctgtcccatccccgacgcagggcatcgtgcctgcccgctctggatggaagaaacctttggatttctttggctgttttcacatcgcccacccagccaggcaggatctccttctcggagtccaagactcttttcccgggcgcagactgctttctctccaggaaacaggagctccaccctgttgtttttgagtggatttttaatgttttacttcgatgttcacatttgggctttgagagggagctgggctgaagtgtgtttcaggcatctgcaggattctgtgacttacaggcaaacgcctgtttctttccctattttcatggaagcgagccctggggaccatatggaatcatctttttggaatgtgcaccctgagcatcaggcggggatgaccgattcccagtttcccacttcctgctgtaccagtttctgtgccttggctgctggtgactgagctacgctaatattgatccttcagtggtgtaattaaggccattatgtaccattagccaccctggcttccattccctttatgtttctgtttaaaaacacccggtgctgaacaatatgcctttgtttgaaaaacccatatgtgtaatcatgtaatcgagtagctctacagcttggttatttgagtgactttcaagtttttcttgaccacaatccacaatacgaaatatgtattgcaacatcacccaatacccataacacatacactattcacaaaatatcatgtgcaattttctgtgtcctttttttctaagctgcttgtgactcactgaattgcgttttaggatccactcatgagttgagacctgcagtttataaaaatgctggtatagataaaatcctgatgttctgtaagaaacattttgcaagagggcatggctgttgaaatgcctgggtgatgttttccttcccaattgaacacaagttaagaaagggggttagtttgcttgtaagtagtaaatgttctaaattctgctttgtaacatcattagatttgacaaaaaagggtgttaatttatactctagccattaaataacgcaaagtcccagctttctacagaaattgaataagaatgttattttcaaaacggtagggtgctttgaaagttaatttccttactccctactgttagttttattttcttggatggaagctctgctgggcagctttgccttgcctataaataaaagttcttgtcacagtcagttgctttgagccacagagggtatgacattggattttaaaataagtcaagccccttactgaatacatttaggtgtattgccatgtctttttctataaatgtaggctgaatttgggatccagtatttccaaagaaggtaggtgaaaacagcaaacccttaccagtcccctacgctcatacttcgtgattggtacttgtgctatacactttgggtactttttttttttttttttttgagacagtcttgctctgtcacccaggctggagtgcagtggtgtggtcttggctcagtgcagcctctgcctcccagggttcaagcgattctcctgtctcagcctctcaagtagctaggattacaaacgtgtaccaccacactcagctaattttttgtatttttagtagagacggggttttgccacattgcccagcttggtcttgaactcctgacctcaagtgatccacccacctcagcctcccaaaatgctgggattacagatgtgacacactatgcccagcctactttgggtacattttaaatttgattaatgataaatatttgtcccaagctctgtttccatgagtggtgattagaattttgtttctacagaaagactttatggatgaaataaggtctaagtctaaattccttgattcagagtcttttgtggccattgatcaatcacgtaaaacatcacataaaacatcactctgtgattttctcatatgtagaattcttctggtccaggagcagggcttatgtttgaaaattactttaaattgctgtcactttgcattaatgttataagactctagttacagtatttctttccttacttgcaaactttacaaacctcatttcgcagccaaacacatctatatttatgtgaaaaagtttatgtgaagaaagtttaaaaacaataacactacaaaatacattttgaagttttaagatgctctgggcttacttttccagttgctgtttgtcatcatgaatacctcagtctaggtactaaatgccagttctaagtgcacagctgcaaatgtctaacccaccagtttagctacttagcaggttggagggctgcgagacgtcaccagctaccttgtggattaaaagtttactgtagttgccctatccctgtgtcccagggaagaacaaatgtctgggtagggaaaaaaaattccagggaaaatcatgtgaccttctcttttttaggctagtgaaacaagagccttggccatccaggcttgtaatagtaagttgcttattttagtatatgcttccctgtaaagagtgaatttcaccttgccttccagagaagcacacttctgtgagtgtgctccgggtcagattctgttcatcacttaggtgcggagggcacagctggaaagagctgggtgaggattcccagctgctgaacaaagttgactttgatgtttactttcaacacaaggccaagaaaatctggattcacgtcctgtctttatctcctcattgaaaaatgaaaaattaagagaaccagattttttttaagaggcactttgattgtcctagataaatgtttagtttgtattttgtttgttggttgtgatgattgctttgtaggatatagtagaaagcagagttctccaacttgggctgctcattagaatacttgaacttcaaatccaattaaacttcccagctgagtttaatatacatccaggtgtgagagctactagtatgaagtatcaggacatttttctggaaactgatgaaaggaagcatctattaaattttacctactaatgacctactatgcctactttgaaagtgtatttcttagaccaggcatggtggctgatgcctaagcactttgggaggccgaggcaggtggattacttgaggccaggagttcaagaccagcctagtcaacatggtgaaaccctgtctctactaaaaatacaaaaattagcctggcgtggtggtgcatgcctgtaatcctcactgctcgggaggctgaggcaggagaattgcttgaacccaggaggcggaggttggagtgagctgtgatggcaccactgcactccagcccgggtgacagagcgagactccctctcaaaaaaaaaaaaaaaaaggaaaagaaaagcaaagcatgtttcttcttataagcaacaaacaaataaagttatgaaggaaagaaaaactgatttatctggtaaagtgcctctcagacaacaagaaggccccctcgttgtgttggaggtagagctttcagctattatgaatattcttaaacattcaatttttcctgttatctgcccagtgggaaaaacatgtctgctagatttgacattttgttggatgacagagctcatgcagtttcatgccccttgatcatttcacttttttttttaagttgcctttgactttttcttcttttcttttgctcttcctgcctgtcaagacatgcgtcaccatttaggaagttaccaaggatctaagctcctgcagatgcttgtttactgtacccctgaggctagggggcaaaaggcatctatttgcagacagatctgttgttagaatacctgtcgttattcccatgctgtcattatcctccacagatccctagcaactggaactaaagccgggtataagctgttttctctgagttctgtggagcagctggatcaagtccacggaagcagtaagtgtgtgtgagagagacctcagggatctgcaggagaaccagagcctccttctaggctttaatctgcggtgctaccaagctgcctatttttcccttccttagccatcaaacttagggagtcaagatttttagatttaaatataaatcgttgccactacttgctttaaaccacaagcacttagatctggcaacagtttaagtaacattttctttttatagaagaaattatttgtgtgaaatcatattattgagactttttcacatgcttatatgcacagtcattaatttttataactgtcaaacctaaaggacacttgtgacattttctttctttctttttttgagatggagtcttgctctatcacccaggctggagtgcagtggcacgatcttggctcactgcaacctccacctcctgggttcaagtgattctcctgcctcagcctcccaagtagatgagattacaggcacatgccaccaaacccagctaatttttgtatttttagtagagacggggtttcaccacgttggccaggctggtctccaactcctgactttgagttatctgcccattttggcctcccaaagtcctgagattacaggcgtgagccacctcacccagccacctgtgacttatttttgccattatattggcaccataagatactgataacattgattcagttttggaagtatttgtttgaagaaggcaacggtatcctatttacatagcccatgtcaatgatgttgaagcatgtctagtgaacactgtaaataattcactagaaatgtgacttccttattttgtcagggtgatggtttatgccatcataatagcgaacaatatacaacctttcagtttcctggaaaaaaagtggttcagtaaataatattttgggctcctactttatttgtaagatgttattgttattacaccatttttgtgaattttttgctctatgtctgtcccacattgttccctgtgggccttttccaagtggaagaaaggcacacatatgaaaagaatgtgctcagaaagataccaaagccgtaacctttgtgctcaggagggtcattaactaacttcttcctgagtacagaagtactttcctcgtcataatactgatgtccagatggttttcagcaggaaagagatccagggagcacagcaagatagggggtggggggagtacagatttaactgtgttactgtcccctcccatattggcacccctctagcaggacaagaagaattctgaagcagaagttcccaactgagaagtcacgcctttgaaatctctcagggaaagggtagatgaaaattgttcaaatattccaaacatgtttgacagagcaaacagtggagccctagggtctggaggggagattctgccactcagacagcatcagaggcagctgtctgcctttgctctgacttgcagtctagtcactagtgttttctttttcttttcttgagacggagtcttgcttgtcgcccaggctggagtgcagtgttgtgatctcggctcactgcaatctcttcctcctgggttcaggtgattctcatgcctcagcctcccgagtagctgagattacaggtgtgcaccaccatacctggctaatttttaaaatatttttagtagagatggggtttcgccatgttggccaggctggtcttgaactcctggcctcaagtgattctcctgcctcagcctcccaaagtgctgggattactaggcgtgagccgccatgccaggccactagtgttttctttactttagatatttggaaaggactctgaaagtgctccctgggagagggtaaaaagccacctggcagggtggggggcatggtggatcactgtcaatgcaagctcagagagggcgcctggccggcaagacccggagaacctttggaacctggcctgcgccgggcccagtgtcatggaggctggaatccttcttggaagtgatcaatccatgtaacctcccggctgcttttcctcccagatgaaatcccggacgtctacatcgtggagcgcctcttctccagcagcctggtggtggtagtcagtcacacaaaaccacggcagatgaacgtgtatcacttcaagaaaggcacagagatctgtaattacagctactccagcaacatcttgtccataaggctgaaccggcaagtaagtggggaaatccctcagggtttcaaagcttctgctaacgggagccaaacaaaaagatggacatctttcaagatcaatgtctgtaaaacaagcttccaattctaatgagaatgttaacactcaggccccgtgtcccgggggtattgtaaacagagtctactccaggtgctggttgtaacgttgttttccctagacctctggctcatgtttccagaacgttggtccctgactggtaggctgcaccctctccctagggtacagattgggcaccgcagggatgggtcagagctctggcttggacagtcccatgagccaccgcaagagcaccttaaatcagaggagcgactcttctggttttgccctagatagtgtcattcattgcagatgttggggcaataccactgagcaggagatgcctgagagtgaagtgggggctccctgggtcaggaaagctgcccttctcccaccacgtcctcagctctcctggaaggtctgctattcagccttgggttctcatttttctttttcccagctaacccttgaagactttttgttttttttgtagcattttctttgttgaaggattattctgatctcaaataggcaatatgttctcttttaaaatataaattcttattcagtaagtattgggggtgttagcagatttccttttgaattgctgggttttcattttgggttgttgtttctgtttttgagacagggtcttgccctattgcccaggctggaatgcagtggcacaatcttggctcactgcagcctccatctcccaggctcaaacaatcctcccacctcaacctcctgagtagctgggactacaggtgggcaccaccacgcccagctaatttttctgtatttttttatattgccagagtgtattcgtctattctcacattactctaaagaactaccggagattgggtaatttataaagaaaataggtttcactgggtcaaggttctgcaggctgtacaggaagcacggcagcatctgcttctggggagggctcagggagctttgattcatggcggaaggcaaagcgggagcaggcgtcttacgtggcaggagcaggaccaagagacgggtggggggtactacccactattaaacaaccaggtctcgtgagaactcactcactctatggtgggggatggtactaaaccattcataagaactctgccaccttcctccaacactgaagattacaattcgacatgagatttggggagggacactgatctgaatcatattacagtgtttccccatgttgcccagtctggtctcaaactcctgggctcaaggatcctccttggcctcgcagagtgctggaattacaggcatgagccaccacgcttggccaaattactgtgaaggcaggcactgtgctggtgtgttcaccattatacgacctggtagaaaaggcagtgcttggtagatacgtgctcataaatatctgtttcctgactgactgttaaataagtaaataaacaaagagattctttatgtgaccatgcagatttatctattcaattaagtattcccagagcggttgctgcattcattgaggacaatgttttcttctgtctttgtctaaactcttaagtactaattaattttttttaacaaatgagacaaataaatgctttttaaatttatgagaaggaagggattgtttctttgaattgatcaactctttcaaatgaaaatccacttaagtccacctaaagcagtgcggtgaaaaatagctggagaaagagaagtgggaccttttaagtagggagtagcaggagtaagaaagaaaagaaacctgcattcttggcaagggagggaaaggcagtttgagagttttctgattgaaggcttttagatgaaattcttgactcaggtgttttcactgaaatctgttggtagcagattaagtttcgctgctaaactttttatccttgcatatagtagtaatccgtatacaaggttaaatgtctgtttttggcacctgatgatctttttaagattgtttaggcaaatgatctgtaaagaccggaaccctcaaatagcgtctattgtatttgcttgtatgatttctctctttctgtctggtatattcattagcaaatgggacaaggaaggcctatttgagtgtccgagtctgttaacctttaggtgccagcctccccttaatataatactcattaactgtgaggttctcctcccccaccttctaaagaacactgatgcaccaggaactgtcagcaattcatggcaaagccacgaaccaagatctaacagttctcggaaccaagatctaacgtcggaaccaagatgagcatcggttcattggaaccaatatctaagagttctcccttcctttacatttcttctccgacaagaatgatttgaaacaggtctgggaagtattgggggtttgcttttcttaaaactttcaggtttgggacttaaattttggtttaagcaactcagctgctgcagcctctcttgccaggtagggattctgtggtgtccgggaggactgcccactctggggaaatgataaaggcccaaggggagtgtgtcctgttctattctgtagcactcagtctgctacttcctcaggccttcagacagcacagtttcttttttgaaaaacaggaaaaagttaaagatttggataaggtgttataaggatccaaaatcccttttatcttttttttttttttttttttttgagatagagtctcactctgttgcccaggctggagtgcagtctcagctcaccacaacctctacctcccgtgttcaagcaattctcctgcctcaccctcccaagtagctgggactacaagcacctgccaccacgcccggctaatgtttttgtatttttagtagagatggggtttcaccatgttagccaggatgttctcgatctcctgacctcgtgatccacccacctcggcctcccaaagtgcagggattacaggtgtgagccaccgcacctggccccaaatcccttttttctaagtatataggaaggaaagggccaagtgtggtcccagcacttcaggaggccgaggcaggaggatcgcttgagcccaggagtttgagtccagcttgggcaatgtaacgagacctagtctttactaggtctttactataaaaataaattagctgggcatggtggcacttgcccgtaggcctagctacttgggaggctgaggcaggaggatcgtttaagcccaagagttgaaggctgcagtgagctatgatcacgctgctgcattccagcctaggtgacacagcaagaccctgtctctataaaaaataaaaatttaaaaatttaaaaaagaagaacacttaggaattgtcatatgtttcatttttagttaatgttatttctcttgtattgaactgaggaaatatattttatggaatcaagacagctgtatgatgtatttagatttgcatacttttacagttcttttgcagtctcctcccaggggcccttgctatccagatggaggctgattggctcgaagcctctgaggccaaatctgtggtgttctagggcagatgctataaatattttgtaattgataaaaggagttattgcttataaaacctagaaaagtagatgaaattcaaagcaacagacaaggagctgagttgaaggcaagaccatggttctgcgggggctgaaaactgatagttaaaaaagcaatcagcagcatcgtgcccaccccagaagcatgctctcacacgaactaagagtgcatcctcgttccctcccagtgttttctctctgtttccctctgcgtttagtcttatctgcagccagcatgagggtgacctgaaattcagctgagtgagccgcagagcagatggtgccatcagagctcttgggaaaaaaatgcagatcagatcagatgggctagatgtagatgctgtttctaggagaggcatatgtcaaggccccgctatcccagggattgggtgtggggctgggaggggacacaagaggatatcagaaacctctgaacagaaggaagcatagaaccacgtagttctaaccacggcatgtgctggcaaaaggcacagtgattggataagtcagagaatatttcacagaggaacactcatatttatcatcaattttgagaacctgttagaatttttttaaccctcagtccccagtctcagacctacgacagagccttaggtaaaactgagaaagggctgggcacagtagctcatgcttgtaatcccagcactttgggaggccgaggcaggaggagctcttgagctcaggaggtagactaacctggacaacatagtgaaacccgggtctctacaaaaaataccaaaaaattagccaggcatggtggcgcacacctgtagtccctgccacccgagaggctggggtgggaaaatggactgagccccagaggttgaggctacagtgatctgtaatcctgccactgcactgcagcctgggtgacagaacgagaccctgtctgaaaaaaaaaaaattgagaaatgtgtttaaattttatttttctgcttggttaacactgatgaccttcatcattctgagccatggatagtcttccttggggaatagcagggcaggcttttcccaggagcagagcctgcctcttttgtgtggtattttttggtaccttcccttctagctgatgttccctggaataaaaggagctggctgagaccagtggttcttgagcctcagtgtgcatcgcaatcacctggtattcgtctaaaaacttcccaaaccagaatctccggggagagcccagggcttgctccttgggcagctccttgggcatccaggtctaagaaacactggcctgaggggagccaagtcaggcatgtgcaggggtggtcggcagctgctcagatgtgcgaggagctgcccaaccagaaatgccttcctgacacctcctcaccagcaccgatgtctgcccttgtactgggctatgcgttatattcctttaaacacccgatacatcaaccctgtggcctgttttcacttagctgagagcacagccattgggaagaggctctgaacctgacaagctttcatgtggagaggaagagaagggtctggcagcagtggggagagcaagcaccagagagaggagcccaggaaggaacagtggggacgtggggcactggggtgttcaaatggggccgaagcccttctccttttccctttgccagggctcagacagcggcccaaaagcaggcctggaggagagtctgagtagaaataagttagagctggtaattattcagagaggggtaaaacctaagatttggtgatggagagaaagcaaagaaacccatttttatataggagggagacctgtgctataaacactgaaaggcagcctgttagatggcagtggaaactacagaaggcacatgaaattgtcttacatggcacagggggtctgatcagaaagtgttcagaagtcctgttgaacgcggtggctcaggcctatcatcccagcactttgggaggccgaggcgggcagatcacctgaggtcgggagttcgagaccagcctgatcaacatggtgaaaccccgtctctactaaaaatacaaaattagccaggtgtggtggtgcatgcatgtaatcccagctactcaggaggctgatgcaggagaattgtttgaaccctggaggcagaggttgcagtgagctgagattgcgccactgcactccagtctgggtgacagagtgagactccttctcaaaaaaaaaaaaaaaaaaaaaaagtgttcaggatccctgttctaaggaaagaaggagaaggaagagagggagggaggaatggagggagggaagaaggaaggagagaagtaaaaacaatcttaatttctaataaaatttcttaagatcttgcattttatgcttgtgttcaggtggatgattacatgtgtatgtgtgtacatccataaacacaatcttcaaaatgcatcatcaaaattctgctttaggcttagaatcaagttaggactcatatgaaagatgaatgatttggatttggtcagggtctttgtaaggaacggttcggtagactgataagtctgtgtgattacagaggctgctggtttgcctagaagagtccatttatattcacaacattaaagacatgaagctgttgaagaccctcctggatattcctgcaaacccaacaggtgagctccaaaaatggaacaaatgtccctgaaatttcatgtcctggtgcttctttcccaagctttattttcctccaaattgcgaacgtgaagcagtgtttgctttttgagtcttagtgaggtttatctcgaagctttgtcttaatggcggcagattcaaattatgtcaggctgtgtgtcctgcaggggggctgtgtgcccttcattgcagtccaagaataacaacaccctttgtctgggacccatatcagcaaatgtgtcaaggcacgtaaggtagacatgtaaaagatttcaagcatctgctgttgaaaagtgtttacccctaattgttttttgtggttcgttcagtacagagtaggcgtgataattagaagcaggtttcaacttggcgtgtctgcatggccagcaaaaagacaatctgaaccataaagaatatgttttattacatgacaaagaaatctctctacttcgacgatatgctaggatattaaaccttactgaattctcgggatttaacactatttaatacattcctggtgtataagaagaggaatggtttggatttgttatattgaaatagcagatgacattatatgaattcatcaagctaggagtaaacaagaaagaattccttcattgtgtggtggggtgaggagtcagcacactggaacaacttgtacatttaatgactccagattaatatttgcagattatatttcagtttggtatcattgaacaactgcttctattatatttcagtttagtatcattgaacaactgcttctatttgctgtttctgagttatttggctttcactgaatttcaagatctatctgggtgccatccaagtcacctagactttttgaaccttggttcccttatgaataatacccatctcccagggttggctgagaattaaacaaggtaatgtttgtgaaagtgaccagcacaggaactgccatgcatgaaatacttctgatgccttctcttcattccaattctataaatggcccttggctgttgatttcagtgctttcacatttcagctatggcaaaaggatattttaaaagaacaaagctagccgggtgcggtggctcacacctataatcgcagcacattgggaggccgaggcgggtggatcacctgaggttaggagttcaagaccagcctgaccaacatgaagaaaccctgtctctaccaaaaaaatacaaaaattagctgagcatggtggcgagtgcctgtaatcccagctacttgggaggttgagacaggaaaattacttgaacccaggaggcggaggcttcagtgagctgagatcgcaccactgcactccagcctgggcaacagatcgagactctgtctcaaaaaacaatgaataaattaaaaataaataaataaataaaagaacaaagccattgaggctgttagggagttctgtgagataatgactttgaagcacattttctgaaatggaagacggtacgtgaagaagctgtgggtggtaagtttttcccttagaaatgagaggctgaaatcatctggacaagtatctattgcagacattctttgtgcttggcaccatagtaggcaccattaggcaacctcataccaggagcccaaaatctagttgtcacgagttcccttcaacagtctgtctgaggtggtctgagacaggtgcgccagcagcctttggcaggggtggaaccatgtttaactctggggtgcggacacagttgaagggagcatgtgctcttctgatcaggaatgagaggcccctgaatctgcatagagcttgaggctggcagggcctgagctgggccttcagggatttggggagggacatcgggcatgcagaaagctagaagctgcctgtggctctcagtttctctgaagagaggggagtggacagtaaatgccacttactcctcacacctgttgcacacttgacccccagaggacagggttgcttcaggactgagcaccctcccttgcaaacagatgtttctcctttttttttttttttttttgagacacagtctcactctgttgcccaggctggagtgaggtggtgcaatctcagctcactgcaaccttcgcctcccggattcaagtgattctcattcctcagcctcctgagtagctgggactacaggtgcctaccaccacacccagctaattttttgtatttttagtagagataggatttcaccatgttggccaggctggtcttgaactcctgtcctcaagtgatccgcccgccttggcctcccaaagtgctggaattataggcatgagtcagcatacttagccaccatttactcttattttttagcaaatatagttgtttttctgtagttcagaaaactcactggttgccttactttctgcagcttaaacagagagaaaataaggtttaaaagtgcagggctatttgtgttccctgttagagacagtgtatattgtttgtaaagggaatcgattttatctcaagaaaaatgagaaacaatagcagagacttcctctgtctcagataaaagaatgcctccttatgaaaggatccagggataggttgagtatttcttctgaaagaccaggagcaaactgtgtctttttagacctctgatgttctttggagatatagcccaaggtgttttaaatgctcacgtttataattatcacctcaacttctcctgagctccctttctactgcagtaaaatggagatgatcatttttagcccccagagttgccacggagagcgttacctgaggttgtggcctgggtgggcaaaggtgggtccgccctgtccatgcgggcagtcagactcactccgcagccctctctgtcccataggacagccttgcacaggtcagagctgcgcttcagtgacatgaccaggtcctcactcgggaaccttcagaggactccgccctgccaattatacattccccagaggccaggagtcgccttatctgttctcatcctctagtttattttctgaacaaagaaataagatggaaactgtgactgttgattttataaatccttgctgggtacagaaggaagacacaatcactcgtctaattgtcttcagcacacaaatcctgaatgcattttgacttcataaactacaagtaaattagctatacagagttcgcctgttgcctcacacttggtatctaacgcagctgtaaatttccttctttctgtctgtttgtgtcatgcccgttcctgttgtgtcagagattgcaggctgtttcctttaaagagcttggccagacaggggctcgaagttaatttcctgctagcacagcagtctgctctgagcagtcaagggtggaaatctccatgaaagtcctgccaactgcagacctcccagtatggaggaggtggtcacagagctgaccaccttttatgggatattgagggagcgttccataccacacagcaatgcagatcattgaacagttcatggtttcttccccagcaagacctctttcttgtttgaaaatgctaataaaagtggtataaatgcttcccttttgtaggagcatagggcatttgctgtacaaagaagatgtctttctatttttgaaaatcggaaagcgtaacctgagacattaatcaactcagagggaactgcattttataaatcactgttaacttacctaaagtttgacatgcaatactttaaataccaagatgagaatcatttagaatcatgggacttcctttgaattccactgatgatgccattggttcttgagttgagagcaggcacttcttttccagctgtagaagaattacagccaaacaattacagtggaattatagctgccagtgacttatgaaaatatgtgtcaagctataacacatccaaaagccccatcagaacctcattcctaggtagaaaaaagactggaagaaaatatgctcagatgttcagaacagtgaaaagcctctgggttttagaattgtgggtgattttttttctccttatattttctaggctttgcaaatgttctacaccatcacttttatattatacaataatatttttaaagcccatatccttccttaaaaaggctttgtgtaacacctgtaacagaaagaggagactggcagaatggcaatagccaagctaaggaaaactcttcttgcttgccttgggtggttcccaagatacgaagatacattcgtgtggctcgttggatttttctgacacttgggccatagggaagtcacagtaggcttttctggggaccttcattaagtctgtaagggtaggaaggcaggattccttgtctaaattcagatggattggtagaggtgcgagcctggaggcaaaactgtcaaataagtggtatgtgtcagagtatgcctgccctcactcttatcctttgtccctttcttgttagcatctagtgtcaaccagttctataataggtattgcagaaagttcaatattagcttagaaagtttaaacgtttcttcccttctgggaatatttatgttttaacataagactctgaagcacagctggaggtatgcgtccaaggcttctgctccaagactgcttagctctctctgccacaaagacacgcccagtattttcagagggaagaagtaagaaacgaaggcttggcatcttgaagtgttaaatctggaaagacctctatatcacggtagccttcatttcacagacaggaaacaggcctgaaagagcagcaaataactcggccagagtttcacagtacatagcagacctcagtcttgaactcatgtcctcagcctatctctaaccagataaatattcctgaaacatgccttaaaataaaatttgaaaatcttttttgagataaaattcacatcctatacaattcacccgtttaaaatgcatggttcaatagcttttggtatattcacggaattgtgtaaccatcaccacaattaattttagagcattttcatcgccccaaaccttgtacctctaagccatcactccctatgcccccagccataggcaacccctaatctactttctgtctctattagattatggatttctctattctggacattttatatcaggagactcatacaatatcggttcctttgtgactgacttctttcacatagcctaatgtttccaaggttcttctgtgttgtagcatgtatcaatactttatttttcttgctggataatattctattataaaaatatatcacattttctttatccatttatcagttgataacatttgggttatttccactttttgacttatgaataatgctgccatgaacattcatatacaagtttttgtgtggacatatgttaaatttctcttgggtgtatatgtaggagtggaatttctaggtcatatgagaactttatgtttagcttttgaagaactgctaaacgttccagagcactgccccattttacattcccaccagcggtgcataagatcccagtttctccatatcctcaccaacatttatctgtctttttcactatagtcatcctagtggttgtacagtggtatctcatcgtgtttttaacacagcctttttaaaaacatatgtgctaggccaggcacgatggctcacgcctgtaatcccagcactttgggaggccgaggcagatggatcacctgaggtcacgagttcgagacagcctggccaacatggtgaaaccctgtctctactgaaaatacaaaaattagctgggcgtggtggcacacgcctgtaatcccagctacttggcaggctgagacaggagaatcgcttgaaccaaagaggcggaggttgcagtgagccaagatcgcaccactgcactgcagcttgggcaacagagtaagactccatctcaaaaaacaaagcaaaacatatgtgctgagaaaccttcagcagttacacactgcatttgtaaggtcttaactctttagtttggtacgctagtccttgtaagatttccacagtcttcacatcttttctgccagccgcctctttgggaacccagcacacaagacaaccagatctcctgactgccttccctccccagtttcacaagactagaatcccttctgcctgcctagctgttcttgaaatttcatttggatagcaaagaattcagaaggggtgaggaattggggtttccagagcaaaactggaaatggacgagtggcctcttctaaggctggggccaggaatgaccttgtatcgccaaaggggtggcagggctgccagaacgtgcagttaaaggttccggggctcagccacttcctcccgtagctatgcatggcaagtgataagaggacagccctgctgtggactcagcaaagccagagcaggaaatgagacctaggttccaactctaaatgtttactttctttttcctttgctctccttcctcagcagattagttgaggtatgtttcagcctgacctaaagttttttcttatacttttagaagaaacccacttaatatactaacttgtaatagacgccagtcactttttttttttttttttttttttttaagagagatgtctctcttgcgtgatctcaaagtttctggtaacactttggtttctatggaattgctggaattcactgctatcatgtgcacctctattcatctaaaccattgttttgaaaatcctttacttaaatgctcccttcttgaatccccttataaataaaaacagcttatgttggttcagtggtttgatgggctgtttactcttccggaatattattgaagcatcttaaatccaaaatgtcctctttatttagtttgtctcaatgtctaggcacaccatcttgactgcagacgcagacctcaaataaacttcctcctcgggaggtacccatttcccttatcaaggcagggcatttggctcagaaattgctcggtttctttttttttttttcttaagacagaacctcactctcacccaggctggagtgcagtggcactatcttcactcactgcagcctccacctccaggtttaagcaattctcctgcctcagcctcccgagtagctgggactacaggcacatgcaaccacacctgactaatttttgtatttttaatagagacagggtttcactatgttggccagcccgatctcgaactcctgacctcaggtgacccacctgcctcggcctgccaaagtgctgggatcacaggtgtgggccaccttgcctggcctgaaatttctcagtttctaaataggttcttggcagctcctcttctccaacttgaagttactggccaacagtatataatcatctgcagaaagaccaatatgtactgacttttcactataggaagatttatttcagttttgaggaaatctcttgtaaccctagaggataatggaattggaagaaaagtagatgctgtttcagagtcctggggtaaaatgtaaaaatgagcaatatatacacacacacacacacacacatatatatatatttttttttttttgagacggggtctcactctgtagcccaggctggagtgcagtggcacgatctccactcactgcaacctttgcctcctgggttcaagcgattctcctgcctcagcctcccaagtagctgggactataggcacgcaccaccatgcccagctatttgtatttttagtagagatggggtttcaccatgttggccaggcttgtctggaactcctgacctcaagtgatccgcccgcctcaaagtgctggaattacaggcatgagccactgtgcccggcaagtctcattgtttcactgtagcaaggacgcagccagtgttaaatcaggaggtcttcccctgtgaagttgctttattggaagccttaatcagaagaatcatcagcggaaagcagttgtctgcaaagccattcctccccttgccagtaggtggcactgtagctgtactgttttcagatgccctctccagccgtgcaatctctcccttggccccaggcttctcatgttctgtttcttctttgccaggtctatgtgctctctctatcaaccattccaattcttacctggcctatcctggaagcctgacttcaggggagattgtgctttatgatggaaactccctggtaagttgacggtgacctggctgagccaacccacctgccttggctgtgtggtcatggaaggagatagataaggacgccctgccgtcgggggctggaggcggtgggagtaagcaatactggggagttgttcaagagaaggtgatactatttcccctcgggcttgctgtgagtcaacctcaccataagccagctggccaggccaagttagacatctgcagcataatgaaaaccacttgccagcagggggccagttgtctccctgaatgtgtcaccctgtcccatgccacagcctgagacagtgtgcaggtgtttcatattccctgccctctggtctctgaggcatccctgagcgggacaagattgctgtgggaagttgcctaaagatgcgtgcagggcgcgcctgcgacggcatcacactgcatcaggtgctccgttcgtggccaccttcccaagggcaggaaaagggatggaaatggagtggcccttgaagccaaatcttgattcaccagaaaatgacacacagcttacatgcagatggcctgggggacagaggaagagacagggagctggacaaaggagggagaaaggagaaaagaggaaggggagggaggtgaaatccatcttccctcctccgcagcatctgtatccatttttccttttcaccaacagaaaacagtctgcactattgctgcccatgagggaacactagctgccatcaccttcaatgcctcaggctccaaactagcaagtgcgtctgaaaaagtgagtccactcccaccaacacctctgtctgggtttcgctggatggctcctgccgtgcgcagggatgggattgaacaaacctggtgacatgaagactgactggtctctgggcccactcagaatttgtttcagagggagaatttctggcctctgcatgtgtggtatattcatgcatttgttaattcaataggccaggggcctgcaatatgcaagatacaagacactttgcatgaaaactcgtggtcttatgaagaaatgtacgtgtacatcagccgtagagacggacaaatgctacaccttataaacacagtacagtgcaaaccaaatgctttactttgctatttagagaaattgatgtcttctgcctggaataatcagagaaagtgatccaattgaattttttttttttttttgaggtggagtctagctctgtcgcccaggctggagtgcaatggcgcaatctcggctcactgcaacctccgcctcccaggtttaagtgattctcctgcctcagcctcccgagtagctgagattacaggcacatgctgccacgcctggctaattttttgtattttagtggagacggggtttcacttcactgtgttgcccaggctggtcttgaattcctgagctcaggcaatccacccgccttggcctcccaaagtgctaggattacaggcgtgagccaccacacccggcctcaaattgaaattctaagaaaccagagcagttgggtgaacacacacatgcacacacacatacacgcagagccttgggcacaggtggaagggaaaaggtagacagagggtgtttataacattttccaagaattgttgatatggcacataaataaacatgcctctatgctcaacgtggtgttcttcctcctcagagacagatgttcaaaaccaataaaacaaactcctctctaaagggacatctctgtgtaaagccactaatggttatgaaatgtccacctgctttcttttccagggcacagtcatccgggtgttctctgtccctgatgggcaaaagctctatgagttccggagagggatgaaaaggtctgtgttcaatgtcaaacccattttaaagtccccgcagaagtcccgcagggaccgctggcagctgtctagggagaggacagagagtggctctgtgccctccactcacctggaggaagtgtaactactctcccaggtaattgactcccaggctttacttagggctcagcaaaactgaaagccgagatgctgttttaacacagttcagccgtgagagtccctttttgatgtgtgtgtgggcggccggcacaggagaaatgagagagccagggagtcacaatccaaaaataatttctgatttccttccatggaaataaaggacgatgtaaagtgtgactgtttgggatcttatcggatgtaggtttgcagccagatcagtgcacagagcaactggaagattccaagatgccaggaaggcacagttcctcccttctgctgacagaggcagggctataccttgtttcttctcacataaataagactatgggccgggcgcggtggctcacgtctgtaatcccagcactctgggaggccaaggcaggcagatcacctgaggaccagcctggccaacatggtgaaacaccgtctctactaaaaatacaaaaattagctgggtgtggtggtgtgtgcctgtaatcccagctacttgggaggctgaggcaggagaatcgcttgaacccaggaggtagaggttgcagtgagttgagatcaagccaccgtactccagcctgggcaacagagcgagagactctgtctcaaaaaaaaaaaaaaaaaaaaaaaaaaaaaaaaaaaaaactatgaccctttgtgaatctttctgacattaatttctaaatatgagcaccacagtgtttaagggatctgggtctacctaggctcttcaggatacatctgattttcttataaagctgatctctgagttataaggccataactcccatttctcttgctcactgacccatgtgttgctgtgcttgtaggtatgtgacaatcagctctctagtgttcagtatggattcacaattcctctgcgcctccagtaacaccgagacggtacacatcttcaagctggaacaggtcaccaacaggcaagtactccgcggggcaccaaatgctcattaaacgaaaggagtcaggcctaggctcttctactggcatgaatgatctcttttctttctgaacacccaatcttggcttcacttgggacttcacctaagtgatggagtgtgtgttagcaaaactttggaggcatgatgcacaaaagcaaaaaactgggagccacccacgtgagttcacgtcctggctctgcctcttaggagcccagagatcccgggaagataatttagatctgtgtccttcagtttcctcatctgcaaaatgaacataacagtagtattaaatgagtctgcagatctaaagtgttcagcatcgtgcctggcacataggaagcactaagaagtgttagctgatatagctgtaaatataacaatatatttatttatcattgttgccagcagcaccactgagcgcttgggaagcacctgcaatttctcagggcttaagaagctgtctgaaaagtgaaagaaaagcctaaaaaatggataaaatctctagggaaagagtaaaaagaacttcagggcagacaatgagctttgagttacacctgtgcagaatgggggttggaaaattctggaaagatggaggagtgagaaaggagcagcccccagtgtttcataccccacggtggggggcaaggattctagagaaagagcgctttgaaaacgttaccccaacctgcagagaaaggcaggatcaggacagaaagcctactgtatctggggagttggttgctggtacccttggatggagtttcagaagaggaaggtgtagaggctgggcaccatatcacgctgatacatgctaacacatacgtaacagaggccgggcaccttatcacgctgatacatgctaacacatacatgacagaggccgggcaccttatcaatgctgacacatgcggacctcatgatccacccgcctcaacctcccaaagtgctgggactataggcaaacagccacatttatgatttcacagttctgcagcccagaatggcaggactgggtcttcttctcagcatgacacaaggctgaaagagaggtgccaagatttctctgacttgcccttctgccatctttttctgccaccagttggagaaagctatttttaaaggcatgtgtgattaaagcaagcccacgctgcctgaggtcacctgagccatgtcacatatcacagccatgggactgacgtcccctcatctctagaatccttgtctccccccacccccagtggtgtatgaaacactgggggcggctcccttctcgctccttcatctttccagaactttccaacccccaatctgcacaggtgtaacccaaagctcattgtttgtcctgaggttctttttactctttccctggagattatatccactttttaggattttctttcacttttcagacagcttcttaagccctgatcttttttggagccttaattcatcatctgttgtcatgggtttgagcactagagggcggctgagctgttaagatgccgttcaaccccaaggttccacgagtgagtgatcgcaattgctgctgcagccccgcctccactggggattattatcagagattgattttccactccaggctctcccgtttctgtctgtgagcacaggtgaccaggagcagaacctccaagctgttctgggttctccgctcaacctgtccacgggtgttcatatgtccccggcggttacggctcacacgtgcctcttcagccctgcttcgctggccagggcccttgaacgtgtctttagcacctcgtgctggtccagccgttactcttacatttggtctgactttccagtctctttcaaccaataccagtccatcctatatcatcttgctgattaatcttctgaaaatgtccctttgaacatgacacctcctcctcagacacctttattcccctttgaccttgggaatgaagtcccagctcctcccgtccccctgagtcagacctgctgcagagcccagcagccaccacccccagaacctcctcatttcctccagccacagagacaccatcccataaaacagtatgcgccacgtgccgggctccatgctcagtccccagcatccttagttctcccagcaaccctgtcagggaggttgtgatgatgattcctgtttcccaaatgaggaaatctggacacggaaacgttaaggaacctcatccgcctctcccttcctctgtggtcctggactagctcctgcctggaccatctgtgcagcaccgcatattaactgctcacgtggtttttctttgtatacacccgtgctctctcaatctggaatgcagggtctggatcgtacacctctttgtaaaccccagcccggagcacagggctgtgggacagacagtacaaggatgtctcaggatgcttcggatcacagaaccctagcagtgcacctagcatagtcactttcagatgagaacatgaaggcccagagaggtttgtccaaagaccccctagcccattggtagcatagtaaagaatacctcccagagctctgagctgcagggcgagcttcccaccaggacctaatcctgcagacaagcagcctctcagcagttgcctgctcctgggaactcatatggcaaccttggttctcaatgtgccaccctctgtgtggggcagagctgggggttgtctctcaccaacagaacagtcaccccctttgtctggcagaggccttgggatgaagttccatgactgtaggcgacatcccaggtccctttgcatgatctccatcattacacatgctgggtacctgggtgactccagggttatctacaatcaaacaccacccaaagtgtcttgcccggaggtttgctacccactcagtctggctcaggaggccttcacgttgagatctgtctgttcttccatgagcccggcacagtcccaagcttatttaatggtacctggatatcaagtccatctcactctctaccctaactctcttctggaaatctaggaatcagactagtcatcagataagccttctttaataggggaaagcagtagcattgggaaccttttaacagctttacaatggctcttctgaagaacaaacaagcccttgatgctctttagttattgccagaataatacgtcctggattgttctcagtgggcagaacattatgctaaggcacagtctctccctgctgcggggagtgtggctaatgacgcttgggtgtggagattcctgggtgcgtgtggggcctgcagcccagtcccatcgttgcctgtgcattactccctagtcgaccagaagagccttcgacctggagtggctacatgggaaagatgtttatggctgctaccaactacctccctacccaggtgtcagacatgatgcatcaggacagggcttttgccactgcacgcttgaacttctccggacagaggaacatctgtaccctctcaacgtacgtacaatgacacccactctgaacaagaccacactttcgtcaatgtatttttccaaagcacaaaaatccccaaacctgaaaagaaaaaaagaaaacttgccccaggctgggcacggtggcttacatctgtaatcccggaaccttgggaggccaaggcaggcagatcatctgaggtcaggagtttgagaccagcctggccaacgtggtgaaatcccgtctctactaaaaatacaaaaattagccgggtatggtggtgcgtgcctgtagtcccagctacttgggaggttggggcaggagaatcgcttgaacccaggaggcggaggttgcagtgagccgagatcatgccactgcactccagcctgggcgacagagcaagactccatctcaaaaaagaaaaagaaaacttgccccaaaggaagggtgagcggaatcaaacccctgcttttcctatctgacttcaatacggattctcagggggcagccagaagttggcatgggaattttagccttctggttataatgacactgtcttaaaaacaattcttatttttatgtaattatgtaaaaagcctccagatctgttttctaggttcggactcctatggggctgacagatgttttaagaagtttaaaggagtttattcaaaagttgaacatttttaaaatttcacaaaactaaccagcaaagacagtaagccaatcctccatttaccccctttctgtcttggttaagggcagagacacatgtcagagggagactgcgtcccatgtagggagctaatgtgttcactagctattgcttctcgcagggtcgcagcatctacactcacttgcctcatccacactgtcacgttcaaagacaagaaataatcctgaaagtagatcccaaggccagaatgcaaaggaatagccagaagcccagaccagatcagtgggctaagggtttgtcaaaggcagaatctggtgacagctagggtgaggggggctttgtcattggaagcgaatccatcgcccatcttcgttgtcatcacggtttatgttttccttggcccttaggatccagaagttgccacggctgctagttgcgtcatccagtggacacctttatatgtacaatttggatcctcaggatggaggagagtgtgtcttaatcaaaacccacaggtgaagagactgcttttcaaaagacagcctttcgagagctggtcgtgtagagttgtcccttcgccaagaacgacaagcttcagtgcccttgcattgatttgttcttcactggcagtctcagtggcaaacctctagtgggcaagtgctctgcaccgggctctgtgtcaggtgccctcagcatgtggtaatcatctggaaaagtgccaggattaataacacacaagatggtctccccctcagcctatgctcctaacacagccctgagctcacagtgggtgttcaaaaatattccctgccaccaggtgtggcggctcacacctgtaatcccggcactttgggaggccgaagcgggtggatggcttgagtccaggtgttcaagaccagcctgggcaacatggtgaaaccccatctataccaaaaacaaatacaaaaattagccggttgtggtggcacacacctgtagtcccagctactcaggaggctgaggtgggagaatcacctgagcctggagaggttgaggcagtgagccatgatcacaccattgcactccagcctggacaacagagtgagaccctgtctcaaaataaaaaaaaaaaaaaacctattccctgcatggaattgaaaagtgctctaccagtcatgttgactcacgcctgtaatcccaatactttgggaggccaaggagggcggatggcttgagctcaggagtttgagaccagcctgagaaacatggtgaaaccccatccttacaaaaagaaaaaatataaaaattagccaggcatggtggtacatgccttgtagtcccagctacttgggaggcagaggtggggggatcacctgagcccaggaaggtcaagactgcagtaagctgtggtcacaccactgcactgcagcctgggcaacagagtgagaccctgtctcaaaaaagaaaagaaaacaaaagaaaagcactcatgccttctgtgaacaggcacagactgagctctcctgctgtggccagggcaccagagctgccaccgccccccaccgatggctgctctccttgctagcatgtcctcacctgtgtgtactgggaagagcagaggactaatctttgtctagccaatgtaagagaaagaggccattttgacggtgtgtgactgcccctggcagttgcaggtcacttcagctcatcctggcccagcagcgtgtgggtaggtctacaatttaaacccacagagttggcgggcggatcacctgaggtcaggagttcgagaccagcctggccaacatggtgaaacccagtctctactaaaaatacaaaaattagccaggcgctgtggtgggtgcctgtagtcgcagctactcgggaggctgaggcaggagaatcgcttgaacccaggaggcggaggttgcagtgagccgagattgcgccactgcactccagcctgggcaatagagcaagaccctgcctcaaaaataaataaataacccacagagctgagcacaggcttcttcatgcttttcctttggaaggtgtcctagatatatgatgatttcttttttctttcacctcctcttgattgtcacaagtagcttgcttggctcaggaacaacagaagagaataaagaaaatgacctcagaccttccttacctcagtcttatgcagcgaccgtagccagaccaagtgcatcttcagcctccacggtgccaggtgggtggacacggggccaacaggggagcatctccaacagtgacctccctccccttctccctgcacgctccctccccttcccccttcactgttacctgggggtggagtgccctccctccccttcccccttcactgttacctgggggtggagtgctctccttgaattttttattttctcacaggtgaggccatggtaatagcctttaaacctgggaccctcaacctggcaaggcatcacacgatacggtctttttcctaacaagtggtgttaaccctttgcctcttcaaaaattccaatgaggccaggcacattggctcacacctgtaatcccagcactttgggaggctgaggccagcggatcactggaggccaggggtttgagaccagcctagccaacatggtgaaaccccatctctacttaaaaaatagaaaaattagctgggcatgttggcacacacttgcaatcccagctactccggaggctgaggcaggagaattgcttgaaccagagaggcggagattgcagtgagctgagatcataccactgcactccagcctgggtgaaagagtgagactctgtttcaaaaaataaaaactaaactaaaatttccaaagagcctgtagtcctagccactcaggaagttaaattgaggcagaaggatcccttaggctcaggagttcgagaccagcctgggcaacatactgagaccctacctcaacaaagaaaaattcaaagaggtaggatgcctcaggcatctgaagtggaaaggcaggtcaggcttaaagatggcagatggtgaggattatgacttgtcctaggcacagtacctccagggggaagacagacagcccctttgcttcctttgccctttatttgagcccccgctccccacccgccaggtcatggcataaaagcagatccccagtgcttgtttcatgtctctttcttggtttccaggttattctgaggacggcggggcgctgcgaggagaagttattcctgaacatgagtttgcgacgggaccagtgtgtcttgatgatgagaatgagtttcctcctgtgagcattaggaacccgtaactgggcggctcagtctgtgtgcttagaaggaaaccttcgcctcatacgagaggcagagtccctttccctgttttctaatctataacaactaattctctgctctagtatttggaaagccataggatatttgttgtactgtgtgcttcgaatcctacagagtaggctttaggtgtcgagctaaaccctgatggcattagagtcaccgaatactaatccagggagtcttggtggcctccctccagccagaggcctgcgatcccttactttgcttctgtagcactgactttgctgcctggaaggtaggaacacgtgacttgtctaaaacttattttcctgaggctcccatggatgcgtttgcagaatgctgccttccttgtgctggaggggatggtttcagagggctgggctgtgtgttcaggactctgagctgagttgctgcactctgtgaaccagcttgaccctcacttacctgcagctctggccggcagacccgcacctccccagcagttgcagacactcattaagaaacaagtggccgggtgcggtggctcacacctgtaatcccagcactttgggaggccgaggctggaggattgcttgagcccaggagttagagaccagcctgggcaacacagcaaaaccccatctccaccaaaaaaaaaaaaaaaaaagaaaagaaaaaattagccgggtgtggtgtcacgtgcctgtagtcccagctattcgggacgctgagatgggaggatcacctgagcctgggaggtcgaggctgcagtgagctctgattgtgccactgcactccagcctaggtgaaagagtgagactctatctcaaaaagaaaagaaaagcaattgtgtgctctgtggagggcagcaggtgcagggcaggagcttgcccgagcacctttagctgggtttcccagcaacctgctcagcctgttcccacagctagggccctcggggctggctgagtgctgggcgtggcttcttccatcacctggaactgaagacaagattccctcctgagagcctgctggggcttccttaactgctgattcttcaggctcccatctggagtaacatatagaccgctcttgtgagcttcagtcaaaacatcccagatagtcaacctgaaatcatttcgagatggaagtactgatttgttttgttttgtttttgagacggagtcttgctctgtcacccaggctggagtgcagtggtgtgatctcggctcgctgcagcctctgcctcctgggttcaagcaattctcctgcctcagcctcccgagtagctgcaattacagatgtgcgccaccatgcccaactaatattttgtatttttagtagagacggggtttcaccatgttggtcacgctggtctcaaactcctgacctcaagtgatccactcgtctcggcctcccaaagtgctaggattacaggcgtgaaccgccgcacccggccggaagtagtgtttgggccaagacttggagcatcagctcctagagccagagaggagctgccacttgggcactgaaacaatgtccattaggctttgttatggaaacttctcctgatcattgttttgtgtccattgagcttccaattgtaaaaggatggagtgcaggtctggcttctttctcccgcagatccgtggaaccctctagtgagcacatttggcttagaaaacaaagctgcggtggggccctgcatgcagggctggggctgttgttttgtgatttcccacatcggctctgcgggtcggtcgcagcgtgagcttttacatttctggctttcaataggcaggttgtcagagacgtggctggcaagtgaagtttatatctcagtggcggagagcagttgttcttaaaaatactaattataaacttcaaaacctctgttggcatgctgcctaactataaaccagttgttttacctttgggttctcatggccccaactggccttaaagggcgttcttctgcaccctcaagaggcggtggttatttacctgaagtcgaggcttccaggatccagagcactctaggtcagacaccgtggggacaaatgtgaccattctactctgtcagggtttaccacatccagacactcactaggttccgtttcactaattttggtaaaagtctgtaactactataaaatattattagattcttaattgtaatcgcagtaagccttgcaacctcttatagttacagaattggggtaatgtggatattagtatctaggaggtagttccttgccaaagaacctgtataaaataataggtaccttgtgcagatcatttatttggggtaaaaaggaaaaggggaggtgcttaattgaagaaccagtaagaaagtttgtcctgaggcctgtgtgcccattcagtgccaggaagctgggcatgagccagttgtttcttctccctcctaaggaccaaatgagtgaaagttggttgaaattgcatcaggaattcttatttatacgcaagaaatacttcctgccagtgagagtggtcactgaacaaggtccctagaacaggtgttagacccttgtgagtgtcaagcagcccctgtgtgcagggctgtgtcgtggcagccaccaacctctcagtctgccctccagcctgcaggtagatggtgatgaggggcagtgctcccactaaggcactgtctcagtagcaggcaggcttctccatctcaccatgtaaggaccagaggcatgcatgctcctgggatgctctatcaatatggcccatctcagtcatgcctgaattggcagaaatgttcagcgagggatgctagggaacttcctctctgtctccttattctgaattgtcatgcctattgcaaatctctgtgcagaattcacatctttactcacattccttaaaatcttctaggaccacaaaaggctcttggagtctcagcttggttaaaatcgcctctcttgtagtgacgaacaaacataggcttgcctgagtagtctgctacaggagctctgtgagccgctgccttaagaacgcgggtcatcactagtgatcttttcagaacacatactgacacttccctgcgtaggatcacgcttgcctccttgggatttacttttgctctgagagcagtgaaagaaaagagacttgatcatttctggtgccttagaaagctgctacattcgggaggatgagaagcttttgtttcaggaacaagccaacctgtacaagtctctgtattttgtgagactagtcccaatcttgtgagcaagagtcaggaaatcaggcccaagggtataaactgaccttcccttttttttttttttttttttttttgagatgatagagtctcactctgtccctcaggctagaatgtgttggcgtgatctccactcactgcaacctccacctcctaggttcaagtgattctagtgcctcagcctcccaagtagctggggtttcaggcatgctaccatgcccagctaaattttgtatttttagtagagacaggatttcaccatgttggccaggctggtctcaaactcctgacctcaggtgatcacccccctcagcctcctaaagtgctgggattacaggtgtgagccactgcgcccagcctaaactgacttttttttttttgagatggagtcttgctccatcgcccaggctggagtgcagtggtgcgatctcggctcactgcagcctccacctccccggttcaagcgattctctcctgcctcagcctcccgagtagctgggattacaggtgagcgccaccatgcccggctaatttttgtattttttagtagcgatggggtttcaccatgttggccaggctggtctcaaactcctgacctagtgatccacccacctcagcctcccaaagttctgggattacaggcgtgagccaccgcgcccagcctaaactgactttttaatagtgattgagcagtccatgtttacaagtaagatgagccttttaaaaatatatacatatacatataaatacatacacacacacacagagacatttttatagtcagtattttctagaactgtgtcatacttgtctacacctaaataagctgggtgaccattctgtggccatgagcgagttcagacagaaaaattccacagtgcccagcctctccctgctcactctgcatgggcacagacctgttgataatgcacctgcctaccagcctcttcctgagaagagtaaggccattctgttttgattttggtagataatcttgtgccgtggaaatcagaagggcaaaacgaagcagtcatgatgagaagcacacctcagaaatcaggacatcccccctatcaggtggttttggagaaaacaaggaaggcggaagaatggagtgcaattgtgtgagcagaaaggggggcaggaatcccgggtgctccactgcttaaaccacaggacctggttaactcctcaccaagcttcccacgaccctggttgccaatgggcgcgggagacattgtatacacatcatgctatttaaaatacgttcaaactatagtgtaaatgctaattaa

SEQ ID NO: 15881 - DNA, 36190 bp, Homo sapiens
cccgtggagccggcgcgggcgggctgctgaggtggctgtcgccggctccgagctgcggcttcccgggccgagcccccgatggaggccgaggccgcggacgctcccccgggcggggttgagtcggcgctcagctgcttctctttcaaccaggactgcacgtaagctgcgactcggcccctgccagggaggtgggggacagagtgtcaggacccaggggtgtcgtcctgagagcagcttgtggcttccgcctcgaggcggcctcggcgggagggccggtgtctgcttcggacgcattgggatcttgttatccccgtaccccttcagtggggtttgccgcaccccccaccccaccccactcccagtgtcctcccagagcgacaaggttgggccaagggtgaaagcagggagttcgcaaagggagtggtggggctgcgggggccacggaatatggggggagcagggcggtgggaaagccagtgaccaaagtgggtgtctggggaagagagacagtggccaaaagaaagagatgagaaaggagaggaagttgcaagttgacccaggactctgtagttggggcccaggaagatgagagtacaggaaaaactttcccatttgtccttgagcatctcaacgtggcatctgggcagggcctcggacaaagaggcagcctatccctgcggccaggccagcccctgtcccatccccgacgcagggcatcgtgcctgcccgctctggatggaagaaacctttggatttctttggctgttttcacatcgcccacccagccaggcaggatctccttctcggagtccaagactcttttcccgggcgcagactgctttctctccaggaaacaggagctccaccctgttgtttttgagtggatttttaatgttttacttcgatgttcacatttgggctttgagagggagctgggctgaagtgtgtttcaggcatctgcaggattctgtgacttacaggcaaacgcctgtttctttccctattttcatggaagcgagccctggggaccatatggaatcatctttttggaatgtgcaccctgagcatcaggcggggatgaccgattcccagtttcccacttcctgctgtaccagtttctgtgccttggctgctggtgactgagctacgctaatattgatccttcagtggtgtaattaaggccattatgtaccattagccaccctggcttccattccctttatgtttctgtttaaaaacacccggtgctgaacaatatgcctttgtttgaaaaacccatatgtgtaatcatgtaatcgagtagctctacagcttggttatttgagtgactttcaagtttttcttgaccacaatccacaatacgaaatatgtattgcaacatcacccaatacccataacacatacactattcacaaaatatcatgtgcaattttctgtgtcctttttttctaagctgcttgtgactcactgaattgcgttttaggatccactcatgagttgagacctgcagtttataaaaatgctggtatagataaaatcctgatgttctgtaagaaacattttgcaagagggcatggctgttgaaatgcctgggtgatgttttccttcccaattgaacacaagttaagaaagggggttagtttgcttgtaagtagtaaatgttctaaattctgctttgtaacatcattagatttgacaaaaaagggtgttaatttatactctagccattaaataacgcaaagtcccagctttctacagaaattgaataagaatgttattttcaaaacggtagggtgctttgaaagttaatttccttactccctactgttagttttattttcttggatggaagctctgctgggcagctttgccttgcctataaataaaagttcttgtcacagtcagttgctttgagccacagagggtatgacattggattttaaaataagtcaagccccttactgaatacatttaggtgtattgccatgtctttttctataaatgtaggctgaatttgggatccagtatttccaaagaaggtaggtgaaaacagcaaacccttaccagtcccctacgctcatacttcgtgattggtacttgtgctatacactttgggtactttttttttttttttttttgagacagtcttgctctgtcacccaggctggagtgcagtggtgtggtcttggctcagtgcagcctctgcctcccagggttcaagcgattctcctgtctcagcctctcaagtagctaggattacaaacgtgtaccaccacactcagctaattttttgtatttttagtagagacggggttttgccacattgcccagcttggtcttgaactcctgacctcaagtgatccacccacctcagcctcccaaaatgctgggattacagatgtgacacactatgcccagcctactttgggtacattttaaatttgattaatgataaatatttgtcccaagctctgtttccatgagtggtgattagaattttgtttctacagaaagactttatggatgaaataaggtctaagtctaaattccttgattcagagtcttttgtggccattgatcaatcacgtaaaacatcacataaaacatcactctgtgattttctcatatgtagaattcttctggtccaggagcagggcttatgtttgaaaattactttaaattgctgtcactttgcattaatgttataagactctagttacagtatttctttccttacttgcaaactttacaaacctcatttcgcagccaaacacatctatatttatgtgaaaaagtttatgtgaagaaagtttaaaaacaataacactacaaaatacattttgaagttttaagatgctctgggcttacttttccagttgctgtttgtcatcatgaatacctcagtctaggtactaaatgccagttctaagtgcacagctgcaaatgtctaacccaccagtttagctacttagcaggttggagggctgcgagacgtcaccagctaccttgtggattaaaagtttactgtagttgccctatccctgtgtcccagggaagaacaaatgtctgggtagggaaaaaaaattccagggaaaatcatgtgaccttctcttttttaggctagtgaaacaagagccttggccatccaggcttgtaatagtaagttgcttattttagtatatgcttccctgtaaagagtgaatttcaccttgccttccagagaagcacacttctgtgagtgtgctccgggtcagattctgttcatcacttaggtgcggagggcacagctggaaagagctgggtgaggattcccagctgctgaacaaagttgactttgatgtttactttcaacacaaggccaagaaaatctggattcacgtcctgtctttatctcctcattgaaaaatgaaaaattaagagaaccagattttttttaagaggcactttgattgtcctagataaatgtttagtttgtattttgtttgttggttgtgatgattgctttgtaggatatagtagaaagcagagttctccaacttgggctgctcattagaatacttgaacttcaaatccaattaaacttcccagctgagtttaatatacatccaggtgtgagagctactagtatgaagtatcaggacatttttctggaaactgatgaaaggaagcatctattaaattttacctactaatgacctactatgcctactttgaaagtgtatttcttagaccaggcatggtggctgatgcctaagcactttgggaggccgaggcaggtggattacttgaggccaggagttcaagaccagcctagtcaacatggtgaaaccctgtctctactaaaaatacaaaaattagcctggcgtggtggtgcatgcctgtaatcctcactgctcgggaggctgaggcaggagaattgcttgaacccaggaggcggaggttggagtgagctgtgatggcaccactgcactccagcccgggtgacagagcgagactccctctcaaaaaaaaaaaaaaaaaggaaaagaaaagcaaagcatgtttcttcttataagcaacaaacaaataaagttatgaaggaaagaaaaactgatttatctggtaaagtgcctctcagacaacaagaaggccccctcgttgtgttggaggtagagctttcagctattatgaatattcttaaacattcaatttttcctgttatctgcccagtgggaaaaacatgtctgctagatttgacattttgttggatgacagagctcatgcagtttcatgccccttgatcatttcacttttttttttaagttgcctttgactttttcttcttttcttttgctcttcctgcctgtcaagacatgcgtcaccatttaggaagttaccaaggatctaagctcctgcagatgcttgtttactgtacccctgaggctagggggcaaaaggcatctatttgcagacagatctgttgttagaatacctgtcgttattcccatgctgtcattatcctccacagatccctagcaactggaactaaagccgggtataagctgttttctctgagttctgtggagcagctggatcaagtccacggaagcagtaagtgtgtgtgagagagacctcagggatctgcaggagaaccagagcctccttctaggctttaatctgcggtgctaccaagctgcctatttttcccttccttagccatcaaacttagggagtcaagatttttagatttaaatataaatcgttgccactacttgctttaaaccacaagcacttagatctggcaacagtttaagtaacattttctttttatagaagaaattatttgtgtgaaatcatattattgagactttttcacatgcttatatgcacagtcattaatttttataactgtcaaacctaaaggacacttgtgacattttctttctttctttttttgagatggagtcttgctctatcacccaggctggagtgcagtggcacgatcttggctcactgcaacctccacctcctgggttcaagtgattctcctgcctcagcctcccaagtagatgagattacaggcacatgccaccaaacccagctaatttttgtatttttagtagagacggggtttcaccacgttggccaggctggtctccaactcctgactttgagttatctgcccattttggcctcccaaagtcctgagattacaggcgtgagccacctcacccagccacctgtgacttatttttgccattatattggcaccataagatactgataacattgattcagttttggaagtatttgtttgaagaaggcaacggtatcctatttacatagcccatgtcaatgatgttgaagcatgtctagtgaacactgtaaataattcactagaaatgtgacttccttattttgtcagggtgatggtttatgccatcataatagcgaacaatatacaacctttcagtttcctggaaaaaaagtggttcagtaaataatattttgggctcctactttatttgtaagatgttattgttattacaccatttttgtgaattttttgctctatgtctgtcccacattgttccctgtgggccttttccaagtggaagaaaggcacacatatgaaaagaatgtgctcagaaagataccaaagccgtaacctttgtgctcaggagggtcattaactaacttcttcctgagtacagaagtactttcctcgtcataatactgatgtccagatggttttcagcaggaaagagatccagggagcacagcaagatagggggtggggggagtacagatttaactgtgttactgtcccctcccatattggcacccctctagcaggacaagaagaattctgaagcagaagttcccaactgagaagtcacgcctttgaaatctctcagggaaagggtagatgaaaattgttcaaatattccaaacatgtttgacagagcaaacagtggagccctagggtctggaggggagattctgccactcagacagcatcagaggcagctgtctgcctttgctctgacttgcagtctagtcactagtgttttctttttcttttcttgagacggagtcttgcttgtcgcccaggctggagtgcagtgttgtgatctcggctcactgcaatctcttcctcctgggttcaggtgattctcatgcctcagcctcccgagtagctgagattacaggtgtgcaccaccatacctggctaatttttaaaatatttttagtagagatggggtttcgccatgttggccaggctggtcttgaactcctggcctcaagtgattctcctgcctcagcctcccaaagtgctgggattactaggcgtgagccgccatgccaggccactagtgttttctttactttagatatttggaaaggactctgaaagtgctccctgggagagggtaaaaagccacctggcagggtggggggcatggtggatcactgtcaatgcaagctcagagagggcgcctggccggcaagacccggagaacctttggaacctggcctgcgccgggcccagtgtcatggaggctggaatccttcttggaagtgatcaatccatgtaacctcccggctgcttttcctcccagatgaaatcccggacgtctacatcgtggagcgcctcttctccagcagcctggtggtggtagtcagtcacacaaaaccacggcagatgaacgtgtatcacttcaagaaaggcacagagatctgtaattacagctactccagcaacatcttgtccataaggctgaaccggcaagtaagtggggaaatccctcagggtttcaaagcttctgctaacgggagccaaacaaaaagatggacatctttcaagatcaatgtctgtaaaacaagcttccaattctaatgagaatgttaacactcaggccccgtgtcccgggggtattgtaaacagagtctactccaggtgctggttgtaacgttgttttccctagacctctggctcatgtttccagaacgttggtccctgactggtaggctgcaccctctccctagggtacagattgggcaccgcagggatgggtcagagctctggcttggacagtcccatgagccaccgcaagagcaccttaaatcagaggagcgactcttctggttttgccctagatagtgtcattcattgcagatgttggggcaataccactgagcaggagatgcctgagagtgaagtgggggctccctgggtcaggaaagctgcccttctcccaccacgtcctcagctctcctggaaggtctgctattcagccttgggttctcatttttctttttcccagctaacccttgaagactttttgttttttttgtagcattttctttgttgaaggattattctgatctcaaataggcaatatgttctcttttaaaatataaattcttattcagtaagtattgggggtgttagcagatttccttttgaattgctgggttttcattttgggttgttgtttctgtttttgagacagggtcttgccctattgcccaggctggaatgcagtggcacaatcttggctcactgcagcctccatctcccaggctcaaacaatcctcccacctcaacctcctgagtagctgggactacaggtgggcaccaccacgcccagctaatttttctgtatttttttatattgccagagtgtattcgtctattctcacattactctaaagaactaccggagattgggtaatttataaagaaaataggtttcactgggtcaaggttctgcaggctgtacaggaagcacggcagcatctgcttctggggagggctcagggagctttgattcatggcggaaggcaaagcgggagcaggcgtcttacgtggcaggagcaggaccaagagacgggtggggggtactacccactattaaacaaccaggtctcgtgagaactcactcactctatggtgggggatggtactaaaccattcataagaactctgccaccttcctccaacactgaagattacaattcgacatgagatttggggagggacactgatctgaatcatattacagtgtttccccatgttgcccagtctggtctcaaactcctgggctcaaggatcctccttggcctcgcagagtgctggaattacaggcatgagccaccacgcttggccaaattactgtgaaggcaggcactgtgctggtgtgttcaccattatacgacctggtagaaaaggcagtgcttggtagatacgtgctcataaatatctgtttcctgactgactgttaaataagtaaataaacaaagagattctttatgtgaccatgcagatttatctattcaattaagtattcccagagcggttgctgcattcattgaggacaatgttttcttctgtctttgtctaaactcttaagtactaattaattttttttaacaaatgagacaaataaatgctttttaaatttatgagaaggaagggattgtttctttgaattgatcaactctttcaaatgaaaatccacttaagtccacctaaagcagtgcggtgaaaaatagctggagaaagagaagtgggaccttttaagtagggagtagcaggagtaagaaagaaaagaaacctgcattcttggcaagggagggaaaggcagtttgagagttttctgattgaaggcttttagatgaaattcttgactcaggtgttttcactgaaatctgttggtagcagattaagtttcgctgctaaactttttatccttgcatatagtagtaatccgtatacaaggttaaatgtctgtttttggcacctgatgatctttttaagattgtttaggcaaatgatctgtaaagaccggaaccctcaaatagcgtctattgtatttgcttgtatgatttctctctttctgtctggtatattcattagcaaatgggacaaggaaggcctatttgagtgtccgagtctgttaacctttaggtgccagcctccccttaatataatactcattaactgtgaggttctcctcccccaccttctaaagaacactgatgcaccaggaactgtcagcaattcatggcaaagccacgaaccaagatctaacagttctcggaaccaagatctaacgtcggaaccaagatgagcatcggttcattggaaccaatatctaagagttctcccttcctttacatttcttctccgacaagaatgatttgaaacaggtctgggaagtattgggggtttgcttttcttaaaactttcaggtttgggacttaaattttggtttaagcaactcagctgctgcagcctctcttgccaggtagggattctgtggtgtccgggaggactgcccactctggggaaatgataaaggcccaaggggagtgtgtcctgttctattctgtagcactcagtctgctacttcctcaggccttcagacagcacagtttcttttttgaaaaacaggaaaaagttaaagatttggataaggtgttataaggatccaaaatcccttttatcttttttttttttttttttttttgagatagagtctcactctgttgcccaggctggagtgcagtctcagctcaccacaacctctacctcccgtgttcaagcaattctcctgcctcaccctcccaagtagctgggactacaagcacctgccaccacgcccggctaatgtttttgtatttttagtagagatggggtttcaccatgttagccaggatgttctcgatctcctgacctcgtgatccacccacctcggcctcccaaagtgcagggattacaggtgtgagccaccgcacctggccccaaatcccttttttctaagtatataggaaggaaagggccaagtgtggtcccagcacttcaggaggccgaggcaggaggatcgcttgagcccaggagtttgagtccagcttgggcaatgtaacgagacctagtctttactaggtctttactataaaaataaattagctgggcatggtggcacttgcccgtaggcctagctacttgggaggctgaggcaggaggatcgtttaagcccaagagttgaaggctgcagtgagctatgatcacgctgctgcattccagcctaggtgacacagcaagaccctgtctctataaaaaataaaaatttaaaaatttaaaaaagaagaacacttaggaattgtcatatgtttcatttttagttaatgttatttctcttgtattgaactgaggaaatatattttatggaatcaagacagctgtatgatgtatttagatttgcatacttttacagttcttttgcagtctcctcccaggggcccttgctatccagatggaggctgattggctcgaagcctctgaggccaaatctgtggtgttctagggcagatgctataaatattttgtaattgataaaaggagttattgcttataaaacctagaaaagtagatgaaattcaaagcaacagacaaggagctgagttgaaggcaagaccatggttctgcgggggctgaaaactgatagttaaaaaagcaatcagcagcatcgtgcccaccccagaagcatgctctcacacgaactaagagtgcatcctcgttccctcccagtgttttctctctgtttccctctgcgtttagtcttatctgcagccagcatgagggtgacctgaaattcagctgagtgagccgcagagcagatggtgccatcagagctcttgggaaaaaaatgcagatcagatcagatgggctagatgtagatgctgtttctaggagaggcatatgtcaaggccccgctatcccagggattgggtgtggggctgggaggggacacaagaggatatcagaaacctctgaacagaaggaagcatagaaccacgtagttctaaccacggcatgtgctggcaaaaggcacagtgattggataagtcagagaatatttcacagaggaacactcatatttatcatcaattttgagaacctgttagaatttttttaaccctcagtccccagtctcagacctacgacagagccttaggtaaaactgagaaagggctgggcacagtagctcatgcttgtaatcccagcactttgggaggccgaggcaggaggagctcttgagctcaggaggtagactaacctggacaacatagtgaaacccgggtctctacaaaaaataccaaaaaattagccaggcatggtggcgcacacctgtagtccctgccacccgagaggctggggtgggaaaatggactgagccccagaggttgaggctacagtgatctgtaatcctgccactgcactgcagcctgggtgacagaacgagaccctgtctgaaaaaaaaaaaattgagaaatgtgtttaaattttatttttctgcttggttaacactgatgaccttcatcattctgagccatggatagtcttccttggggaatagcagggcaggcttttcccaggagcagagcctgcctcttttgtgtggtattttttggtaccttcccttctagctgatgttccctggaataaaaggagctggctgagaccagtggttcttgagcctcagtgtgcatcgcaatcacctggtattcgtctaaaaacttcccaaaccagaatctccggggagagcccagggcttgctccttgggcagctccttgggcatccaggtctaagaaacactggcctgaggggagccaagtcaggcatgtgcaggggtggtcggcagctgctcagatgtgcgaggagctgcccaaccagaaatgccttcctgacacctcctcaccagcaccgatgtctgcccttgtactgggctatgcgttatattcctttaaacacccgatacatcaaccctgtggcctgttttcacttagctgagagcacagccattgggaagaggctctgaacctgacaagctttcatgtggagaggaagagaagggtctggcagcagtggggagagcaagcaccagagagaggagcccaggaaggaacagtggggacgtggggcactggggtgttcaaatggggccgaagcccttctccttttccctttgccagggctcagacagcggcccaaaagcaggcctggaggagagtctgagtagaaataagttagagctggtaattattcagagaggggtaaaacctaagatttggtgatggagagaaagcaaagaaacccatttttatataggagggagacctgtgctataaacactgaaaggcagcctgttagatggcagtggaaactacagaaggcacatgaaattgtcttacatggcacagggggtctgatcagaaagtgttcagaagtcctgttgaacgcggtggctcaggcctatcatcccagcactttgggaggccgaggcgggcagatcacctgaggtcgggagttcgagaccagcctgatcaacatggtgaaaccccgtctctactaaaaatacaaaattagccaggtgtggtggtgcatgcatgtaatcccagctactcaggaggctgatgcaggagaattgtttgaaccctggaggcagaggttgcagtgagctgagattgcgccactgcactccagtctgggtgacagagtgagactccttctcaaaaaaaaaaaaaaaaaaaaaaagtgttcaggatccctgttctaaggaaagaaggagaaggaagagagggagggaggaatggagggagggaagaaggaaggagagaagtaaaaacaatcttaatttctaataaaatttcttaagatcttgcattttatgcttgtgttcaggtggatgattacatgtgtatgtgtgtacatccataaacacaatcttcaaaatgcatcatcaaaattctgctttaggcttagaatcaagttaggactcatatgaaagatgaatgatttggatttggtcagggtctttgtaaggaacggttcggtagactgataagtctgtgtgattacagaggctgctggtttgcctagaagagtccatttatattcacaacattaaagacatgaagctgttgaagaccctcctggatattcctgcaaacccaacaggtgagctccaaaaatggaacaaatgtccctgaaatttcatgtcctggtgcttctttcccaagctttattttcctccaaattgcgaacgtgaagcagtgtttgctttttgagtcttagtgaggtttatctcgaagctttgtcttaatggcggcagattcaaattatgtcaggctgtgtgtcctgcaggggggctgtgtgcccttcattgcagtccaagaataacaacaccctttgtctgggacccatatcagcaaatgtgtcaaggcacgtaaggtagacatgtaaaagatttcaagcatctgctgttgaaaagtgtttacccctaattgttttttgtggttcgttcagtacagagtaggcgtgataattagaagcaggtttcaacttggcgtgtctgcatggccagcaaaaagacaatctgaaccataaagaatatgttttattacatgacaaagaaatctctctacttcgacgatatgctaggatattaaaccttactgaattctcgggatttaacactatttaatacattcctggtgtataagaagaggaatggtttggatttgttatattgaaatagcagatgacattatatgaattcatcaagctaggagtaaacaagaaagaattccttcattgtgtggtggggtgaggagtcagcacactggaacaacttgtacatttaatgactccagattaatatttgcagattatatttcagtttggtatcattgaacaactgcttctattatatttcagtttagtatcattgaacaactgcttctatttgctgtttctgagttatttggctttcactgaatttcaagatctatctgggtgccatccaagtcacctagactttttgaaccttggttcccttatgaataatacccatctcccagggttggctgagaattaaacaaggtaatgtttgtgaaagtgaccagcacaggaactgccatgcatgaaatacttctgatgccttctcttcattccaattctataaatggcccttggctgttgatttcagtgctttcacatttcagctatggcaaaaggatattttaaaagaacaaagctagccgggtgcggtggctcacacctataatcgcagcacattgggaggccgaggcgggtggatcacctgaggttaggagttcaagaccagcctgaccaacatgaagaaaccctgtctctaccaaaaaaatacaaaaattagctgagcatggtggcgagtgcctgtaatcccagctacttgggaggttgagacaggaaaattacttgaacccaggaggcggaggcttcagtgagctgagatcgcaccactgcactccagcctgggcaacagatcgagactctgtctcaaaaaacaatgaataaattaaaaataaataaataaataaaagaacaaagccattgaggctgttagggagttctgtgagataatgactttgaagcacattttctgaaatggaagacggtacgtgaagaagctgtgggtggtaagtttttcccttagaaatgagaggctgaaatcatctggacaagtatctattgcagacattctttgtgcttggcaccatagtaggcaccattaggcaacctcataccaggagcccaaaatctagttgtcacgagttcccttcaacagtctgtctgaggtggtctgagacaggtgcgccagcagcctttggcaggggtggaaccatgtttaactctggggtgcggacacagttgaagggagcatgtgctcttctgatcaggaatgagaggcccctgaatctgcatagagcttgaggctggcagggcctgagctgggccttcagggatttggggagggacatcgggcatgcagaaagctagaagctgcctgtggctctcagtttctctgaagagaggggagtggacagtaaatgccacttactcctcacacctgttgcacacttgacccccagaggacagggttgcttcaggactgagcaccctcccttgcaaacagatgtttctcctttttttttttttttttttgagacacagtctcactctgttgcccaggctggagtgaggtggtgcaatctcagctcactgcaaccttcgcctcccggattcaagtgattctcattcctcagcctcctgagtagctgggactacaggtgcctaccaccacacccagctaattttttgtatttttagtagagataggatttcaccatgttggccaggctggtcttgaactcctgtcctcaagtgatccgcccgccttggcctcccaaagtgctggaattataggcatgagtcagcatacttagccaccatttactcttattttttagcaaatatagttgtttttctgtagttcagaaaactcactggttgccttactttctgcagcttaaacagagagaaaataaggtttaaaagtgcagggctatttgtgttccctgttagagacagtgtatattgtttgtaaagggaatcgattttatctcaagaaaaatgagaaacaatagcagagacttcctctgtctcagataaaagaatgcctccttatgaaaggatccagggataggttgagtatttcttctgaaagaccaggagcaaactgtgtctttttagacctctgatgttctttggagatatagcccaaggtgttttaaatgctcacgtttataattatcacctcaacttctcctgagctccctttctactgcagtaaaatggagatgatcatttttagcccccagagttgccacggagagcgttacctgaggttgtggcctgggtgggcaaaggtgggtccgccctgtccatgcgggcagtcagactcactccgcagccctctctgtcccataggacagccttgcacaggtcagagctgcgcttcagtgacatgaccaggtcctcactcgggaaccttcagaggactccgccctgccaattatacattccccagaggccaggagtcgccttatctgttctcatcctctagtttattttctgaacaaagaaataagatggaaactgtgactgttgattttataaatccttgctgggtacagaaggaagacacaatcactcgtctaattgtcttcagcacacaaatcctgaatgcattttgacttcataaactacaagtaaattagctatacagagttcgcctgttgcctcacacttggtatctaacgcagctgtaaatttccttctttctgtctgtttgtgtcatgcccgttcctgttgtgtcagagattgcaggctgtttcctttaaagagcttggccagacaggggctcgaagttaatttcctgctagcacagcagtctgctctgagcagtcaagggtggaaatctccatgaaagtcctgccaactgcagacctcccagtatggaggaggtggtcacagagctgaccaccttttatgggatattgagggagcgttccataccacacagcaatgcagatcattgaacagttcatggtttcttccccagcaagacctctttcttgtttgaaaatgctaataaaagtggtataaatgcttcccttttgtaggagcatagggcatttgctgtacaaagaagatgtctttctatttttgaaaatcggaaagcgtaacctgagacattaatcaactcagagggaactgcattttataaatcactgttaacttacctaaagtttgacatgcaatactttaaataccaagatgagaatcatttagaatcatgggacttcctttgaattccactgatgatgccattggttcttgagttgagagcaggcacttcttttccagctgtagaagaattacagccaaacaattacagtggaattatagctgccagtgacttatgaaaatatgtgtcaagctataacacatccaaaagccccatcagaacctcattcctaggtagaaaaaagactggaagaaaatatgctcagatgttcagaacagtgaaaagcctctgggttttagaattgtgggtgattttttttctccttatattttctaggctttgcaaatgttctacaccatcacttttatattatacaataatatttttaaagcccatatccttccttaaaaaggctttgtgtaacacctgtaacagaaagaggagactggcagaatggcaatagccaagctaaggaaaactcttcttgcttgccttgggtggttcccaagatacgaagatacattcgtgtggctcgttggatttttctgacacttgggccatagggaagtcacagtaggcttttctggggaccttcattaagtctgtaagggtaggaaggcaggattccttgtctaaattcagatggattggtagaggtgcgagcctggaggcaaaactgtcaaataagtggtatgtgtcagagtatgcctgccctcactcttatcctttgtccctttcttgttagcatctagtgtcaaccagttctataataggtattgcagaaagttcaatattagcttagaaagtttaaacgtttcttcccttctgggaatatttatgttttaacataagactctgaagcacagctggaggtatgcgtccaaggcttctgctccaagactgcttagctctctctgccacaaagacacgcccagtattttcagagggaagaagtaagaaacgaaggcttggcatcttgaagtgttaaatctggaaagacctctatatcacggtagccttcatttcacagacaggaaacaggcctgaaagagcagcaaataactcggccagagtttcacagtacatagcagacctcagtcttgaactcatgtcctcagcctatctctaaccagataaatattcctgaaacatgccttaaaataaaatttgaaaatcttttttgagataaaattcacatcctatacaattcacccgtttaaaatgcatggttcaatagcttttggtatattcacggaattgtgtaaccatcaccacaattaattttagagcattttcatcgccccaaaccttgtacctctaagccatcactccctatgcccccagccataggcaacccctaatctactttctgtctctattagattatggatttctctattctggacattttatatcaggagactcatacaatatcggttcctttgtgactgacttctttcacatagcctaatgtttccaaggttcttctgtgttgtagcatgtatcaatactttatttttcttgctggataatattctattataaaaatatatcacattttctttatccatttatcagttgataacatttgggttatttccactttttgacttatgaataatgctgccatgaacattcatatacaagtttttgtgtggacatatgttaaatttctcttgggtgtatatgtaggagtggaatttctaggtcatatgagaactttatgtttagcttttgaagaactgctaaacgttccagagcactgccccattttacattcccaccagcggtgcataagatcccagtttctccatatcctcaccaacatttatctgtctttttcactatagtcatcctagtggttgtacagtggtatctcatcgtgtttttaacacagcctttttaaaaacatatgtgctaggccaggcacgatggctcacgcctgtaatcccagcactttgggaggccgaggcagatggatcacctgaggtcacgagttcgagacagcctggccaacatggtgaaaccctgtctctactgaaaatacaaaaattagctgggcgtggtggcacacgcctgtaatcccagctacttggcaggctgagacaggagaatcgcttgaaccaaagaggcggaggttgcagtgagccaagatcgcaccactgcactgcagcttgggcaacagagtaagactccatctcaaaaaacaaagcaaaacatatgtgctgagaaaccttcagcagttacacactgcatttgtaaggtcttaactctttagtttggtacgctagtccttgtaagatttccacagtcttcacatcttttctgccagccgcctctttgggaacccagcacacaagacaaccagatctcctgactgccttccctccccagtttcacaagactagaatcccttctgcctgcctagctgttcttgaaatttcatttggatagcaaagaattcagaaggggtgaggaattggggtttccagagcaaaactggaaatggacgagtggcctcttctaaggctggggccaggaatgaccttgtatcgccaaaggggtggcagggctgccagaacgtgcagttaaaggttccggggctcagccacttcctcccgtagctatgcatggcaagtgataagaggacagccctgctgtggactcagcaaagccagagcaggaaatgagacctaggttccaactctaaatgtttactttctttttcctttgctctccttcctcagcagattagttgaggtatgtttcagcctgacctaaagttttttcttatacttttagaagaaacccacttaatatactaacttgtaatagacgccagtcactttttttttttttttttttttttttaagagagatgtctctcttgcgtgatctcaaagtttctggtaacactttggtttctatggaattgctggaattcactgctatcatgtgcacctctattcatctaaaccattgttttgaaaatcctttacttaaatgctcccttcttgaatccccttataaataaaaacagcttatgttggttcagtggtttgatgggctgtttactcttccggaatattattgaagcatcttaaatccaaaatgtcctctttatttagtttgtctcaatgtctaggcacaccatcttgactgcagacgcagacctcaaataaacttcctcctcgggaggtacccatttcccttatcaaggcagggcatttggctcagaaattgctcggtttctttttttttttttcttaagacagaacctcactctcacccaggctggagtgcagtggcactatcttcactcactgcagcctccacctccaggtttaagcaattctcctgcctcagcctcccgagtagctgggactacaggcacatgcaaccacacctgactaatttttgtatttttaatagagacagggtttcactatgttggccagcccgatctcgaactcctgacctcaggtgacccacctgcctcggcctgccaaagtgctgggatcacaggtgtgggccaccttgcctggcctgaaatttctcagtttctaaataggttcttggcagctcctcttctccaacttgaagttactggccaacagtatataatcatctgcagaaagaccaatatgtactgacttttcactataggaagatttatttcagttttgaggaaatctcttgtaaccctagaggataatggaattggaagaaaagtagatgctgtttcagagtcctggggtaaaatgtaaaaatgagcaatatatacacacacacacacacacacatatatatatatttttttttttttgagacggggtctcactctgtagcccaggctggagtgcagtggcacgatctccactcactgcaacctttgcctcctgggttcaagcgattctcctgcctcagcctcccaagtagctgggactataggcacgcaccaccatgcccagctatttgtatttttagtagagatggggtttcaccatgttggccaggcttgtctggaactcctgacctcaagtgatccgcccgcctcaaagtgctggaattacaggcatgagccactgtgcccggcaagtctcattgtttcactgtagcaaggacgcagccagtgttaaatcaggaggtcttcccctgtgaagttgctttattggaagccttaatcagaagaatcatcagcggaaagcagttgtctgcaaagccattcctccccttgccagtaggtggcactgtagctgtactgttttcagatgccctctccagccgtgcaatctctcccttggccccaggcttctcatgttctgtttcttctttgccaggtctatgtgctctctctatcaaccattccaattcttacctggcctatcctggaagcctgacttcaggggagattgtgctttatgatggaaactccctggtaagttgacggtgacctggctgagccaacccacctgccttggctgtgtggtcatggaaggagatagataaggacgccctgccgtcgggggctggaggcggtgggagtaagcaatactggggagttgttcaagagaaggtgatactatttcccctcgggcttgctgtgagtcaacctcaccataagccagctggccaggccaagttagacatctgcagcataatgaaaaccacttgccagcagggggccagttgtctccctgaatgtgtcaccctgtcccatgccacagcctgagacagtgtgcaggtgtttcatattccctgccctctggtctctgaggcatccctgagcgggacaagattgctgtgggaagttgcctaaagatgcgtgcagggcgcgcctgcgacggcatcacactgcatcaggtgctccgttcgtggccaccttcccaagggcaggaaaagggatggaaatggagtggcccttgaagccaaatcttgattcaccagaaaatgacacacagcttacatgcagatggcctgggggacagaggaagagacagggagctggacaaaggagggagaaaggagaaaagaggaaggggagggaggtgaaatccatcttccctcctccgcagcatctgtatccatttttccttttcaccaacagaaaacagtctgcactattgctgcccatgagggaacactagctgccatcaccttcaatgcctcaggctccaaactagcaagtgcgtctgaaaaagtgagtccactcccaccaacacctctgtctgggtttcgctggatggctcctgccgtgcgcagggatgggattgaacaaacctggtgacatgaagactgactggtctctgggcccactcagaatttgtttcagagggagaatttctggcctctgcatgtgtggtatattcatgcatttgttaattcaataggccaggggcctgcaatatgcaagatacaagacactttgcatgaaaactcgtggtcttatgaagaaatgtacgtgtacatcagccgtagagacggacaaatgctacaccttataaacacagtacagtgcaaaccaaatgctttactttgctatttagagaaattgatgtcttctgcctggaataatcagagaaagtgatccaattgaattttttttttttttttgaggtggagtctagctctgtcgcccaggctggagtgcaatggcgcaatctcggctcactgcaacctccgcctcccaggtttaagtgattctcctgcctcagcctcccgagtagctgagattacaggcacatgctgccacgcctggctaattttttgtattttagtggagacggggtttcacttcactgtgttgcccaggctggtcttgaattcctgagctcaggcaatccacccgccttggcctcccaaagtgctaggattacaggcgtgagccaccacacccggcctcaaattgaaattctaagaaaccagagcagttgggtgaacacacacatgcacacacacatacacgcagagccttgggcacaggtggaagggaaaaggtagacagagggtgtttataacattttccaagaattgttgatatggcacataaataaacatgcctctatgctcaacgtggtgttcttcctcctcagagacagatgttcaaaaccaataaaacaaactcctctctaaagggacatctctgtgtaaagccactaatggttatgaaatgtccacctgctttcttttccagggcacagtcatccgggtgttctctgtccctgatgggcaaaagctctatgagttccggagagggatgaaaaggtctgtgttcaatgtcaaacccattttaaagtccccgcagaagtcccgcagggaccgctggcagctgtctagggagaggacagagagtggctctgtgccctccactcacctggaggaagtgtaactactctcccaggtaattgactcccaggctttacttagggctcagcaaaactgaaagccgagatgctgttttaacacagttcagccgtgagagtccctttttgatgtgtgtgtgggcggccggcacaggagaaatgagagagccagggagtcacaatccaaaaataatttctgatttccttccatggaaataaaggacgatgtaaagtgtgactgtttgggatcttatcggatgtaggtttgcagccagatcagtgcacagagcaactggaagattccaagatgccaggaaggcacagttcctcccttctgctgacagaggcagggctataccttgtttcttctcacataaataagactatgggccgggcgcggtggctcacgtctgtaatcccagcactctgggaggccaaggcaggcagatcacctgaggaccagcctggccaacatggtgaaacaccgtctctactaaaaatacaaaaattagctgggtgtggtggtgtgtgcctgtaatcccagctacttgggaggctgaggcaggagaatcgcttgaacccaggaggtagaggttgcagtgagttgagatcaagccaccgtactccagcctgggcaacagagcgagagactctgtctcaaaaaaaaaaaaaaaaaaaaaaaaaaaaaaaaaaaaaactatgaccctttgtgaatctttctgacattaatttctaaatatgagcaccacagtgtttaagggatctgggtctacctaggctcttcaggatacatctgattttcttataaagctgatctctgagttataaggccataactcccatttctcttgctcactgacccatgtgttgctgtgcttgtaggtatgtgacaatcagctctctagtgttcagtatggattcacaattcctctgcgcctccagtaacaccgagacggtacacatcttcaagctggaacaggtcaccaacaggcaagtactccgcggggcaccaaatgctcattaaacgaaaggagtcaggcctaggctcttctactggcatgaatgatctcttttctttctgaacacccaatcttggcttcacttgggacttcacctaagtgatggagtgtgtgttagcaaaactttggaggcatgatgcacaaaagcaaaaaactgggagccacccacgtgagttcacgtcctggctctgcctcttaggagcccagagatcccgggaagataatttagatctgtgtccttcagtttcctcatctgcaaaatgaacataacagtagtattaaatgagtctgcagatctaaagtgttcagcatcgtgcctggcacataggaagcactaagaagtgttagctgatatagctgtaaatataacaatatatttatttatcattgttgccagcagcaccactgagcgcttgggaagcacctgcaatttctcagggcttaagaagctgtctgaaaagtgaaagaaaagcctaaaaaatggataaaatctctagggaaagagtaaaaagaacttcagggcagacaatgagctttgagttacacctgtgcagaatgggggttggaaaattctggaaagatggaggagtgagaaaggagcagcccccagtgtttcataccccacggtggggggcaaggattctagagaaagagcgctttgaaaacgttaccccaacctgcagagaaaggcaggatcaggacagaaagcctactgtatctggggagttggttgctggtacccttggatggagtttcagaagaggaaggtgtagaggctgggcaccatatcacgctgatacatgctaacacatacgtaacagaggccgggcaccttatcacgctgatacatgctaacacatacatgacagaggccgggcaccttatcaatgctgacacatgcggacctcatgatccacccgcctcaacctcccaaagtgctgggactataggcaaacagccacatttatgatttcacagttctgcagcccagaatggcaggactgggtcttcttctcagcatgacacaaggctgaaagagaggtgccaagatttctctgacttgcccttctgccatctttttctgccaccagttggagaaagctatttttaaaggcatgtgtgattaaagcaagcccacgctgcctgaggtcacctgagccatgtcacatatcacagccatgggactgacgtcccctcatctctagaatccttgtctccccccacccccagtggtgtatgaaacactgggggcggctcccttctcgctccttcatctttccagaactttccaacccccaatctgcacaggtgtaacccaaagctcattgtttgtcctgaggttctttttactctttccctggagattatatccactttttaggattttctttcacttttcagacagcttcttaagccctgatcttttttggagccttaattcatcatctgttgtcatgggtttgagcactagagggcggctgagctgttaagatgccgttcaaccccaaggttccacgagtgagtgatcgcaattgctgctgcagccccgcctccactggggattattatcagagattgattttccactccaggctctcccgtttctgtctgtgagcacaggtgaccaggagcagaacctccaagctgttctgggttctccgctcaacctgtccacgggtgttcatatgtccccggcggttacggctcacacgtgcctcttcagccctgcttcgctggccagggcccttgaacgtgtctttagcacctcgtgctggtccagccgttactcttacatttggtctgactttccagtctctttcaaccaataccagtccatcctatatcatcttgctgattaatcttctgaaaatgtccctttgaacatgacacctcctcctcagacacctttattcccctttgaccttgggaatgaagtcccagctcctcccgtccccctgagtcagacctgctgcagagcccagcagccaccacccccagaacctcctcatttcctccagccacagagacaccatcccataaaacagtatgcgccacgtgccgggctccatgctcagtccccagcatccttagttctcccagcaaccctgtcagggaggttgtgatgatgattcctgtttcccaaatgaggaaatctggacacggaaacgttaaggaacctcatccgcctctcccttcctctgtggtcctggactagctcctgcctggaccatctgtgcagcaccgcatattaactgctcacgtggtttttctttgtatacacccgtgctctctcaatctggaatgcagggtctggatcgtacacctctttgtaaaccccagcccggagcacagggctgtgggacagacagtacaaggatgtctcaggatgcttcggatcacagaaccctagcagtgcacctagcatagtcactttcagatgagaacatgaaggcccagagaggtttgtccaaagaccccctagcccattggtagcatagtaaagaatacctcccagagctctgagctgcagggcgagcttcccaccaggacctaatcctgcagacaagcagcctctcagcagttgcctgctcctgggaactcatatggcaaccttggttctcaatgtgccaccctctgtgtggggcagagctgggggttgtctctcaccaacagaacagtcaccccctttgtctggcagaggccttgggatgaagttccatgactgtaggcgacatcccaggtccctttgcatgatctccatcattacacatgctgggtacctgggtgactccagggttatctacaatcaaacaccacccaaagtgtcttgcccggaggtttgctacccactcagtctggctcaggaggccttcacgttgagatctgtctgttcttccatgagcccggcacagtcccaagcttatttaatggtacctggatatcaagtccatctcactctctaccctaactctcttctggaaatctaggaatcagactagtcatcagataagccttctttaataggggaaagcagtagcattgggaaccttttaacagctttacaatggctcttctgaagaacaaacaagcccttgatgctctttagttattgccagaataatacgtcctggattgttctcagtgggcagaacattatgctaaggcacagtctctccctgctgcggggagtgtggctaatgacgcttgggtgtggagattcctgggtgcgtgtggggcctgcagcccagtcccatcgttgcctgtgcattactccctagtcgaccagaagagccttcgacctggagtggctacatgggaaagatgtttatggctgctaccaactacctccctacccaggtgtcagacatgatgcatcaggacagggcttttgccactgcacgcttgaacttctccggacagaggaacatctgtaccctctcaacgtacgtacaatgacacccactctgaacaagaccacactttcgtcaatgtatttttccaaagcacaaaaatccccaaacctgaaaagaaaaaaagaaaacttgccccaggctgggcacggtggcttacatctgtaatcccggaaccttgggaggccaaggcaggcagatcatctgaggtcaggagtttgagaccagcctggccaacgtggtgaaatcccgtctctactaaaaatacaaaaattagccgggtatggtggtgcgtgcctgtagtcccagctacttgggaggttggggcaggagaatcgcttgaacccaggaggcggaggttgcagtgagccgagatcatgccactgcactccagcctgggcgacagagcaagactccatctcaaaaaagaaaaagaaaacttgccccaaaggaagggtgagcggaatcaaacccctgcttttcctatctgacttcaatacggattctcagggggcagccagaagttggcatgggaattttagccttctggttataatgacactgtcttaaaaacaattcttatttttatgtaattatgtaaaaagcctccagatctgttttctaggttcggactcctatggggctgacagatgttttaagaagtttaaaggagtttattcaaaagttgaacatttttaaaatttcacaaaactaaccagcaaagacagtaagccaatcctccatttaccccctttctgtcttggttaagggcagagacacatgtcagagggagactgcgtcccatgtagggagctaatgtgttcactagctattgcttctcgcagggtcgcagcatctacactcacttgcctcatccacactgtcacgttcaaagacaagaaataatcctgaaagtagatcccaaggccagaatgcaaaggaatagccagaagcccagaccagatcagtgggctaagggtttgtcaaaggcagaatctggtgacagctagggtgaggggggctttgtcattggaagcgaatccatcgcccatcttcgttgtcatcacggtttatgttttccttggcccttaggatccagaagttgccacggctgctagttgcgtcatccagtggacacctttatatgtacaatttggatcctcaggatggaggagagtgtgtcttaatcaaaacccacaggtgaagagactgcttttcaaaagacagcctttcgagagctggtcgtgtagagttgtcccttcgccaagaacgacaagcttcagtgcccttgcattgatttgttcttcactggcagtctcagtggcaaacctctagtgggcaagtgctctgcaccgggctctgtgtcaggtgccctcagcatgtggtaatcatctggaaaagtgccaggattaataacacacaagatggtctccccctcagcctatgctcctaacacagccctgagctcacagtgggtgttcaaaaatattccctgccaccaggtgtggcggctcacacctgtaatcccggcactttgggaggccgaagcgggtggatggcttgagtccaggtgttcaagaccagcctgggcaacatggtgaaaccccatctataccaaaaacaaatacaaaaattagccggttgtggtggcacacacctgtagtcccagctactcaggaggctgaggtgggagaatcacctgagcctggagaggttgaggcagtgagccatgatcacaccattgcactccagcctggacaacagagtgagaccctgtctcaaaataaaaaaaaaaaaaaacctattccctgcatggaattgaaaagtgctctaccagtcatgttgactcacgcctgtaatcccaatactttgggaggccaaggagggcggatggcttgagctcaggagtttgagaccagcctgagaaacatggtgaaaccccatccttacaaaaagaaaaaatataaaaattagccaggcatggtggtacatgccttgtagtcccagctacttgggaggcagaggtggggggatcacctgagcccaggaaggtcaagactgcagtaagctgtggtcacaccactgcactgcagcctgggcaacagagtgagaccctgtctcaaaaaagaaaagaaaacaaaagaaaagcactcatgccttctgtgaacaggcacagactgagctctcctgctgtggccagggcaccagagctgccaccgccccccaccgatggctgctctccttgctagcatgtcctcacctgtgtgtactgggaagagcagaggactaatctttgtctagccaatgtaagagaaagaggccattttgacggtgtgtgactgcccctggcagttgcaggtcacttcagctcatcctggcccagcagcgtgtgggtaggtctacaatttaaacccacagagttggcgggcggatcacctgaggtcaggagttcgagaccagcctggccaacatggtgaaacccagtctctactaaaaatacaaaaattagccaggcgctgtggtgggtgcctgtagtcgcagctactcgggaggctgaggcaggagaatcgcttgaacccaggaggcggaggttgcagtgagccgagattgcgccactgcactccagcctgggcaatagagcaagaccctgcctcaaaaataaataaataacccacagagctgagcacaggcttcttcatgcttttcctttggaaggtgtcctagatatatgatgatttcttttttctttcacctcctcttgattgtcacaagtagcttgcttggctcaggaacaacagaagagaataaagaaaatgacctcagaccttccttacctcagtcttatgcagcgaccgtagccagaccaagtgcatcttcagcctccacggtgccaggtgggtggacacggggccaacaggggagcatctccaacagtgacctccctccccttctccctgcacgctccctccccttcccccttcactgttacctgggggtggagtgccctccctccccttcccccttcactgttacctgggggtggagtgctctccttgaattttttattttctcacaggtgaggccatggtaatagcctttaaacctgggaccctcaacctggcaaggcatcacacgatacggtctttttcctaacaagtggtgttaaccctttgcctcttcaaaaattccaatgaggccaggcacattggctcacacctgtaatcccagcactttgggaggctgaggccagcggatcactggaggccaggggtttgagaccagcctagccaacatggtgaaaccccatctctacttaaaaaatagaaaaattagctgggcatgttggcacacacttgcaatcccagctactccggaggctgaggcaggagaattgcttgaaccagagaggcggagattgcagtgagctgagatcataccactgcactccagcctgggtgaaagagtgagactctgtttcaaaaaataaaaactaaactaaaatttccaaagagcctgtagtcctagccactcaggaagttaaattgaggcagaaggatcccttaggctcaggagttcgagaccagcctgggcaacatactgagaccctacctcaacaaagaaaaattcaaagaggtaggatgcctcaggcatctgaagtggaaaggcaggtcaggcttaaagatggcagatggtgaggattatgacttgtcctaggcacagtacctccagggggaagacagacagcccctttgcttcctttgccctttatttgagcccccgctccccacccgccaggtcatggcataaaagcagatccccagtgcttgtttcatgtctctttcttggtttccaggttattctgaggacggcggggcgctgcgaggagaagttattcctgaacatgagtttgcgacgggaccagtgtgtcttgatgatgagaatgagtttcctcctgtgagcattaggaacccgtaactgggcggctcagtctgtgtgcttagaaggaaaccttcgcctcatacgagaggcagagtccctttccctgttttctaatctataacaactaattctctgctctagtatttggaaagccataggatatttgttgtactgtgtgcttcgaatcctacagagtaggctttaggtgtcgagctaaaccctgatggcattagagtcaccgaatactaatccagggagtcttggtggcctccctccagccagaggcctgcgatcccttactttgcttctgtagcactgactttgctgcctggaaggtaggaacacgtgacttgtctaaaacttattttcctgaggctcccatggatgcgtttgcagaatgctgccttccttgtgctggaggggatggtttcagagggctgggctgtgtgttcaggactctgagctgagttgctgcactctgtgaaccagcttgaccctcacttacctgcagctctggccggcagacccgcacctccccagcagttgcagacactcattaagaaacaagtggccgggtgcggtggctcacacctgtaatcccagcactttgggaggccgaggctggaggattgcttgagcccaggagttagagaccagcctgggcaacacagcaaaaccccatctccaccaaaaaaaaaaaaaaaaaagaaaagaaaaaattagccgggtgtggtgtcacgtgcctgtagtcccagctattcgggacgctgagatgggaggatcacctgagcctgggaggtcgaggctgcagtgagctctgattgtgccactgcactccagcctaggtgaaagagtgagactctatctcaaaaagaaaagaaaagcaattgtgtgctctgtggagggcagcaggtgcagggcaggagcttgcccgagcacctttagctgggtttcccagcaacctgctcagcctgttcccacagctagggccctcggggctggctgagtgctgggcgtggcttcttccatcacctggaactgaagacaagattccctcctgagagcctgctggggcttccttaactgctgattcttcaggctcccatctggagtaacatatagaccgctcttgtgagcttcagtcaaaacatcccagatagtcaacctgaaatcatttcgagatggaagtactgatttgttttgttttgtttttgagacggagtcttgctctgtcacccaggctggagtgcagtggtgtgatctcggctcgctgcagcctctgcctcctgggttcaagcaattctcctgcctcagcctcccgagtagctgcaattacagatgtgcgccaccatgcccaactaatattttgtatttttagtagagacggggtttcaccatgttggtcacgctggtctcaaactcctgacctcaagtgatccactcgtctcggcctcccaaagtgctaggattacaggcgtgaaccgccgcacccggccggaagtagtgtttgggccaagacttggagcatcagctcctagagccagagaggagctgccacttgggcactgaaacaatgtccattaggctttgttatggaaacttctcctgatcattgttttgtgtccattgagcttccaattgtaaaaggatggagtgcaggtctggcttctttctcccgcagatccgtggaaccctctagtgagcacatttggcttagaaaacaaagctgcggtggggccctgcatgcagggctggggctgttgttttgtgatttcccacatcggctctgcgggtcggtcgcagcgtgagcttttacatttctggctttcaataggcaggttgtcagagacgtggctggcaagtgaagtttatatctcagtggcggagagcagttgttcttaaaaatactaattataaacttcaaaacctctgttggcatgctgcctaactataaaccagttgttttacctttgggttctcatggccccaactggccttaaagggcgttcttctgcaccctcaagaggcggtggttatttacctgaagtcgaggcttccaggatccagagcactctaggtcagacaccgtggggacaaatgtgaccattctactctgtcagggtttaccacatccagacactcactaggttccgtttcactaattttggtaaaagtctgtaactactataaaatattattagattcttaattgtaatcgcagtaagccttgcaacctcttatagttacagaattggggtaatgtggatattagtatctaggaggtagttccttgccaaagaacctgtataaaataataggtaccttgtgcagatcatttatttggggtaaaaaggaaaaggggaggtgcttaattgaagaaccagtaagaaagtttgtcctgaggcctgtgtgcccattcagtgccaggaagctgggcatgagccagttgtttcttctccctcctaaggaccaaatgagtgaaagttggttgaaattgcatcaggaattcttatttatacgcaagaaatacttcctgccagtgagagtggtcactgaacaaggtccctagaacaggtgttagacccttgtgagtgtcaagcagcccctgtgtgcagggctgtgtcgtggcagccaccaacctctcagtctgccctccagcctgcaggtagatggtgatgaggggcagtgctcccactaaggcactgtctcagtagcaggcaggcttctccatctcaccatgtaaggaccagaggcatgcatgctcctgggatgctctatcaatatggcccatctcagtcatgcctgaattggcagaaatgttcagcgagggatgctagggaacttcctctctgtctccttattctgaattgtcatgcctattgcaaatctctgtgcagaattcacatctttactcacattccttaaaatcttctaggaccacaaaaggctcttggagtctcagcttggttaaaatcgcctctcttgtagtgacgaacaaacataggcttgcctgagtagtctgctacaggagctctgtgagccgctgccttaagaacgcgggtcatcactagtgatcttttcagaacacatactgacacttccctgcgtaggatcacgcttgcctccttgggatttacttttgctctgagagcagtgaaagaaaagagacttgatcatttctggtgccttagaaagctgctacattcgggaggatgagaagcttttgtttcaggaacaagccaacctgtacaagtctctgtattttgtgagactagtcccaatcttgtgagcaagagtcaggaaatcaggcccaagggtataaactgaccttcccttttttttttttttttttttttttgagatgatagagtctcactctgtccctcaggctagaatgtgttggcgtgatctccactcactgcaacctccacctcctaggttcaagtgattctagtgcctcagcctcccaagtagctggggtttcaggcatgctaccatgcccagctaaattttgtatttttagtagagacaggatttcaccatgttggccaggctggtctcaaactcctgacctcaggtgatcacccccctcagcctcctaaagtgctgggattacaggtgtgagccactgcgcccagcctaaactgacttttttttttttgagatggagtcttgctccatcgcccaggctggagtgcagtggtgcgatctcggctcactgcagcctccacctccccggttcaagcgattctctcctgcctcagcctcccgagtagctgggattacaggtgagcgccaccatgcccggctaatttttgtattttttagtagcgatggggtttcaccatgttggccaggctggtctcaaactcctgacctagtgatccacccacctcagcctcccaaagttctgggattacaggcgtgagccaccgcgcccagcctaaactgactttttaatagtgattgagcagtccatgtttacaagtaagatgagccttttaaaaatatatacatatacatataaatacatacacacacacacagagacatttttatagtcagtattttctagaactgtgtcatacttgtctacacctaaataagctgggtgaccattctgtggccatgagcgagttcagacagaaaaattccacagtgcccagcctctccctgctcactctgcatgggcacagacctgttgataatgcacctgcctaccagcctcttcctgagaagagtaaggccattctgttttgattttggtagataatcttgtgccgtggaaatcagaagggcaaaacgaagcagtcatgatgagaagcacacctcagaaatcaggacatcccccctatcaggtggttttggagaaaacaaggaaggcggaagaatggagtgcaattgtgtgagcagaaaggggggcaggaatcccgggtgctccactgcttaaaccacaggacctggttaactcctcaccaagcttcccacgaccctggttgccaatgggcgcgggagacattgtatacacatcatgctatttaaaatacgttcaaactatagtgtaaatgctaattaaccatattggtatataaccggaattttatattaaaaggggcctcctttttaaatatatgccgtgtaaaaaatgtacttataggaacatctctttgaattgtatttcttgtatattacatacttagagagagactcttttagccaggcaaagtcttttttggctgtggctggaataaatcatttattacttgggagtcccattttg

SEQ ID NO: 15882 - DNA, 36191 bp, Homo sapiens
cccgtggagccggcgcgggcgggctgctgaggtggctgtcgccggctccgagctgcggcttcccgggccgagcccccgatggaggccgaggccgcggacgctcccccgggcggggttgagtcggcgctcagctgcttctctttcaaccaggactgcacgtaagctgcgactcggcccctgccagggaggtgggggacagagtgtcaggacccaggggtgtcgtcctgagagcagcttgtggcttccgcctcgaggcggcctcggcgggagggccggtgtctgcttcggacgcattgggatcttgttatccccgtaccccttcagtggggtttgccgcaccccccaccccaccccactcccagtgtcctcccagagcgacaaggttgggccaagggtgaaagcagggagttcgcaaagggagtggtggggctgcgggggccacggaatatggggggagcagggcggtgggaaagccagtgaccaaagtgggtgtctggggaagagagacagtggccaaaagaaagagatgagaaaggagaggaagttgcaagttgacccaggactctgtagttggggcccaggaagatgagagtacaggaaaaactttcccatttgtccttgagcatctcaacgtggcatctgggcagggcctcggacaaagaggcagcctatccctgcggccaggccagcccctgtcccatccccgacgcagggcatcgtgcctgcccgctctggatggaagaaacctttggatttctttggctgttttcacatcgcccacccagccaggcaggatctccttctcggagtccaagactcttttcccgggcgcagactgctttctctccaggaaacaggagctccaccctgttgtttttgagtggatttttaatgttttacttcgatgttcacatttgggctttgagagggagctgggctgaagtgtgtttcaggcatctgcaggattctgtgacttacaggcaaacgcctgtttctttccctattttcatggaagcgagccctggggaccatatggaatcatctttttggaatgtgcaccctgagcatcaggcggggatgaccgattcccagtttcccacttcctgctgtaccagtttctgtgccttggctgctggtgactgagctacgctaatattgatccttcagtggtgtaattaaggccattatgtaccattagccaccctggcttccattccctttatgtttctgtttaaaaacacccggtgctgaacaatatgcctttgtttgaaaaacccatatgtgtaatcatgtaatcgagtagctctacagcttggttatttgagtgactttcaagtttttcttgaccacaatccacaatacgaaatatgtattgcaacatcacccaatacccataacacatacactattcacaaaatatcatgtgcaattttctgtgtcctttttttctaagctgcttgtgactcactgaattgcgttttaggatccactcatgagttgagacctgcagtttataaaaatgctggtatagataaaatcctgatgttctgtaagaaacattttgcaagagggcatggctgttgaaatgcctgggtgatgttttccttcccaattgaacacaagttaagaaagggggttagtttgcttgtaagtagtaaatgttctaaattctgctttgtaacatcattagatttgacaaaaaagggtgttaatttatactctagccattaaataacgcaaagtcccagctttctacagaaattgaataagaatgttattttcaaaacggtagggtgctttgaaagttaatttccttactccctactgttagttttattttcttggatggaagctctgctgggcagctttgccttgcctataaataaaagttcttgtcacagtcagttgctttgagccacagagggtatgacattggattttaaaataagtcaagccccttactgaatacatttaggtgtattgccatgtctttttctataaatgtaggctgaatttgggatccagtatttccaaagaaggtaggtgaaaacagcaaacccttaccagtcccctacgctcatacttcgtgattggtacttgtgctatacactttgggtactttttttttttttttttttgagacagtcttgctctgtcacccaggctggagtgcagtggtgtggtcttggctcagtgcagcctctgcctcccagggttcaagcgattctcctgtctcagcctctcaagtagctaggattacaaacgtgtaccaccacactcagctaattttttgtatttttagtagagacggggttttgccacattgcccagcttggtcttgaactcctgacctcaagtgatccacccacctcagcctcccaaaatgctgggattacagatgtgacacactatgcccagcctactttgggtacattttaaatttgattaatgataaatatttgtcccaagctctgtttccatgagtggtgattagaattttgtttctacagaaagactttatggatgaaataaggtctaagtctaaattccttgattcagagtcttttgtggccattgatcaatcacgtaaaacatcacataaaacatcactctgtgattttctcatatgtagaattcttctggtccaggagcagggcttatgtttgaaaattactttaaattgctgtcactttgcattaatgttataagactctagttacagtatttctttccttacttgcaaactttacaaacctcatttcgcagccaaacacatctatatttatgtgaaaaagtttatgtgaagaaagtttaaaaacaataacactacaaaatacattttgaagttttaagatgctctgggcttacttttccagttgctgtttgtcatcatgaatacctcagtctaggtactaaatgccagttctaagtgcacagctgcaaatgtctaacccaccagtttagctacttagcaggttggagggctgcgagacgtcaccagctaccttgtggattaaaagtttactgtagttgccctatccctgtgtcccagggaagaacaaatgtctgggtagggaaaaaaaattccagggaaaatcatgtgaccttctcttttttaggctagtgaaacaagagccttggccatccaggcttgtaatagtaagttgcttattttagtatatgcttccctgtaaagagtgaatttcaccttgccttccagagaagcacacttctgtgagtgtgctccgggtcagattctgttcatcacttaggtgcggagggcacagctggaaagagctgggtgaggattcccagctgctgaacaaagttgactttgatgtttactttcaacacaaggccaagaaaatctggattcacgtcctgtctttatctcctcattgaaaaatgaaaaattaagagaaccagattttttttaagaggcactttgattgtcctagataaatgtttagtttgtattttgtttgttggttgtgatgattgctttgtaggatatagtagaaagcagagttctccaacttgggctgctcattagaatacttgaacttcaaatccaattaaacttcccagctgagtttaatatacatccaggtgtgagagctactagtatgaagtatcaggacatttttctggaaactgatgaaaggaagcatctattaaattttacctactaatgacctactatgcctactttgaaagtgtatttcttagaccaggcatggtggctgatgcctaagcactttgggaggccgaggcaggtggattacttgaggccaggagttcaagaccagcctagtcaacatggtgaaaccctgtctctactaaaaatacaaaaattagcctggcgtggtggtgcatgcctgtaatcctcactgctcgggaggctgaggcaggagaattgcttgaacccaggaggcggaggttggagtgagctgtgatggcaccactgcactccagcccgggtgacagagcgagactccctctcaaaaaaaaaaaaaaaaaggaaaagaaaagcaaagcatgtttcttcttataagcaacaaacaaataaagttatgaaggaaagaaaaactgatttatctggtaaagtgcctctcagacaacaagaaggccccctcgttgtgttggaggtagagctttcagctattatgaatattcttaaacattcaatttttcctgttatctgcccagtgggaaaaacatgtctgctagatttgacattttgttggatgacagagctcatgcagtttcatgccccttgatcatttcacttttttttttaagttgcctttgactttttcttcttttcttttgctcttcctgcctgtcaagacatgcgtcaccatttaggaagttaccaaggatctaagctcctgcagatgcttgtttactgtacccctgaggctagggggcaaaaggcatctatttgcagacagatctgttgttagaatacctgtcgttattcccatgctgtcattatcctccacagatccctagcaactggaactaaagccgggtataagctgttttctctgagttctgtggagcagctggatcaagtccacggaagcagtaagtgtgtgtgagagagacctcagggatctgcaggagaaccagagcctccttctaggctttaatctgcggtgctaccaagctgcctatttttcccttccttagccatcaaacttagggagtcaagatttttagatttaaatataaatcgttgccactacttgctttaaaccacaagcacttagatctggcaacagtttaagtaacattttctttttatagaagaaattatttgtgtgaaatcatattattgagactttttcacatgcttatatgcacagtcattaatttttataactgtcaaacctaaaggacacttgtgacattttctttctttctttttttgagatggagtcttgctctatcacccaggctggagtgcagtggcacgatcttggctcactgcaacctccacctcctgggttcaagtgattctcctgcctcagcctcccaagtagatgagattacaggcacatgccaccaaacccagctaatttttgtatttttagtagagacggggtttcaccacgttggccaggctggtctccaactcctgactttgagttatctgcccattttggcctcccaaagtcctgagattacaggcgtgagccacctcacccagccacctgtgacttatttttgccattatattggcaccataagatactgataacattgattcagttttggaagtatttgtttgaagaaggcaacggtatcctatttacatagcccatgtcaatgatgttgaagcatgtctagtgaacactgtaaataattcactagaaatgtgacttccttattttgtcagggtgatggtttatgccatcataatagcgaacaatatacaacctttcagtttcctggaaaaaaagtggttcagtaaataatattttgggctcctactttatttgtaagatgttattgttattacaccatttttgtgaattttttgctctatgtctgtcccacattgttccctgtgggccttttccaagtggaagaaaggcacacatatgaaaagaatgtgctcagaaagataccaaagccgtaacctttgtgctcaggagggtcattaactaacttcttcctgagtacagaagtactttcctcgtcataatactgatgtccagatggttttcagcaggaaagagatccagggagcacagcaagatagggggtggggggagtacagatttaactgtgttactgtcccctcccatattggcacccctctagcaggacaagaagaattctgaagcagaagttcccaactgagaagtcacgcctttgaaatctctcagggaaagggtagatgaaaattgttcaaatattccaaacatgtttgacagagcaaacagtggagccctagggtctggaggggagattctgccactcagacagcatcagaggcagctgtctgcctttgctctgacttgcagtctagtcactagtgttttctttttcttttcttgagacggagtcttgcttgtcgcccaggctggagtgcagtgttgtgatctcggctcactgcaatctcttcctcctgggttcaggtgattctcatgcctcagcctcccgagtagctgagattacaggtgtgcaccaccatacctggctaatttttaaaatatttttagtagagatggggtttcgccatgttggccaggctggtcttgaactcctggcctcaagtgattctcctgcctcagcctcccaaagtgctgggattactaggcgtgagccgccatgccaggccactagtgttttctttactttagatatttggaaaggactctgaaagtgctccctgggagagggtaaaaagccacctggcagggtggggggcatggtggatcactgtcaatgcaagctcagagagggcgcctggccggcaagacccggagaacctttggaacctggcctgcgccgggcccagtgtcatggaggctggaatccttcttggaagtgatcaatccatgtaacctcccggctgcttttcctcccagatgaaatcccggacgtctacatcgtggagcgcctcttctccagcagcctggtggtggtagtcagtcacacaaaaccacggcagatgaacgtgtatcacttcaagaaaggcacagagatctgtaattacagctactccagcaacatcttgtccataaggctgaaccggcaagtaagtggggaaatccctcagggtttcaaagcttctgctaacgggagccaaacaaaaagatggacatctttcaagatcaatgtctgtaaaacaagcttccaattctaatgagaatgttaacactcaggccccgtgtcccgggggtattgtaaacagagtctactccaggtgctggttgtaacgttgttttccctagacctctggctcatgtttccagaacgttggtccctgactggtaggctgcaccctctccctagggtacagattgggcaccgcagggatgggtcagagctctggcttggacagtcccatgagccaccgcaagagcaccttaaatcagaggagcgactcttctggttttgccctagatagtgtcattcattgcagatgttggggcaataccactgagcaggagatgcctgagagtgaagtgggggctccctgggtcaggaaagctgcccttctcccaccacgtcctcagctctcctggaaggtctgctattcagccttgggttctcatttttctttttcccagctaacccttgaagactttttgttttttttgtagcattttctttgttgaaggattattctgatctcaaataggcaatatgttctcttttaaaatataaattcttattcagtaagtattgggggtgttagcagatttccttttgaattgctgggttttcattttgggttgttgtttctgtttttgagacagggtcttgccctattgcccaggctggaatgcagtggcacaatcttggctcactgcagcctccatctcccaggctcaaacaatcctcccacctcaacctcctgagtagctgggactacaggtgggcaccaccacgcccagctaatttttctgtatttttttatattgccagagtgtattcgtctattctcacattactctaaagaactaccggagattgggtaatttataaagaaaataggtttcactgggtcaaggttctgcaggctgtacaggaagcacggcagcatctgcttctggggagggctcagggagctttgattcatggcggaaggcaaagcgggagcaggcgtcttacgtggcaggagcaggaccaagagacgggtggggggtactacccactattaaacaaccaggtctcgtgagaactcactcactctatggtgggggatggtactaaaccattcataagaactctgccaccttcctccaacactgaagattacaattcgacatgagatttggggagggacactgatctgaatcatattacagtgtttccccatgttgcccagtctggtctcaaactcctgggctcaaggatcctccttggcctcgcagagtgctggaattacaggcatgagccaccacgcttggccaaattactgtgaaggcaggcactgtgctggtgtgttcaccattatacgacctggtagaaaaggcagtgcttggtagatacgtgctcataaatatctgtttcctgactgactgttaaataagtaaataaacaaagagattctttatgtgaccatgcagatttatctattcaattaagtattcccagagcggttgctgcattcattgaggacaatgttttcttctgtctttgtctaaactcttaagtactaattaattttttttaacaaatgagacaaataaatgctttttaaatttatgagaaggaagggattgtttctttgaattgatcaactctttcaaatgaaaatccacttaagtccacctaaagcagtgcggtgaaaaatagctggagaaagagaagtgggaccttttaagtagggagtagcaggagtaagaaagaaaagaaacctgcattcttggcaagggagggaaaggcagtttgagagttttctgattgaaggcttttagatgaaattcttgactcaggtgttttcactgaaatctgttggtagcagattaagtttcgctgctaaactttttatccttgcatatagtagtaatccgtatacaaggttaaatgtctgtttttggcacctgatgatctttttaagattgtttaggcaaatgatctgtaaagaccggaaccctcaaatagcgtctattgtatttgcttgtatgatttctctctttctgtctggtatattcattagcaaatgggacaaggaaggcctatttgagtgtccgagtctgttaacctttaggtgccagcctccccttaatataatactcattaactgtgaggttctcctcccccaccttctaaagaacactgatgcaccaggaactgtcagcaattcatggcaaagccacgaaccaagatctaacagttctcggaaccaagatctaacgtcggaaccaagatgagcatcggttcattggaaccaatatctaagagttctcccttcctttacatttcttctccgacaagaatgatttgaaacaggtctgggaagtattgggggtttgcttttcttaaaactttcaggtttgggacttaaattttggtttaagcaactcagctgctgcagcctctcttgccaggtagggattctgtggtgtccgggaggactgcccactctggggaaatgataaaggcccaaggggagtgtgtcctgttctattctgtagcactcagtctgctacttcctcaggccttcagacagcacagtttcttttttgaaaaacaggaaaaagttaaagatttggataaggtgttataaggatccaaaatcccttttatcttttttttttttttttttttttgagatagagtctcactctgttgcccaggctggagtgcagtctcagctcaccacaacctctacctcccgtgttcaagcaattctcctgcctcaccctcccaagtagctgggactacaagcacctgccaccacgcccggctaatgtttttgtatttttagtagagatggggtttcaccatgttagccaggatgttctcgatctcctgacctcgtgatccacccacctcggcctcccaaagtgcagggattacaggtgtgagccaccgcacctggccccaaatcccttttttctaagtatataggaaggaaagggccaagtgtggtcccagcacttcaggaggccgaggcaggaggatcgcttgagcccaggagtttgagtccagcttgggcaatgtaacgagacctagtctttactaggtctttactataaaaataaattagctgggcatggtggcacttgcccgtaggcctagctacttgggaggctgaggcaggaggatcgtttaagcccaagagttgaaggctgcagtgagctatgatcacgctgctgcattccagcctaggtgacacagcaagaccctgtctctataaaaaataaaaatttaaaaatttaaaaaagaagaacacttaggaattgtcatatgtttcatttttagttaatgttatttctcttgtattgaactgaggaaatatattttatggaatcaagacagctgtatgatgtatttagatttgcatacttttacagttcttttgcagtctcctcccaggggcccttgctatccagatggaggctgattggctcgaagcctctgaggccaaatctgtggtgttctagggcagatgctataaatattttgtaattgataaaaggagttattgcttataaaacctagaaaagtagatgaaattcaaagcaacagacaaggagctgagttgaaggcaagaccatggttctgcgggggctgaaaactgatagttaaaaaagcaatcagcagcatcgtgcccaccccagaagcatgctctcacacgaactaagagtgcatcctcgttccctcccagtgttttctctctgtttccctctgcgtttagtcttatctgcagccagcatgagggtgacctgaaattcagctgagtgagccgcagagcagatggtgccatcagagctcttgggaaaaaaatgcagatcagatcagatgggctagatgtagatgctgtttctaggagaggcatatgtcaaggccccgctatcccagggattgggtgtggggctgggaggggacacaagaggatatcagaaacctctgaacagaaggaagcatagaaccacgtagttctaaccacggcatgtgctggcaaaaggcacagtgattggataagtcagagaatatttcacagaggaacactcatatttatcatcaattttgagaacctgttagaatttttttaaccctcagtccccagtctcagacctacgacagagccttaggtaaaactgagaaagggctgggcacagtagctcatgcttgtaatcccagcactttgggaggccgaggcaggaggagctcttgagctcaggaggtagactaacctggacaacatagtgaaacccgggtctctacaaaaaataccaaaaaattagccaggcatggtggcgcacacctgtagtccctgccacccgagaggctggggtgggaaaatggactgagccccagaggttgaggctacagtgatctgtaatcctgccactgcactgcagcctgggtgacagaacgagaccctgtctgaaaaaaaaaaaattgagaaatgtgtttaaattttatttttctgcttggttaacactgatgaccttcatcattctgagccatggatagtcttccttggggaatagcagggcaggcttttcccaggagcagagcctgcctcttttgtgtggtattttttggtaccttcccttctagctgatgttccctggaataaaaggagctggctgagaccagtggttcttgagcctcagtgtgcatcgcaatcacctggtattcgtctaaaaacttcccaaaccagaatctccggggagagcccagggcttgctccttgggcagctccttgggcatccaggtctaagaaacactggcctgaggggagccaagtcaggcatgtgcaggggtggtcggcagctgctcagatgtgcgaggagctgcccaaccagaaatgccttcctgacacctcctcaccagcaccgatgtctgcccttgtactgggctatgcgttatattcctttaaacacccgatacatcaaccctgtggcctgttttcacttagctgagagcacagccattgggaagaggctctgaacctgacaagctttcatgtggagaggaagagaagggtctggcagcagtggggagagcaagcaccagagagaggagcccaggaaggaacagtggggacgtggggcactggggtgttcaaatggggccgaagcccttctccttttccctttgccagggctcagacagcggcccaaaagcaggcctggaggagagtctgagtagaaataagttagagctggtaattattcagagaggggtaaaacctaagatttggtgatggagagaaagcaaagaaacccatttttatataggagggagacctgtgctataaacactgaaaggcagcctgttagatggcagtggaaactacagaaggcacatgaaattgtcttacatggcacagggggtctgatcagaaagtgttcagaagtcctgttgaacgcggtggctcaggcctatcatcccagcactttgggaggccgaggcgggcagatcacctgaggtcgggagttcgagaccagcctgatcaacatggtgaaaccccgtctctactaaaaatacaaaattagccaggtgtggtggtgcatgcatgtaatcccagctactcaggaggctgatgcaggagaattgtttgaaccctggaggcagaggttgcagtgagctgagattgcgccactgcactccagtctgggtgacagagtgagactccttctcaaaaaaaaaaaaaaaaaaaaaaagtgttcaggatccctgttctaaggaaagaaggagaaggaagagagggagggaggaatggagggagggaagaaggaaggagagaagtaaaaacaatcttaatttctaataaaatttcttaagatcttgcattttatgcttgtgttcaggtggatgattacatgtgtatgtgtgtacatccataaacacaatcttcaaaatgcatcatcaaaattctgctttaggcttagaatcaagttaggactcatatgaaagatgaatgatttggatttggtcagggtctttgtaaggaacggttcggtagactgataagtctgtgtgattacagaggctgctggtttgcctagaagagtccatttatattcacaacattaaagacatgaagctgttgaagaccctcctggatattcctgcaaacccaacaggtgagctccaaaaatggaacaaatgtccctgaaatttcatgtcctggtgcttctttcccaagctttattttcctccaaattgcgaacgtgaagcagtgtttgctttttgagtcttagtgaggtttatctcgaagctttgtcttaatggcggcagattcaaattatgtcaggctgtgtgtcctgcaggggggctgtgtgcccttcattgcagtccaagaataacaacaccctttgtctgggacccatatcagcaaatgtgtcaaggcacgtaaggtagacatgtaaaagatttcaagcatctgctgttgaaaagtgtttacccctaattgttttttgtggttcgttcagtacagagtaggcgtgataattagaagcaggtttcaacttggcgtgtctgcatggccagcaaaaagacaatctgaaccataaagaatatgttttattacatgacaaagaaatctctctacttcgacgatatgctaggatattaaaccttactgaattctcgggatttaacactatttaatacattcctggtgtataagaagaggaatggtttggatttgttatattgaaatagcagatgacattatatgaattcatcaagctaggagtaaacaagaaagaattccttcattgtgtggtggggtgaggagtcagcacactggaacaacttgtacatttaatgactccagattaatatttgcagattatatttcagtttggtatcattgaacaactgcttctattatatttcagtttagtatcattgaacaactgcttctatttgctgtttctgagttatttggctttcactgaatttcaagatctatctgggtgccatccaagtcacctagactttttgaaccttggttcccttatgaataatacccatctcccagggttggctgagaattaaacaaggtaatgtttgtgaaagtgaccagcacaggaactgccatgcatgaaatacttctgatgccttctcttcattccaattctataaatggcccttggctgttgatttcagtgctttcacatttcagctatggcaaaaggatattttaaaagaacaaagctagccgggtgcggtggctcacacctataatcgcagcacattgggaggccgaggcgggtggatcacctgaggttaggagttcaagaccagcctgaccaacatgaagaaaccctgtctctaccaaaaaaatacaaaaattagctgagcatggtggcgagtgcctgtaatcccagctacttgggaggttgagacaggaaaattacttgaacccaggaggcggaggcttcagtgagctgagatcgcaccactgcactccagcctgggcaacagatcgagactctgtctcaaaaaacaatgaataaattaaaaataaataaataaataaaagaacaaagccattgaggctgttagggagttctgtgagataatgactttgaagcacattttctgaaatggaagacggtacgtgaagaagctgtgggtggtaagtttttcccttagaaatgagaggctgaaatcatctggacaagtatctattgcagacattctttgtgcttggcaccatagtaggcaccattaggcaacctcataccaggagcccaaaatctagttgtcacgagttcccttcaacagtctgtctgaggtggtctgagacaggtgcgccagcagcctttggcaggggtggaaccatgtttaactctggggtgcggacacagttgaagggagcatgtgctcttctgatcaggaatgagaggcccctgaatctgcatagagcttgaggctggcagggcctgagctgggccttcagggatttggggagggacatcgggcatgcagaaagctagaagctgcctgtggctctcagtttctctgaagagaggggagtggacagtaaatgccacttactcctcacacctgttgcacacttgacccccagaggacagggttgcttcaggactgagcaccctcccttgcaaacagatgtttctcctttttttttttttttttttgagacacagtctcactctgttgcccaggctggagtgaggtggtgcaatctcagctcactgcaaccttcgcctcccggattcaagtgattctcattcctcagcctcctgagtagctgggactacaggtgcctaccaccacacccagctaattttttgtatttttagtagagataggatttcaccatgttggccaggctggtcttgaactcctgtcctcaagtgatccgcccgccttggcctcccaaagtgctggaattataggcatgagtcagcatacttagccaccatttactcttattttttagcaaatatagttgtttttctgtagttcagaaaactcactggttgccttactttctgcagcttaaacagagagaaaataaggtttaaaagtgcagggctatttgtgttccctgttagagacagtgtatattgtttgtaaagggaatcgattttatctcaagaaaaatgagaaacaatagcagagacttcctctgtctcagataaaagaatgcctccttatgaaaggatccagggataggttgagtatttcttctgaaagaccaggagcaaactgtgtctttttagacctctgatgttctttggagatatagcccaaggtgttttaaatgctcacgtttataattatcacctcaacttctcctgagctccctttctactgcagtaaaatggagatgatcatttttagcccccagagttgccacggagagcgttacctgaggttgtggcctgggtgggcaaaggtgggtccgccctgtccatgcgggcagtcagactcactccgcagccctctctgtcccataggacagccttgcacaggtcagagctgcgcttcagtgacatgaccaggtcctcactcgggaaccttcagaggactccgccctgccaattatacattccccagaggccaggagtcgccttatctgttctcatcctctagtttattttctgaacaaagaaataagatggaaactgtgactgttgattttataaatccttgctgggtacagaaggaagacacaatcactcgtctaattgtcttcagcacacaaatcctgaatgcattttgacttcataaactacaagtaaattagctatacagagttcgcctgttgcctcacacttggtatctaacgcagctgtaaatttccttctttctgtctgtttgtgtcatgcccgttcctgttgtgtcagagattgcaggctgtttcctttaaagagcttggccagacaggggctcgaagttaatttcctgctagcacagcagtctgctctgagcagtcaagggtggaaatctccatgaaagtcctgccaactgcagacctcccagtatggaggaggtggtcacagagctgaccaccttttatgggatattgagggagcgttccataccacacagcaatgcagatcattgaacagttcatggtttcttccccagcaagacctctttcttgtttgaaaatgctaataaaagtggtataaatgcttcccttttgtaggagcatagggcatttgctgtacaaagaagatgtctttctatttttgaaaatcggaaagcgtaacctgagacattaatcaactcagagggaactgcattttataaatcactgttaacttacctaaagtttgacatgcaatactttaaataccaagatgagaatcatttagaatcatgggacttcctttgaattccactgatgatgccattggttcttgagttgagagcaggcacttcttttccagctgtagaagaattacagccaaacaattacagtggaattatagctgccagtgacttatgaaaatatgtgtcaagctataacacatccaaaagccccatcagaacctcattcctaggtagaaaaaagactggaagaaaatatgctcagatgttcagaacagtgaaaagcctctgggttttagaattgtgggtgattttttttctccttatattttctaggctttgcaaatgttctacaccatcacttttatattatacaataatatttttaaagcccatatccttccttaaaaaggctttgtgtaacacctgtaacagaaagaggagactggcagaatggcaatagccaagctaaggaaaactcttcttgcttgccttgggtggttcccaagatacgaagatacattcgtgtggctcgttggatttttctgacacttgggccatagggaagtcacagtaggcttttctggggaccttcattaagtctgtaagggtaggaaggcaggattccttgtctaaattcagatggattggtagaggtgcgagcctggaggcaaaactgtcaaataagtggtatgtgtcagagtatgcctgccctcactcttatcctttgtccctttcttgttagcatctagtgtcaaccagttctataataggtattgcagaaagttcaatattagcttagaaagtttaaacgtttcttcccttctgggaatatttatgttttaacataagactctgaagcacagctggaggtatgcgtccaaggcttctgctccaagactgcttagctctctctgccacaaagacacgcccagtattttcagagggaagaagtaagaaacgaaggcttggcatcttgaagtgttaaatctggaaagacctctatatcacggtagccttcatttcacagacaggaaacaggcctgaaagagcagcaaataactcggccagagtttcacagtacatagcagacctcagtcttgaactcatgtcctcagcctatctctaaccagataaatattcctgaaacatgccttaaaataaaatttgaaaatcttttttgagataaaattcacatcctatacaattcacccgtttaaaatgcatggttcaatagcttttggtatattcacggaattgtgtaaccatcaccacaattaattttagagcattttcatcgccccaaaccttgtacctctaagccatcactccctatgcccccagccataggcaacccctaatctactttctgtctctattagattatggatttctctattctggacattttatatcaggagactcatacaatatcggttcctttgtgactgacttctttcacatagcctaatgtttccaaggttcttctgtgttgtagcatgtatcaatactttatttttcttgctggataatattctattataaaaatatatcacattttctttatccatttatcagttgataacatttgggttatttccactttttgacttatgaataatgctgccatgaacattcatatacaagtttttgtgtggacatatgttaaatttctcttgggtgtatatgtaggagtggaatttctaggtcatatgagaactttatgtttagcttttgaagaactgctaaacgttccagagcactgccccattttacattcccaccagcggtgcataagatcccagtttctccatatcctcaccaacatttatctgtctttttcactatagtcatcctagtggttgtacagtggtatctcatcgtgtttttaacacagcctttttaaaaacatatgtgctaggccaggcacgatggctcacgcctgtaatcccagcactttgggaggccgaggcagatggatcacctgaggtcacgagttcgagacagcctggccaacatggtgaaaccctgtctctactgaaaatacaaaaattagctgggcgtggtggcacacgcctgtaatcccagctacttggcaggctgagacaggagaatcgcttgaaccaaagaggcggaggttgcagtgagccaagatcgcaccactgcactgcagcttgggcaacagagtaagactccatctcaaaaaacaaagcaaaacatatgtgctgagaaaccttcagcagttacacactgcatttgtaaggtcttaactctttagtttggtacgctagtccttgtaagatttccacagtcttcacatcttttctgccagccgcctctttgggaacccagcacacaagacaaccagatctcctgactgccttccctccccagtttcacaagactagaatcccttctgcctgcctagctgttcttgaaatttcatttggatagcaaagaattcagaaggggtgaggaattggggtttccagagcaaaactggaaatggacgagtggcctcttctaaggctggggccaggaatgaccttgtatcgccaaaggggtggcagggctgccagaacgtgcagttaaaggttccggggctcagccacttcctcccgtagctatgcatggcaagtgataagaggacagccctgctgtggactcagcaaagccagagcaggaaatgagacctaggttccaactctaaatgtttactttctttttcctttgctctccttcctcagcagattagttgaggtatgtttcagcctgacctaaagttttttcttatacttttagaagaaacccacttaatatactaacttgtaatagacgccagtcactttttttttttttttttttttttttaagagagatgtctctcttgcgtgatctcaaagtttctggtaacactttggtttctatggaattgctggaattcactgctatcatgtgcacctctattcatctaaaccattgttttgaaaatcctttacttaaatgctcccttcttgaatccccttataaataaaaacagcttatgttggttcagtggtttgatgggctgtttactcttccggaatattattgaagcatcttaaatccaaaatgtcctctttatttagtttgtctcaatgtctaggcacaccatcttgactgcagacgcagacctcaaataaacttcctcctcgggaggtacccatttcccttatcaaggcagggcatttggctcagaaattgctcggtttctttttttttttttcttaagacagaacctcactctcacccaggctggagtgcagtggcactatcttcactcactgcagcctccacctccaggtttaagcaattctcctgcctcagcctcccgagtagctgggactacaggcacatgcaaccacacctgactaatttttgtatttttaatagagacagggtttcactatgttggccagcccgatctcgaactcctgacctcaggtgacccacctgcctcggcctgccaaagtgctgggatcacaggtgtgggccaccttgcctggcctgaaatttctcagtttctaaataggttcttggcagctcctcttctccaacttgaagttactggccaacagtatataatcatctgcagaaagaccaatatgtactgacttttcactataggaagatttatttcagttttgaggaaatctcttgtaaccctagaggataatggaattggaagaaaagtagatgctgtttcagagtcctggggtaaaatgtaaaaatgagcaatatatacacacacacacacacacacatatatatatatttttttttttttgagacggggtctcactctgtagcccaggctggagtgcagtggcacgatctccactcactgcaacctttgcctcctgggttcaagcgattctcctgcctcagcctcccaagtagctgggactataggcacgcaccaccatgcccagctatttgtatttttagtagagatggggtttcaccatgttggccaggcttgtctggaactcctgacctcaagtgatccgcccgcctcaaagtgctggaattacaggcatgagccactgtgcccggcaagtctcattgtttcactgtagcaaggacgcagccagtgttaaatcaggaggtcttcccctgtgaagttgctttattggaagccttaatcagaagaatcatcagcggaaagcagttgtctgcaaagccattcctccccttgccagtaggtggcactgtagctgtactgttttcagatgccctctccagccgtgcaatctctcccttggccccaggcttctcatgttctgtttcttctttgccaggtctatgtgctctctctatcaaccattccaattcttacctggcctatcctggaagcctgacttcaggggagattgtgctttatgatggaaactccctggtaagttgacggtgacctggctgagccaacccacctgccttggctgtgtggtcatggaaggagatagataaggacgccctgccgtcgggggctggaggcggtgggagtaagcaatactggggagttgttcaagagaaggtgatactatttcccctcgggcttgctgtgagtcaacctcaccataagccagctggccaggccaagttagacatctgcagcataatgaaaaccacttgccagcagggggccagttgtctccctgaatgtgtcaccctgtcccatgccacagcctgagacagtgtgcaggtgtttcatattccctgccctctggtctctgaggcatccctgagcgggacaagattgctgtgggaagttgcctaaagatgcgtgcagggcgcgcctgcgacggcatcacactgcatcaggtgctccgttcgtggccaccttcccaagggcaggaaaagggatggaaatggagtggcccttgaagccaaatcttgattcaccagaaaatgacacacagcttacatgcagatggcctgggggacagaggaagagacagggagctggacaaaggagggagaaaggagaaaagaggaaggggagggaggtgaaatccatcttccctcctccgcagcatctgtatccatttttccttttcaccaacagaaaacagtctgcactattgctgcccatgagggaacactagctgccatcaccttcaatgcctcaggctccaaactagcaagtgcgtctgaaaaagtgagtccactcccaccaacacctctgtctgggtttcgctggatggctcctgccgtgcgcagggatgggattgaacaaacctggtgacatgaagactgactggtctctgggcccactcagaatttgtttcagagggagaatttctggcctctgcatgtgtggtatattcatgcatttgttaattcaataggccaggggcctgcaatatgcaagatacaagacactttgcatgaaaactcgtggtcttatgaagaaatgtacgtgtacatcagccgtagagacggacaaatgctacaccttataaacacagtacagtgcaaaccaaatgctttactttgctatttagagaaattgatgtcttctgcctggaataatcagagaaagtgatccaattgaattttttttttttttttgaggtggagtctagctctgtcgcccaggctggagtgcaatggcgcaatctcggctcactgcaacctccgcctcccaggtttaagtgattctcctgcctcagcctcccgagtagctgagattacaggcacatgctgccacgcctggctaattttttgtattttagtggagacggggtttcacttcactgtgttgcccaggctggtcttgaattcctgagctcaggcaatccacccgccttggcctcccaaagtgctaggattacaggcgtgagccaccacacccggcctcaaattgaaattctaagaaaccagagcagttgggtgaacacacacatgcacacacacatacacgcagagccttgggcacaggtggaagggaaaaggtagacagagggtgtttataacattttccaagaattgttgatatggcacataaataaacatgcctctatgctcaacgtggtgttcttcctcctcagagacagatgttcaaaaccaataaaacaaactcctctctaaagggacatctctgtgtaaagccactaatggttatgaaatgtccacctgctttcttttccagggcacagtcatccgggtgttctctgtccctgatgggcaaaagctctatgagttccggagagggatgaaaaggtctgtgttcaatgtcaaacccattttaaagtccccgcagaagtcccgcagggaccgctggcagctgtctagggagaggacagagagtggctctgtgccctccactcacctggaggaagtgtaactactctcccaggtaattgactcccaggctttacttagggctcagcaaaactgaaagccgagatgctgttttaacacagttcagccgtgagagtccctttttgatgtgtgtgtgggcggccggcacaggagaaatgagagagccagggagtcacaatccaaaaataatttctgatttccttccatggaaataaaggacgatgtaaagtgtgactgtttgggatcttatcggatgtaggtttgcagccagatcagtgcacagagcaactggaagattccaagatgccaggaaggcacagttcctcccttctgctgacagaggcagggctataccttgtttcttctcacataaataagactatgggccgggcgcggtggctcacgtctgtaatcccagcactctgggaggccaaggcaggcagatcacctgaggaccagcctggccaacatggtgaaacaccgtctctactaaaaatacaaaaattagctgggtgtggtggtgtgtgcctgtaatcccagctacttgggaggctgaggcaggagaatcgcttgaacccaggaggtagaggttgcagtgagttgagatcaagccaccgtactccagcctgggcaacagagcgagagactctgtctcaaaaaaaaaaaaaaaaaaaaaaaaaaaaaaaaaaaaaactatgaccctttgtgaatctttctgacattaatttctaaatatgagcaccacagtgtttaagggatctgggtctacctaggctcttcaggatacatctgattttcttataaagctgatctctgagttataaggccataactcccatttctcttgctcactgacccatgtgttgctgtgcttgtaggtatgtgacaatcagctctctagtgttcagtatggattcacaattcctctgcgcctccagtaacaccgagacggtacacatcttcaagctggaacaggtcaccaacaggcaagtactccgcggggcaccaaatgctcattaaacgaaaggagtcaggcctaggctcttctactggcatgaatgatctcttttctttctgaacacccaatcttggcttcacttgggacttcacctaagtgatggagtgtgtgttagcaaaactttggaggcatgatgcacaaaagcaaaaaactgggagccacccacgtgagttcacgtcctggctctgcctcttaggagcccagagatcccgggaagataatttagatctgtgtccttcagtttcctcatctgcaaaatgaacataacagtagtattaaatgagtctgcagatctaaagtgttcagcatcgtgcctggcacataggaagcactaagaagtgttagctgatatagctgtaaatataacaatatatttatttatcattgttgccagcagcaccactgagcgcttgggaagcacctgcaatttctcagggcttaagaagctgtctgaaaagtgaaagaaaagcctaaaaaatggataaaatctctagggaaagagtaaaaagaacttcagggcagacaatgagctttgagttacacctgtgcagaatgggggttggaaaattctggaaagatggaggagtgagaaaggagcagcccccagtgtttcataccccacggtggggggcaaggattctagagaaagagcgctttgaaaacgttaccccaacctgcagagaaaggcaggatcaggacagaaagcctactgtatctggggagttggttgctggtacccttggatggagtttcagaagaggaaggtgtagaggctgggcaccatatcacgctgatacatgctaacacatacgtaacagaggccgggcaccttatcacgctgatacatgctaacacatacatgacagaggccgggcaccttatcaatgctgacacatgcggacctcatgatccacccgcctcaacctcccaaagtgctgggactataggcaaacagccacatttatgatttcacagttctgcagcccagaatggcaggactgggtcttcttctcagcatgacacaaggctgaaagagaggtgccaagatttctctgacttgcccttctgccatctttttctgccaccagttggagaaagctatttttaaaggcatgtgtgattaaagcaagcccacgctgcctgaggtcacctgagccatgtcacatatcacagccatgggactgacgtcccctcatctctagaatccttgtctccccccacccccagtggtgtatgaaacactgggggcggctcccttctcgctccttcatctttccagaactttccaacccccaatctgcacaggtgtaacccaaagctcattgtttgtcctgaggttctttttactctttccctggagattatatccactttttaggattttctttcacttttcagacagcttcttaagccctgatcttttttggagccttaattcatcatctgttgtcatgggtttgagcactagagggcggctgagctgttaagatgccgttcaaccccaaggttccacgagtgagtgatcgcaattgctgctgcagccccgcctccactggggattattatcagagattgattttccactccaggctctcccgtttctgtctgtgagcacaggtgaccaggagcagaacctccaagctgttctgggttctccgctcaacctgtccacgggtgttcatatgtccccggcggttacggctcacacgtgcctcttcagccctgcttcgctggccagggcccttgaacgtgtctttagcacctcgtgctggtccagccgttactcttacatttggtctgactttccagtctctttcaaccaataccagtccatcctatatcatcttgctgattaatcttctgaaaatgtccctttgaacatgacacctcctcctcagacacctttattcccctttgaccttgggaatgaagtcccagctcctcccgtccccctgagtcagacctgctgcagagcccagcagccaccacccccagaacctcctcatttcctccagccacagagacaccatcccataaaacagtatgcgccacgtgccgggctccatgctcagtccccagcatccttagttctcccagcaaccctgtcagggaggttgtgatgatgattcctgtttcccaaatgaggaaatctggacacggaaacgttaaggaacctcatccgcctctcccttcctctgtggtcctggactagctcctgcctggaccatctgtgcagcaccgcatattaactgctcacgtggtttttctttgtatacacccgtgctctctcaatctggaatgcagggtctggatcgtacacctctttgtaaaccccagcccggagcacagggctgtgggacagacagtacaaggatgtctcaggatgcttcggatcacagaaccctagcagtgcacctagcatagtcactttcagatgagaacatgaaggcccagagaggtttgtccaaagaccccctagcccattggtagcatagtaaagaatacctcccagagctctgagctgcagggcgagcttcccaccaggacctaatcctgcagacaagcagcctctcagcagttgcctgctcctgggaactcatatggcaaccttggttctcaatgtgccaccctctgtgtggggcagagctgggggttgtctctcaccaacagaacagtcaccccctttgtctggcagaggccttgggatgaagttccatgactgtaggcgacatcccaggtccctttgcatgatctccatcattacacatgctgggtacctgggtgactccagggttatctacaatcaaacaccacccaaagtgtcttgcccggaggtttgctacccactcagtctggctcaggaggccttcacgttgagatctgtctgttcttccatgagcccggcacagtcccaagcttatttaatggtacctggatatcaagtccatctcactctctaccctaactctcttctggaaatctaggaatcagactagtcatcagataagccttctttaataggggaaagcagtagcattgggaaccttttaacagctttacaatggctcttctgaagaacaaacaagcccttgatgctctttagttattgccagaataatacgtcctggattgttctcagtgggcagaacattatgctaaggcacagtctctccctgctgcggggagtgtggctaatgacgcttgggtgtggagattcctgggtgcgtgtggggcctgcagcccagtcccatcgttgcctgtgcattactccctagtcgaccagaagagccttcgacctggagtggctacatgggaaagatgtttatggctgctaccaactacctccctacccaggtgtcagacatgatgcatcaggacagggcttttgccactgcacgcttgaacttctccggacagaggaacatctgtaccctctcaacgtacgtacaatgacacccactctgaacaagaccacactttcgtcaatgtatttttccaaagcacaaaaatccccaaacctgaaaagaaaaaaagaaaacttgccccaggctgggcacggtggcttacatctgtaatcccggaaccttgggaggccaaggcaggcagatcatctgaggtcaggagtttgagaccagcctggccaacgtggtgaaatcccgtctctactaaaaatacaaaaattagccgggtatggtggtgcgtgcctgtagtcccagctacttgggaggttggggcaggagaatcgcttgaacccaggaggcggaggttgcagtgagccgagatcatgccactgcactccagcctgggcgacagagcaagactccatctcaaaaaagaaaaagaaaacttgccccaaaggaagggtgagcggaatcaaacccctgcttttcctatctgacttcaatacggattctcagggggcagccagaagttggcatgggaattttagccttctggttataatgacactgtcttaaaaacaattcttatttttatgtaattatgtaaaaagcctccagatctgttttctaggttcggactcctatggggctgacagatgttttaagaagtttaaaggagtttattcaaaagttgaacatttttaaaatttcacaaaactaaccagcaaagacagtaagccaatcctccatttaccccctttctgtcttggttaagggcagagacacatgtcagagggagactgcgtcccatgtagggagctaatgtgttcactagctattgcttctcgcagggtcgcagcatctacactcacttgcctcatccacactgtcacgttcaaagacaagaaataatcctgaaagtagatcccaaggccagaatgcaaaggaatagccagaagcccagaccagatcagtgggctaagggtttgtcaaaggcagaatctggtgacagctagggtgaggggggctttgtcattggaagcgaatccatcgcccatcttcgttgtcatcacggtttatgttttccttggcccttaggatccagaagttgccacggctgctagttgcgtcatccagtggacacctttatatgtacaatttggatcctcaggatggaggagagtgtgtcttaatcaaaacccacaggtgaagagactgcttttcaaaagacagcctttcgagagctggtcgtgtagagttgtcccttcgccaagaacgacaagcttcagtgcccttgcattgatttgttcttcactggcagtctcagtggcaaacctctagtgggcaagtgctctgcaccgggctctgtgtcaggtgccctcagcatgtggtaatcatctggaaaagtgccaggattaataacacacaagatggtctccccctcagcctatgctcctaacacagccctgagctcacagtgggtgttcaaaaatattccctgccaccaggtgtggcggctcacacctgtaatcccggcactttgggaggccgaagcgggtggatggcttgagtccaggtgttcaagaccagcctgggcaacatggtgaaaccccatctataccaaaaacaaatacaaaaattagccggttgtggtggcacacacctgtagtcccagctactcaggaggctgaggtgggagaatcacctgagcctggagaggttgaggcagtgagccatgatcacaccattgcactccagcctggacaacagagtgagaccctgtctcaaaataaaaaaaaaaaaaaacctattccctgcatggaattgaaaagtgctctaccagtcatgttgactcacgcctgtaatcccaatactttgggaggccaaggagggcggatggcttgagctcaggagtttgagaccagcctgagaaacatggtgaaaccccatccttacaaaaagaaaaaatataaaaattagccaggcatggtggtacatgccttgtagtcccagctacttgggaggcagaggtggggggatcacctgagcccaggaaggtcaagactgcagtaagctgtggtcacaccactgcactgcagcctgggcaacagagtgagaccctgtctcaaaaaagaaaagaaaacaaaagaaaagcactcatgccttctgtgaacaggcacagactgagctctcctgctgtggccagggcaccagagctgccaccgccccccaccgatggctgctctccttgctagcatgtcctcacctgtgtgtactgggaagagcagaggactaatctttgtctagccaatgtaagagaaagaggccattttgacggtgtgtgactgcccctggcagttgcaggtcacttcagctcatcctggcccagcagcgtgtgggtaggtctacaatttaaacccacagagttggcgggcggatcacctgaggtcaggagttcgagaccagcctggccaacatggtgaaacccagtctctactaaaaatacaaaaattagccaggcgctgtggtgggtgcctgtagtcgcagctactcgggaggctgaggcaggagaatcgcttgaacccaggaggcggaggttgcagtgagccgagattgcgccactgcactccagcctgggcaatagagcaagaccctgcctcaaaaataaataaataacccacagagctgagcacaggcttcttcatgcttttcctttggaaggtgtcctagatatatgatgatttcttttttctttcacctcctcttgattgtcacaagtagcttgcttggctcaggaacaacagaagagaataaagaaaatgacctcagaccttccttacctcagtcttatgcagcgaccgtagccagaccaagtgcatcttcagcctccacggtgccaggtgggtggacacggggccaacaggggagcatctccaacagtgacctccctccccttctccctgcacgctccctccccttcccccttcactgttacctgggggtggagtgccctccctccccttcccccttcactgttacctgggggtggagtgctctccttgaattttttattttctcacaggtgaggccatggtaatagcctttaaacctgggaccctcaacctggcaaggcatcacacgatacggtctttttcctaacaagtggtgttaaccctttgcctcttcaaaaattccaatgaggccaggcacattggctcacacctgtaatcccagcactttgggaggctgaggccagcggatcactggaggccaggggtttgagaccagcctagccaacatggtgaaaccccatctctacttaaaaaatagaaaaattagctgggcatgttggcacacacttgcaatcccagctactccggaggctgaggcaggagaattgcttgaaccagagaggcggagattgcagtgagctgagatcataccactgcactccagcctgggtgaaagagtgagactctgtttcaaaaaataaaaactaaactaaaatttccaaagagcctgtagtcctagccactcaggaagttaaattgaggcagaaggatcccttaggctcaggagttcgagaccagcctgggcaacatactgagaccctacctcaacaaagaaaaattcaaagaggtaggatgcctcaggcatctgaagtggaaaggcaggtcaggcttaaagatggcagatggtgaggattatgacttgtcctaggcacagtacctccagggggaagacagacagcccctttgcttcctttgccctttatttgagcccccgctccccacccgccaggtcatggcataaaagcagatccccagtgcttgtttcatgtctctttcttggtttccaggttattctgaggacggcggggcgctgcgaggagaagttattcctgaacatgagtttgcgacgggaccagtgtgtcttgatgatgagaatgagtttcctcctgtgagcattaggaacccgtaactgggcggctcagtctgtgtgcttagaaggaaaccttcgcctcatacgagaggcagagtccctttccctgttttctaatctataacaactaattctctgctctagtatttggaaagccataggatatttgttgtactgtgtgcttcgaatcctacagagtaggctttaggtgtcgagctaaaccctgatggcattagagtcaccgaatactaatccagggagtcttggtggcctccctccagccagaggcctgcgatcccttactttgcttctgtagcactgactttgctgcctggaaggtaggaacacgtgacttgtctaaaacttattttcctgaggctcccatggatgcgtttgcagaatgctgccttccttgtgctggaggggatggtttcagagggctgggctgtgtgttcaggactctgagctgagttgctgcactctgtgaaccagcttgaccctcacttacctgcagctctggccggcagacccgcacctccccagcagttgcagacactcattaagaaacaagtggccgggtgcggtggctcacacctgtaatcccagcactttgggaggccgaggctggaggattgcttgagcccaggagttagagaccagcctgggcaacacagcaaaaccccatctccaccaaaaaaaaaaaaaaaaaagaaaagaaaaaattagccgggtgtggtgtcacgtgcctgtagtcccagctattcgggacgctgagatgggaggatcacctgagcctgggaggtcgaggctgcagtgagctctgattgtgccactgcactccagcctaggtgaaagagtgagactctatctcaaaaagaaaagaaaagcaattgtgtgctctgtggagggcagcaggtgcagggcaggagcttgcccgagcacctttagctgggtttcccagcaacctgctcagcctgttcccacagctagggccctcggggctggctgagtgctgggcgtggcttcttccatcacctggaactgaagacaagattccctcctgagagcctgctggggcttccttaactgctgattcttcaggctcccatctggagtaacatatagaccgctcttgtgagcttcagtcaaaacatcccagatagtcaacctgaaatcatttcgagatggaagtactgatttgttttgttttgtttttgagacggagtcttgctctgtcacccaggctggagtgcagtggtgtgatctcggctcgctgcagcctctgcctcctgggttcaagcaattctcctgcctcagcctcccgagtagctgcaattacagatgtgcgccaccatgcccaactaatattttgtatttttagtagagacggggtttcaccatgttggtcacgctggtctcaaactcctgacctcaagtgatccactcgtctcggcctcccaaagtgctaggattacaggcgtgaaccgccgcacccggccggaagtagtgtttgggccaagacttggagcatcagctcctagagccagagaggagctgccacttgggcactgaaacaatgtccattaggctttgttatggaaacttctcctgatcattgttttgtgtccattgagcttccaattgtaaaaggatggagtgcaggtctggcttctttctcccgcagatccgtggaaccctctagtgagcacatttggcttagaaaacaaagctgcggtggggccctgcatgcagggctggggctgttgttttgtgatttcccacatcggctctgcgggtcggtcgcagcgtgagcttttacatttctggctttcaataggcaggttgtcagagacgtggctggcaagtgaagtttatatctcagtggcggagagcagttgttcttaaaaatactaattataaacttcaaaacctctgttggcatgctgcctaactataaaccagttgttttacctttgggttctcatggccccaactggccttaaagggcgttcttctgcaccctcaagaggcggtggttatttacctgaagtcgaggcttccaggatccagagcactctaggtcagacaccgtggggacaaatgtgaccattctactctgtcagggtttaccacatccagacactcactaggttccgtttcactaattttggtaaaagtctgtaactactataaaatattattagattcttaattgtaatcgcagtaagccttgcaacctcttatagttacagaattggggtaatgtggatattagtatctaggaggtagttccttgccaaagaacctgtataaaataataggtaccttgtgcagatcatttatttggggtaaaaaggaaaaggggaggtgcttaattgaagaaccagtaagaaagtttgtcctgaggcctgtgtgcccattcagtgccaggaagctgggcatgagccagttgtttcttctccctcctaaggaccaaatgagtgaaagttggttgaaattgcatcaggaattcttatttatacgcaagaaatacttcctgccagtgagagtggtcactgaacaaggtccctagaacaggtgttagacccttgtgagtgtcaagcagcccctgtgtgcagggctgtgtcgtggcagccaccaacctctcagtctgccctccagcctgcaggtagatggtgatgaggggcagtgctcccactaaggcactgtctcagtagcaggcaggcttctccatctcaccatgtaaggaccagaggcatgcatgctcctgggatgctctatcaatatggcccatctcagtcatgcctgaattggcagaaatgttcagcgagggatgctagggaacttcctctctgtctccttattctgaattgtcatgcctattgcaaatctctgtgcagaattcacatctttactcacattccttaaaatcttctaggaccacaaaaggctcttggagtctcagcttggttaaaatcgcctctcttgtagtgacgaacaaacataggcttgcctgagtagtctgctacaggagctctgtgagccgctgccttaagaacgcgggtcatcactagtgatcttttcagaacacatactgacacttccctgcgtaggatcacgcttgcctccttgggatttacttttgctctgagagcagtgaaagaaaagagacttgatcatttctggtgccttagaaagctgctacattcgggaggatgagaagcttttgtttcaggaacaagccaacctgtacaagtctctgtattttgtgagactagtcccaatcttgtgagcaagagtcaggaaatcaggcccaagggtataaactgaccttcccttttttttttttttttttttttttgagatgatagagtctcactctgtccctcaggctagaatgtgttggcgtgatctccactcactgcaacctccacctcctaggttcaagtgattctagtgcctcagcctcccaagtagctggggtttcaggcatgctaccatgcccagctaaattttgtatttttagtagagacaggatttcaccatgttggccaggctggtctcaaactcctgacctcaggtgatcacccccctcagcctcctaaagtgctgggattacaggtgtgagccactgcgcccagcctaaactgacttttttttttttgagatggagtcttgctccatcgcccaggctggagtgcagtggtgcgatctcggctcactgcagcctccacctccccggttcaagcgattctctcctgcctcagcctcccgagtagctgggattacaggtgagcgccaccatgcccggctaatttttgtattttttagtagcgatggggtttcaccatgttggccaggctggtctcaaactcctgacctagtgatccacccacctcagcctcccaaagttctgggattacaggcgtgagccaccgcgcccagcctaaactgactttttaatagtgattgagcagtccatgtttacaagtaagatgagccttttaaaaatatatacatatacatataaatacatacacacacacacagagacatttttatagtcagtattttctagaactgtgtcatacttgtctacacctaaataagctgggtgaccattctgtggccatgagcgagttcagacagaaaaattccacagtgcccagcctctccctgctcactctgcatgggcacagacctgttgataatgcacctgcctaccagcctcttcctgagaagagtaaggccattctgttttgattttggtagataatcttgtgccgtggaaatcagaagggcaaaacgaagcagtcatgatgagaagcacacctcagaaatcaggacatcccccctatcaggtggttttggagaaaacaaggaaggcggaagaatggagtgcaattgtgtgagcagaaaggggggcaggaatcccgggtgctccactgcttaaaccacaggacctggttaactcctcaccaagcttcccacgaccctggttgccaatgggcgcgggagacattgtatacacatcatgctatttaaaatacgttcaaactatagtgtaaatgctaattaaccatattggtatataaccggaattttatattaaaaggggcctcctttttaaatatatgccgtgtaaaaaatgtacttataggaacatctctttgaattgtatttcttgtatattacatacttagagagagactcttttagccaggcaaagtcttttttggctgtggctggaataaatcatttattacttgggagtcccattttgg

SEQ ID NO: 15883 - DNA, 60508 bp, Homo sapiens
aggttccaaacgctccgcggcgccatgggctgaaaactcaaccgagatggaatctcccagtctgaaccggtttcaaccggttccgagtttgaggcactaggaggagggggagaagcggctgcagcggccgcggcaggagcagcgggagctacagcatcagcaagagcaacagtagctacagccccggcggcggtgcctgttccagtctttgctgctgcagtccgtgcaaccacccagagggggaggggggaaccaccagtcgctgaggaacaagagaaggggggaaagtttaggcgagccttgggggggggggggccagcgccggagccgcgtgagagagggagccgtgttttggtaggggggagtcggactgcaactggcagcagagcgtctccccggccgtgtggactctacaccccctactcctgccgcttctgctgctgcctgtggctggagggtccccctggggctgaatctttgggacttgaccccgttccctcccccttccctcactccccagccgggcgggagcatttattccccagattaattccccttttgggggggggcgggtgtgtgtgtgtgtgtgtgtgtgtgtgtgtgttgggggaagcgtccctgaaatagtaaatattattgagctctttttgcccttttcctgtccgtttttttaatttccttttttgaggtgggaaaactgaaacccaccttgattcgtcccctctcccccctccccaccttccctcgccctaatcccccaacgaggaaggaaggagcagttggttcaatctctgggtaagtcgactgtgtcttcggggccgagggtcgggcggcggcgcggccgggcgggcgggaggaggccggcgtggggcgcggcggcggcggccgcgggaagcgagcccgggaggcggcgggcgggccgggggcgcggcgggcccacagcggagcctgcgattgaatggagccgcttttgccgctgggggatggaggcggggaggcggcctcgggaggggagcgcttgctgggtcattcgcgtgtgcgggtggcggtggaggaaggcgaggagtgtgatagtgaagcggggccccgcgcggggtgggaggggttccccagcccctggggctggggagaagttggggtgatttcaggaacatctctgtaaattattaggagtggaagtttccagaaatatttagtgcagcagcattgaaacgtccgcctgcatcacgtggccccctcggtggagagcttgggatgggggagggaggggctgccgactccctgttcctccagcaaggaaactcgaaagctctccggttttgcagagtggcatgtgaagtaggaaagatcagtttttcaggggcctgcacatgggattccgtcttgtagttccttttcaggggtttgaatgtgataagttggttaaaccatttactgttggccttgtacagtggaggatgccctgattctccttcattccgatgtctgtgagtttgggttgggtgggaggaagtggtgtagtagaggaagcattcagtactggctcagcccggacctcctctgatcacgccgaggccatgctgcatagagaaaggggcggtgaacttaaggcgcctggtctaaatgcctcctccgagtaagggcggggtgagtgcgtgctcctgtgtgctatagttagaagggctgcaaatcggttcgggtgggaagcgaggggagggcgggccctaatgaggtgtgtttttcctgaatgaagcgggcgattgcccacacaacctaaggagcagtctttcgccttgtagcgacttgtttttcacctagtgtgaagttattaagcaacggttatgattttctgggttttgtttaggaattggcattgggtgtcacttgtagagtcacattatccattaagctggataatccctagtgtatgttatccagtgagtggattttaggattgaagagcccaatgggaatgagcgttcgtggttacacctctcgcactatggcttgtttgctgtctgattgtatatcttaagtgtgggacactgctgttagtggaaagaatgttttggaagcggtttgatttgggggactaaatgtgcttggcattgaccacaaagccgccatttctgtactatgtacagttcaggaataggtaggtgatttcgaagatagccgctagttctaaggatggcaaactactgtatttaaatccttctattctaaatctcgtttttcacatcagtctagttcggagaattttataagaacagtgtatttgaaaatgaaacttgtaagagtcattttcttaatccttttttgttttagcattcaactatggtagtaaataggtgaaaagtttgttcaatatttaaccgaaatatttgaaaacttttgatacatggatcttggtgctttgtggacattgcttttaagcctcaaataattaagattgttctgatcttttaaattttatggtacttgaaggtggaggagagtttacacattcatttgtggaatatatatttcctctcagtatttagatcttaaggtttttttgtggtgtgtaacaagtattctgctgtttaaaaacgtttgtttaatgcctactacgaaacgttttgaagtctcatcagttttgtcaataatggaccaattcttgaactcctaatttcttgagttttacattatttttacatcatatcaatcataggtgactcatcttttggagttctaatctgttgtaacagacgttatatttaaataagacaattgcattaaaatagaatttgctgccattattgttatggacatttttaagctgttataaaatagccaggaattaatgactttttttccgccctgccaagctagtttgtctaaatataatgtaaagaaattagctactcattttctggtccacgaaagttcctaaaatgggaagaagtggagatctgaccttgttagttctaaatacactaaactgggagtgccatggatggctttcaggatgtcctgaatcctctataattgtatacaaaatcgtgagtttttaaaaactgggttagagctattggttcctcagagtctcaggcatcttagacccccaaaaaggttaaggactactgacttaaccaattaggtttgagtggcattggctttgaagaaaagcagaggaaagatatattttataattctgggcaacaaaaaagtggatgtgtgccagcatcttagagtagaatcctcttaaaaggatagcactgcatatgaactagtaggttttaaccagtgcatatttaggcgaagtagctcatttttctgttagaattcttttttatttgggaatgggcaagcttttacagcttttaccttgccaatgaatacctggaatttaaaaaatcttgttaggcatattgcccataaagttttttttcctagatcatatattcagtaaatatgtttgtagctttatttcaatcccccaattcattgagggttgaaacaatttgaatggtttgagtgtagaagctaagttatttctgtagaggctaagggcatttataccaagatatgttagacttgtggttcctgctaaccattgctgtagacaataggaattactgtatatccacattttaatttttaacatcattctgtctttgtttgtttgtttttgagatggagtctcattctcttgcccaggctagagtgtggtggtgcatctcggcttactgcaaactccgtctcctgggttcaagcagttctcctgcctcagcttcccaagtagctgggattacaggtgcccgcctccatgcctggctgatttttgtatttttagtagagacggggttttgccatgttggccaggctggtctggaactcctgacctcaagtgattcgcccacctcggcctcccaaagtgctgggattacaggtgtgagccaccacgctcggcccattctgtctttatagcattatttttataaagttaagataatgtgaagtgagcttttactgagttattcagaagaccctacttgggaagaaaagaaaatcacattcacttgaacttaatcctacttgcttaaaaagttttgacatcaagatactgaactgtatcacgttttaggaccataaaatcctaatagtggatgcgtttaaataataggttagcatactttataaatgttagtagaataggaaagtcttcctggtgtataaactaaacactagaaaagttgaatggaccataataatttatgtaattatcaaatagctaagtaatttcagcttttgttacttgcttttactatctcagttttctgtaattaaagtctctaaagtattcattaaaatatttgtaataacatggttgaagtaaaataacttgtaggaagtttttgataataccaaaacttgataggcagcttcaattttttttctttattttcagtaatctatgccagcaattatgacaatgttagcagaccatgcagctcgtcagctgcttgatttcagccaaaaactggatatcaacttattagataatgtggtgaattgcttataccatggagaaggagcccaggtaaagtagccaaccaaaactttataacattatgacagtgtaacagagttgttgggtttagaataaaattttaaattatcacctttaaaaaagatattccatagtttgcattaatttggaattctgtattaaccataatgaaaattggtttggagaaagaaattgcatgtttgacatggttagagtgggttgttttggaatattatacttgttttgtccttaagagccaaatgttattaaatactttgtaggtattaaaggttctctgtacttttatatatacttaatatgtttggcactaatacgattcttctacttttaaaacatttacagaagtacttcacagatatgtttgtttaaataaaaacaggaataccaagtatttttatgttagttgaattttgtgcacttttcaaagtggtactgttaatgtagggaattatcttaaacataaaccaaattttgatcagtttaagatttttggtttttttgaacccaactaaaaggtgaaacagaaatgtgtgtacaattttaaattgtatatgtcacaagaaaaaaaacttgattttttacctgtggggccaaacttttttttgagacagtctcgctctgtggtccaggcaggagtgcagtggcgctatctcagctcactgcaacccctgcctcctgggttcaagcgattgtcttgcctcagcctccctggtagctgggattacaggcacacgccaccatgcctggctaatttttgtatttttagtagagatggggtttcaccgtgttggccaggctggtcttggaactcctgacctcaggtgatccacctgactcggcctcccaaagtgctgggattacaggcatgagccaccgcgtgctggcccaaacatgtttttgaatgagtaaaaagttttgcagttgggtcagaaatcttttttttttttcagatggagtcttgctctgtcaccaggcctgagtgcagtggcacagtctcggctcactgcaacctctgcctcccaggttttcaagcaattcacctgccttagcctcccgagtagctgggactacagacgcgccaccatgcccagctaattttttgtattttagtagagatgggtttcatcatattggccaggatggtctccatctcctgacctcgtgatccgcctgccttggcctcccaaagtgtggagatgacaggcatgagccaccgcgcctggccagaaatcttttatggtagttttgttgccagaacagtagatttctggttagataaatgttcagctagtagatgggaggttacttatattgtcaagatatttatatttgcataattaagaaactgagtgccggccgggcgcggtggctcacgcctgtaatcccagcactttgagaggccgacgccggcggatgacgaggtcaggagatcgagaccatcctggctaacacggtgaaaccccgtctctactaaaaacacaaaaaattagccaggcgtggtggcgggcgcctgtagtcccagctactcgggaggctgaggcaggagaatggcgtgaacccgggaggcggagcttgcagtgagccgaggttgcgccactgcactccagcctgggcaacggcatgagacttcgtctcaaaaataaaaataaataaataaaataaaataaaaaaacctaaacctgagtgccattacactttctgaaaatatataaggtggatacagtactatcttttatagtagtccaaaaagcatcatgtataaatgtttccattcccttatgaaatgcaacagtactgcttttactatagtagaaacttgaaaaaggtccatggaaacgctaaaagtagaaaaaattactcttgcagtgattctgtaagcttgttagcccaggtttatacttttagggcgttttgatcagtatattatctcctaaagcattcttgaaaaaattaaccatccgtatttattatccctgtcatttagttgttactcatgctatacattcaacatgaagctttaagcttcatttcttctagcatggatgcatagaaagcagctgcttttggaggaagctatgaaagtaaggttgggttcaactctgaatgtaatattggaagcacaggtctgtagccattgggaaaaagggcatttaattttttccgcatagattcagctactaatactgtttaatcttcacactaaactagttcactacatctaaaggtatgataaataaaccaacatagagcagtgttcttcatggcttgtaacagaattagtggcaatttttgtaattgagaatatattacagcaatactgcttttaataatgtttcatagtattaagaaatttaatggtttgttttaaaattgacttgttaataaaaagtagattaagaaaagtgtttctaaatttttttgtttgtaaggacaataggttaactttcccaaagtaaaaggattttgtctgcagtagttaatagatcatgtgacaaaatcagttgcgtagaaataactagcaaacttattttgtattataaatgaagaaacaagatttagagcttaaagctggttaaggagtccttttggtctctaaaagtcctatgtcgttagttcagtctacttttcgtttaccacctccttgggggtcttatttcaaaggaaaaggagtagtagtagcagcgagctgctatagtggaaaacatgatttttagtgttagacgtcttaatttgattcttggaagctctctctagtcattgcttaagtcccatgtacaaatatgacctgtcctacaagagattggagggttagttatgaggtttaaaagcacctattacagtgcttgataggtagaaggcactcagcttaaagggtacatttagcagtataatgaaaatgatttagcatatgtgatactcattgcttaaaattaaaaaaattttttttttgctactcataaaatatgcactaatgacaagaaaaatttattatgctaattaagcttttaaagtcaactgggaaaaaaagctgtaggtaggtttttttttttttaaaggaatgtgtaacttgggggaggggaagaaattatttacaagggtgacttttaatctgtagacagaacttctgcatacatggttagtatagtaggatatttagcagtgtaacattaggactaccctctaccctctgttatcagcatttttctatttttagccaagtagacagctagaaaaaagatgcgggaagagttggatgttttctccaatattgtgttctgttaaagatcttgaactctattgcttagcaactaaaatgctttcaccattcagttagtagtacaagggagatgctaggttttctctctttagtttgcttttgtgtcttttttttttaaacccctgctggggttttaagtttataaagaacattatgtaagaatggtgggattagaataaatcagaatgcaaatactagaagtagcatcagagagtaaaattacaactaacaggaaagaatattatttatgtagcgattgatgtgagtggtgatagtgtgggaagtatttgattctgtgtagaatgcttatcacttcaaagcatctgacaaaatggtaacttgaccaagtaacttttactgtgtgaggatctttgatacaacttttcctctagttagataaggttatctagctagatattctcagggagaagaccaaaacactgctaaaatgtgctttggccctagataagccacatcattattctttcggccttctgtcatttctcatatgacacattatgcccatcagtcctttaatgaaatcaaatagaaatgtgtatgattgtattttaaagtatacacattaactcttgtaaccacagactcacaatggaagcaggcgtctgatcttttcaggcaaccacagtggttctggtgggtttctgggtagagaacaaccatataagttattgagtgtgtagcagtgtgttttcctgattgatgtatgggatagtcatgaatgtggtattgtatttcctacctgaggaaaaggtcatgattaaaataaagcatcaaagccaggataagcatataatttctttctttttttttttttttgtaatgagacagagtctcactctgtagcccaggctggagtgcagtggtgtgatctcaaatcactgcaacctccgccttccgggtcctggttcaagcaattctcctgcctcagcctcctgagtaactgggattacaagtacgccccaccatgcccagctaatttttgaatttttagtagagacggggtttcaccatgttggccaggctggtcttgaacttctgacctcgtgatccacccaccttggccacccaaagtgttgggattacaggcgtgagccacggtgcccacccgagcatacgattgttttaaaaaagactagaataaaagccaagctaaagattataaggtatctttgtcagaaatggttgtgagagtgcttcctaccctgtttttgatgctttattgtttataaccatagaattaaacccatgataaagtaaagtataagagaaagataactgacagattttaaagtcatcaaacttttttcttgctctgtcacacaggctggagcacaatggcttgatcacagctcactgcagccttgacttcccaggctcaatcttcccacctcagcctcctgagtagctgggaccataagtgcgtgtcccaccacacctggctcattattaatttttctttgttgcccaggctggtcttgaactcctgggattacagacatgagccaccacacctggtccaaactttttgcttacaacttttaatagaaataggtaaaagaaataggaaggatctaattgagttataaaacaacctttaaagatacaaaagtgaaaaagattaagccattgctttttgtcaatagaattaaaagctgttggtaaaaatattaatgtatgaaaaacttattgaaatgaaaaaactatatatatatatatatatatatatatatatatatatatatatatataaataaaatgtcgacatggctggatcttaaaaactgtcaaatgaaaaaaactaattgcaggaaagattttttttttttttttgagagggagtctcacgcagtcaacccaggttggagtgcactggggcaatcttcctgattcttggggaatcttggctcactgcaacctccgctcctggattcaagcgattctcctgcctcagcctcccgagtagctgggactataggcgcacgccaccattcccggctagtttttgtatttttagtagagatggggtttcgccatattggtcaggatggtcttgaactcctgaccttgtgatctgctcacctcggcctcccatagtgccaggattacaggcgtaagccaccgtgcccagcctaaaagatttttaagtatactattaacataaaatttggtagccgtacaaccctattcatgaaatttacacacatgccgtgaaaatgtggacaggaaaagacacactaagttcatgatgaaagccattactttttaaagaaggaacaaaggtgtaatcccagcactttggggaggctgaggcaggcgggtcacgaggtcaggagttcaagaccagcctggccaatacagtgaaaccctgtctctactgaaaatacaaaaattagccaggcgtggtggcaggtgcctgtagtcccagctacttgggaggctgaggcaggagaattgcttgaacccgggaggtgaaggttgcagtgagtcgagatcctgccattgcactccagcctgggtgacagagcaagactccaactttaaaaaaaaaaaagagagaaaaaaggaataaaggaaggaaatggcactagggaaaggcacaaagatgacttccataaactttagttattttatgctaaaagaaaatctgatacaagcacaagatgatgactacgtagattagtatttctgggttgcatgttaaaaatatgaaaataaaaacggaaatagtttccaaaacaaagattttatatatgaaattagtgaaatttcagaatggagaaaggatggttacaataaatgttaggagccctctttaaagagctcaaatggtatgtaagtatttgggatttgtggtttaattagacctagttttcagcagtctttccatgaaatgtatttttgtatttagagagatcttggtaactcttgtaaagcagagtgtcctgctacattacataacttacctaagtaggtgtgcttttttttgtttttctagagacagggtctctgctctttcacccaggctgaagtgtagtggcaccatcatagctcggtgcaaccttgatttccagggctcaagtgatcctcccatctcggtctcctgagtagttaggactataggtgcaagccaccatgtgcagctttcttttttttttttttttggagagtcatggcctcgttacattgcctgtcacctagactggccagctggtcttgaacccctggcctcaagtggtcctcctgcctcagtctcccaaagtattgggattacaggcatgaaacactgctactggcctagataagaatttttatattgtttttggttgatttaagtgctgagaacttatttgcttcagaatagatctttggttgaaatgcagttcagttttgagactaaaaaataaaccagatttactcccaaaaatgttactgtttcaaataagtaaaatatttgcacctttaaagattaggagttggctgggcatggtggctcactcctataatctcagcactttgggaggccaaggcaggcagatcacctgaggtcaggagttcaagaccagcctggccaacatggtgaaaccccatctctactaaaaatacaaaaattagctggctgtggtggcacctgcctataatcccagctactcaggaggctgaggcgggagaatcgcttgaacccaggaggcagaggttgcagggtgctgagatcgcaccactgcagtccagcctgggtgatagagccaagactctgtctcaaaaaaaaaaaaaaaaaattgggagtcatatttatataattttatttctatttctgtaaggtctaatttttgagtatttctgaacatcaataatagaatctctgtccaattagaatttgtgccttgctcagtagttttcattttaatgaatgattcaaaagaatacattagcttaagttttgttttttttaataatattttagcaaagaatggctcaagaagtactgacacatttaaaggagcatcctgatgcttggacaagagtcgacacaattttggaattttctcagaatatgaatacgaaagtaagcaagtggtggttttaaaatctgttatttcttttcttccagtcataaactttgaggaaggtatctcatttttagtattagcatttgttatctcaaattattttatattgttaatttgtttcaaaatttagtcttaagcatataattaattcttgcaaatagtcctaagaattatgaatgaagttttgtaatgggactagtatgcaaggtggcttttttggttgtctgattttgtttttttctttttagtatatgtatacaggtctaagtagcataaattctgaatgttattcagagattaaacataacattaaggaattattttgggcaagtaatcaatataatacaggccaggcacctctgacaccaagttgtgtggacagcttaaaaccctactccatggcattgggcttctaatgggacagcactcagtttttatttacaatggaaaatgttataattctggtccttttttaagtttgaacagaagggttgatcaaaatgtgttttgtctgttttaggcttgatgattcacgcttctctttaaactgccttaaagtaataaatactatggcattctgtttaatacacgaaaggtttccacttgatatacattgtgttaaaacagaagatagccatattcacatctgtttctgaaaccagactttgttaattaacagttttaaaatattaattagttttgacatcttgtaaattttaggtcaaaaatacagtccagaacttcctcaaagtgctaaccttaagtaacataacagtgtttgcctgtttgcttgcctggtaaattttgctttttatactgacagacattactaatgtttaagttgatttatcaacagtatttttaaaaactcaaatttgtcttgtgaaaaatgagatgattagaggaacagaaagaaagcaacaggtaaagaattcttcaatttacataaattacaaatgatttggtgctaaatttatgcactatgacatttggcttttatgcaatcatttttttttctttaaagatgttaacactacctgatattaatcataatgttccattatgttgattgcttgtaataggaagaaaaggggtgtcttcctgtgcaactgacacagctaggctttgacggcaggcctccacaaggtctacccttttgattccctttaactgaattctgttcatcaattgtttttgtttcatgggcggtgggaggggaaaggggaattcaatgcataaaataagtatttctaagggctcagtagaaatttctaccatagggatcatttcatgcatttattttttcatttagtctttgctgttatctgtccctcatcttcataactcagcagtggatttctcaagtttggagatgtaaggcaaaagtataattcttcagaatgtttggattgtagtgatttatcattggctttcagatttgactgtcacttcagatttttgagcaaaaatactaaaaaaaaaaagaaaaaaaattctttgaagagacaggacctctgttgcccaggctggagtgcagtggtgtgattatagctcactgtaacctcaaactcctgggcttaagtgacatttctgcctcaactttctgagtagctagggctacaggtgcgtgtcaccatgcctcgctaacttaccaatttttttatagaagtggggtctccctgtgttgctcaggctgatcttgaactcctggccctcccgccttggcctccccaaaatgttgggattacaggcgagggccactttgcctggccccaaataacattttttcaaaggaatgtaaattttttttgttttagtttcataggcaaagtctttatgtctgggagagattggattttaggatattatagtaacagatgtattcctttgacctaacctgggcaaagcatttattgggctccctgcttcaacccccttggcagaaagatgaaatatgaattgtatcttcatcaagcttatgctacctttatacagttgtagaaaatacaggttagtaaatagtaattttaggtaacagtatcaaataggaagaagtaaataaaaaagaaaggacagtgtctttccattaaaaatgtaaaaaagtttggttaaataagatgaagttatctttaagatttttatttgtaactatatttatggtgggttttgtttcttagtgttttaaaggctttttaattgatttttggcaagaggatatattgtaagcagtgcattgctttgacttactgagtcttgacaatctgattttgtgcctataaaattaaagaaaatgcttagggtagtatgtttttaaaagctaattaagaacttcaggcatttggacaactctcttttttttacatatttctcagacctagacataataaatagatatgtttttaaaagtgaacaggttagaaagcatcactatttactgctgattatgaaacattttaatagcatcaaatttgtaattttagaattttgctttggccttgtttttattttgaaagtttttaaggaatgttctgcaaatgtagtactttagttgaaatggcaaaattttcttgaagagtgtgaaatgttaaaatgaaagaaaacagcaaaaacattcactgtttgagcacaatgtagtttgggacagtctatattgtgctttggataaaatgagcattcacatgatccctttggttgaaatactaatgctcctattttattgtgtaatgactaaccattttaaagatgaactcttattctcagccaaaacttgcaatctgaggttatatgtctatatatgaatgagcttacctttcagatattatagctgattcttccctaattctctcagttgaaatgtaccacaacggttttgtcccttttcttcctcctgcctatccacactaattggtcatagtaattcaggtagtaactcctggggctttataaattattataaatattgttgactatttagagtgagtaatcagcaggagggacaaaatggcttgaaagtggtatctctgttttttaattttttatacttttagttataactttcagtatttaggaagaaatacctgaaaggtagatacagattgcaacatgcgtttgtgattattttgactgtgcacaaaagtttatctttaaattagtagaaatagcaactataagggtggggttaaaatataaaataaacccatgggttgtcttgctgctccttaagtaacacaccagtgatgcttgtaaacactttctatagaaagtatctgtgacaatactttaatatttggccaaaagcttataactcctagaggatggtaggaagcttgatagcatccaagctgctaaattcttaggagcctgttcgtgttaaagtacgtgagcctatgagcagtcatttatgctgtgaattcatatctggctgctacttttccttcgacagataagcctatttggctgctaaagggctttttatttggttcttcctcctggtgtgagcatgtataaacagcaggacgttatatagagtagcaaacaataaaatgaggaaaatgcatgaaaactcagtatatgggtgaatagatacttgtttaatatgtgtaattaaacttggtagcataatgtttttgaaactttagatgtaaatgtgtgaatgtctgtccatttgtgaatcctgagagttgccagtcctataagcaatatattcacatgcttctattctccaattttcagtactatggactacaaattttggaaaatgtgataaaaacaaggtggaagattcttccaaggaaccagtgcgaaggtaggaaaataaagaattataaattcagagttttgtttttcctggcatttttattgtagttgactgtttgagggggcatgtaatgaatctttagtatattttgctctaatggagcttattgcttttatcatgaagcaaacaggtctgtttgtattggtgggtacaggaaggccacttacaggttatcttttgggagaaagaggagactggactgttgaaaactctgacaataaatattctagttaaaaatatgggctatggcacagtggcccacgcctgtaatcctaacacttcaggaggccgaggcaagtagatcgcttgagtctgggagttctataccagcctaggcagtatagcaagacctcatctggacaaaaatttaaaaaattagctgggtatggtggttcatgtctgtggtcccagctatgtgggagcattgcttgagctcaaaaggtcgagactgcagtgagccatgatcctgccactgcacttcagcctgggtgacaagagtgagaccccatctccaaaaaaacatatatataaataaaatatgggccgggcacagtggctcaagcctgtaatcccaggacttcgtgaggctgaagtgggagggtcatttaaggccagaagtttgagaccatcctgggtaacatagcgagaccctgtgtttacaaaaaatttaaaaattagccaggtattttggtgcaggtggcggcggggacaggggtatcagtggggtgaggtaggaggatcccttgagccaagaggttgagactgcagtgagccatcattgtgccactgtactctagcctgggcaacgagcgaaactccgtctcaaaaaacaagaacaacaacaacaaaaaaaaccatatgtaaggttaactcgggaatggaaaagccaagtactaaagatcacaaagctgttttgccttttgtggttctgggaatgccttggaagaggttggcttctgaaatgaagaaagatcagaaaatgaaggtgtagtgatacctgttaatgagtaatttaacttttctgtctgtgctaccttgaggaatgtagtcatattttgagaaacctgaggcaacattagtttcttgggattctttgatttagctaatttcagttatgatacactgcctttttacctactatatttcatttatctctgaaaaatagaaatttttttcttgactttattatggggcacatgatacttctagtagtattttcatttaaaatatgtctaatttctttgattatttgtcttttaagtattgtccttcacctgcattctcttatcatcattatggtagaatagtgacatggatttacttagctaatctgacttaaaccttgacaaagtttgagcacatttagagttgaatgtgatgagattttaatgccagtgtctttttttaagaatattaagtatattcagtggcaatatctttaatacatcataaatcatagattaagagtgatagtgcaggagcaaataatgtgccctaaaagaggttctcatttctttaaatgttttattatggtttgaaactattttagatcacgttctgtgatggactgagaaattaataagcacaatttgactatgtggtccaagtaggtccttcatactttattcttcagggatctttagtgtagtcattccttgtttctttactactattgttttactcatgtgttatgagccccagatttaattttggccatggtctgccgtaccaagaaaaggtgatttacttctgtcccattttactgttgtataattttaaatcctccttttgttcttaaatctgcatctctgttttttatcacatttgatggttctggaagatgttttccaggttgaaaatagatatgattatactagtttatcaacactgtagttacatttgttacagacaaaattaatttaaaaaatttttgtttctttctttcttctttgttgagacagattctcactctgttcctcaggctggagtgcattggcaccatcactgcagcttcaaatagctgcggtcaagcaatcctcccacctcagcctcccgagtagctgggaacataggcatgccccaccatgccctactaaattttttttttttttaatgttttgtagggatggtgtctcgctgtgttgcccatgctgctggctgctgggcttgagcaatcctcccaccttggcctgccagagtgctgggattgtaagcatgagccaccatacttagtcaacatgattacctttttaattttaactgggaggcttctctaacctaaagatttatttcacaaaatacactagaacttctgaacattaattttccttcatctttaagtaactttggtattggaaattacataaattaatttaaaacattttatttcctttttctgtaagtgtcctgtcttttaaaggtattcgctttgctttttgctgtagctataccctttgtccaactaccatagcatatatatttgttcacctggggtgcatattgtgcgtttcctttgtaccgattactactaaatattaaggttataaaaatatacatgtacatcaaagtgctgtatgtcacagtgttatagttgggaagacaaaacacatgtaaaagaggaatcataaatcagcaaattaggtgtatataatgagtgcttcacaagctaaaagaacagaatgatgtctaagtccggccctttagctaagtttcattcacataattggaaagaaatgcctggtatattttaaaggaaggaaaggtttcactgcataagagtatgccaaaattagattcctgcattttttttctgatgtagaatttgttttatctgcttttaggttcttgtccacagcatgttaatttttacgtggtgtttttttttttttttttttttttttgagacggagtcttgctctgttgcccaggctggagtgcagtggcgcagtcttggctcactgcaagctccacctcctgggttcatgccattctcctgtctcagcctcctgagtagctgggactacaggcacccgccaccacacccagctaattttttttttttttttttagtagagatggtttcactatgttagccaggaaggtctcgatttcctgaccttttggtcctcccgcctcggcctccatgcctgttgagattacaggcatgagccactgcctggctaacatgttcttttaaattaatgacattttcaatttaggcctcttgtataaatactgtcaggaaaatctcatgattcttgagtgggttagatgtctcttgctgtgttatacgttactgtatcctgtaccagtgggtcacaggagaataaaattttaaagagcaaaagataggctcagcacggtggctcacgcctgtaatcccagcactttgggaggccaaggcaggcagataacgaggtcaggagtttgagaccagtcttaccaacatggagaaaccctatctctactaaaaatacaaaaattagccgggcgtggtggcacatgcctgtaatcccagctactcaggaggctgaggcaagagaattgcttgaacccgggaggcggaggttgcagtgagctgagatcacgccattgcactccaacagagcgagacttcatctcaaaaaaaaagagcaaaagatagacataattagaaagtaaggatgtttaaaagaacatttaattttccaaaagatatttttatagcaagagaaatggcgagataataaaacatttaaataagttgagatttgttatataaaatttattacatttctctggattttcatttagctttaggccgtaagtgtgtgtctatttgtttgtgttttatgtgttttgtccctcacaccccacattacacttggctgttttagtcactttattccccatccttcaaactataagctccttgatattggggctcagagtgtctttttttctttggtttttttttggtctgtttttgtgtttgtttttgtttaagacagagtctcgctctgttgcccaggctggagtgcagtggcgtgatctcggctcagtgcaagctctgcctcccggtttcacaccattctcctgcctcagcctcctgagtatctgggactgcaggcgcctgccaccacgcccggctaactttgtgtgtgtgtgtgtgtgtgtgtgtgtgtgtgtgtgtgtgtgtgtgttttgttttttgttttttgtttttttttttagtagagacggggtttcaccgtgttagccaggatggtctcgatctcctgacctcgtcatccgcctgcctcggcctcccaaagtgctgggattacaggtgcgaaccaccgcgcctggctttttctttgttttttaaagatgtagggtttcactctgttgctcaggctggagtacagtggtgcaatcatggttcactgcagcctggaactcctgggctccagtgatcctcttgcctcaggctttttttcttttttttttgtgagacagagtccctctctgtcacccaggctggagtgcagtggcgcagtcttggctcactgcaccctctgcctcctgggctcaagtgattctcatgtgtcagtctcccaagtagctgggattacagatgcacaccaccatgcctggctaatttttgtatttgttttagtaaggacagggtttcgccatgttgaccaggctggtctcgaactcctgacttcaggtgatcctcaccctcccagagtgctgggattataggcgtgagccattgcatcctgccctcttgcctcagccttgagagtagctagcactgtaggtccgcaccaccatgcccagctaattaaaaaaaatttttttttttagagatagagtctcactgtgaagcccaggctggttttaaactcctgggtttaaagcagtcttcctactttgccgtcccaaattgctaccaagcctggctgggaaattttaatatgtcaaatggaagaattccctaataaagagtggttgctattcatggtagtcttttatttattcatttgttttgagacaagatctcactgtatcacccatgctggagtacagtggcacaatcatagcacactgcagccttaaactcctgagctcaggcagttaccacgccttagcctgccaaaatagctaggactacaggcatgtgccaccacacccagctaagtttttctaattttgatagagacacagtttgcctatgttgtccaggcttgtcttgaactcctggcctcaagtgatgctccaacctcagcatcccaaagtgctggggttacaggtatatcaccactcctagccatcactgaagtcttaaaggtcctctaggactgccagtggtgttgattctttatcagagtcatgattcagataattccccatccctttttaaaaatggcatttaggctgggtgtggtggcttacacctgtaatcccagcactttgggaggctgaggtgggcagatcacctgaggtcagttcgagactagcctggccagtgtggtgaaacccggtctctactaaaaataccaaaattagctgagtgtggtggcagatgcctttaatcccagctaattgagaggctgaggcaagagaatcggttgaacctgggaggtggagcttacagtgagccaagacagcacgactgcactccagcctgggcaacaagagtgaaactctgaaattaaaaaataattaattaattaattaaaaatggcatttagataattcaaataaaaaaaaagaggaagcctcctttgttcctgttggggggaaagatgatgctatataaaggtatttctgtactttttatttaaaccaagggattgttttaatcagttaatgtgtatggcttatagatcatttcattgattgataaaaacttactcacaggcggggcatggtggctcatgcctgtaatcccagcactttgggaggctgaggcgggcagatcacctgaggtccggagttcgagaccagcctgaccaacatggagaaaccccatctctactacaaatacaaaattagccaggcgtggtggcgcatgcctgtaatcccagctattggggaggctgaggcaggagaatcgcttgaacccgggaggcagaggtcgcggtgagctgagatcgcgccattgcactacggcctgggcaccaagagcgaaactcagtctcaaaaaaaaacccacacttggctcacattgaatagagaagaagcgaatttatgaaaaaagtaatccaaagtggaaagatcgtaattacaaggtttgattttttttttttgtttggtttggttttttcgaggcggagtttcgctgttgttgcccaggctggagtgcagtggctcaatctccactcactgcagcctccgcctcctgggttcaagctattctcctgcctcagcctcccgagtagctgggattacaggcatgtgccaccatgcaaggttggttttgttttgttttgtttttttttaattttgcgacggagtttcgctctgtcgcccaggctggagtgtagtggcgagatcttgggtcactggatgctcagcctcctgggttcacaccattcttctgcctcagcctcctgagtagctgggactacaggtgcctgctaccacgtctggctaattttgtgtgtgtgtgtgtgtgtgtgtgtgtgtgtgtgtggtttttttttttttttttagtagagatggggtttcaccgtgttagccaggatggtctcgatctcctgacctcgtgatccaccctcctcggcctcccaaagtgctgggattacaggcgtgagccaccgtgcccggccaggttggattttataagtagttgggccactaaaatttctgagttgtacagtttcatgtctttagttggcagaccaaagctgatccactcataaaattttatttagtgctctcctttgacgtgagacacgtggtatatttattggcaccgtaatactggctacattatttgacctcatatttcagtttgtgttgcaaggttttgggcattagagctaatgtataggaagccctgtgcttacatatgctgagtatgagtaagtagtgggttaccaactgtttttgatgaaatatctgcatttcaccaaattgccatataccagtctcaaaatatcctgaaccttctgaaataccttcctaagtgagctcactaacacctacttttctgtgtcctttacaattttttcaccacaaagtctcaaagtttcagaaacggaactaatagggtcacttctgctgaagatctcctgtagtattgaagatatttaacatgtttcctttaattgatattggcctttgagaatttttgtatttgccttatttattaggtttaaagtgtacagttggataagttttatcttgtgcatgctcctgtgaaactacctctgtataatcaagatctgcctctatccgattactttcaccttcactgcccctcttcacatgtgcttgttgtcacttgcttggtaagagtggaatggctggattgtgtggatttttttttttttttttttaagacagtcacactactctgtcgcccaggctggagtgcagtgtcatgatcttggctcattgcaacctctggctctcgggttcaagcgattcttgtgcctcagcctcccaagtaggtgggattacaagcatgcaccaccacaccagcataatttttgtttttgtaatagagtttcgccatattggcctggctggtctcaaactcccgacctcaggtgatctgtccacttcggcctctcacagtgctgagattatactcataagccactgcgcccagcccatatggatgttttggtgtatgtttaagcatccaactgtattccaaagtggtcatgtcagtctcaccagcagtgtataagtatgtttcacatctcggctgacatttggtatagacaatgtttttagtttggctattgtagtgcatatacaatagcatctcatggtggttttaatttctttcttttttttttttttttttaaagacagagtcttgctctgtcgcccaggctggagtgcagtggcctgatctcggctgactgcaacctctgtttcccgggttcaagcgattctcctgcctcagcctcctgagtagctgagactacaggcatgtgccaccacacccagctaattattttgtatttttagtagagacgagctttcaccatgttggccaggatggtctcgaactcctgacctggtaatcagcccacctcagcctcccaaagtgctgggattacaggcatgagccaccacgcccagccttaatttccatgtggagtagtgttgttctgtgttccatcacatatccttacatgttctttgccatgccagtatgtttttggtgaaatgtctgttcaaaaattttgctcagttttttttttttttgagacggagcctggctctattgccccagctggagtgtggtggcacaatctcagctcactgcaacctctgcctcctgggttcaagcgattctcctgtctcagtctcctgagtagctgggattacaggtatgcaccaccacgccctgctactttttcgtatttttagtagtagagatggggtttcaccatgttagccacgctggtctctatctcctgacctcgtgatccacctgcctcagcctcccaaagcgctaggattacaggcgtgtaagcccaccatgccccgccaattttgcccagtttttattgggctattcccttattgagatctaagggctctttgtattctagtcaggagtattttgttaactgtatattttgcaagtgttttgtctgtggcttcctgtttaatttttgtaatggtgtcttttgcagagcaaaaatttcagattttgattaaaatcagtgttgatttttttttctttatatagttgatgttttttgtgttgtattcaagaaatctttgtcatgcaaaggtcacttaagattttctgtaagtttttggctgggcacagtggctcacgcctgtaattccagcaatttgggaggccgaggcaggcagatctcttgaggtcagcagttcgagacgagcctggtcaacagggtgaaaccgcatgtctactaaagatacaaaaattagctgggtgtgttggtgaattgcttgaactggggaggcagagactgcagtaagcctagatcacaccactgccctccagcctgggtgacagagcaagactctctctcaaaaaaaaaaaaaaaaaaaagatattctgtacgttttcttatagaacctttatagttttagcttttgcattaagatctgtgatttggctgggcacagtagctcacaattgtaatcccagcactgggaggccaaggcaggcggaaacaatacaaacaaattagccaggcgtggtggcatgcacctgtaatcccgactgccaggaagctgaggtgggaggaatgcttgagttgagttcgggaggtggaggttgcagtgagccgagatcatgccactgcactccagcctgggcgacaaagaccctgtctgaaaaaagcatcatgtgattcattttactcaatttttgtatatgaggtgaggtaagggtcaaggtttatatatttatttgagacagagtcatgctctgtctcctggccagagtacagtggcgcgatcttggctcactgcaaactccacctgccagattacaggtgcacaccaccacacccggctaatttttgtatttttagtagagatggggttgccccatgttggccaggctggtctggaactccagacctcaagtgatccgccagtctcagcctcccaaagtgctgggattatgtgtgagctaccgcacccagctccccaactttgtttctaaaaggtttggctattgttggttttttgctgttccataaaaattttagagtgaaatctggcaaatttcaacaaaagctgtcctgaaatttttattgagattgccttggatctgtggatgcatttggagagaatgaacatctttaatgtcaattcctgattatttcttgctaatatagagaattgccattgttcacttatctcttgaacgtgtagtttaatccagctagtcaaagcccagttcaaactcactttcccttcctgttgtgagaaaacacctcaattttgcaaaagctcttggaatttaacatttctgctgcttttccctgtatgtgtggtgtttagtcttttcatagttcgttgactatggaattcagagcagaaaccctatttcctaatttccttgggaagttttcagaactagatgataatgtaagtttctaataagttgatagtgttactcagaggtgattgtttcatttatgattttgaaaagaaaatgtaaatattagacttaagtccttgcatctaaaacaaattcatgagaaatcccacagaatacaatgttagagatgggagcaaaaattatcagtctaatctcagagagttgacaggcattccaaatcgttttttgtcagtatttaaaccatggtaggataatgtaagaaatatacttaatgcctggtgcgatgtctcacgcctgtaatcccagcactttgggaggcctaggcaggcaattgtctgaggtcaggagttcgagaccagtctggccaacatggtgaaaccccgtctctactaaaaatacaaaaaaaattagccgggcatggtggcgtgtgcctgtaatcccagaatcccagctactcggtaggttgcagcaggggagttgcttggaccagggaggtggaggctgcagtgagctgtgatcatgccactgcattccagcctgggcgacagagcaaggctccgtctcaaaaagaaaaaaaagaaaagaaaaagaaatatctgtaagctataaattatgtttttcatttctaaaaaaaacaaggcaggccaggcacagtgattgaggcctgcaatcccagcagtttgggaggctctcttgagcccagaaatttgagatcagccaggacaagatagttagacttctctctactaaaaatacagaaaactagcagtgtatggtcgagtgcccctgtagtttcagccactcaggaggctgaggcgggagaatcatttgagtccaggcaggaggtcgagccctgattgattgcaccactgcactccagcctgggcaacagagtgataatatctgaaaagataggctgggcacagtggctcttgcctgtaatcccaggactttgggaggctgaggcaggcagatcacctgaggttgggagttcgagatcagcctgaccaacatggtgaaaccccatctctactaaaaataacaaaaaaattagctgggcgtggtggcgcattcctgtaatccctgctactctgaaggctgaggccggagaattgcttaaacctgggaggtggaggttgcagtgagccgagattgcgccattgcattccagcctgggcaacaagaacgaaactctgtctaaaaaataaagaaaagaaagcagtattttcaggcacattgtatatgattgataggaatagtatttccatttctggttaatgtaacaatttgccccattccaagtattttgattacaggcctccatgaaaggcctatacttgatacctaacagtgtttgatccctagcttacatccatgtaacttttttttttttttttttttttgagataaggtctcacgctgtcgcccaagctggagtgcagtggcgggatcatggcttaactctagcctcaacttccggggctctagcaatcctcctgcgtcagtctcctgcataactgggactacgtgcgcatgaatcatacctggctcactgtttctattttttgtagagatggggtctcgctatgttgcctaggctggtcctgaactcctgggctcaagcgatcctctgcctcagcctcccaaagtgtttagattacagtcaagagctactgtgctcgacctgctttcaccttttggctatcatgagtgatgctcctgtcaattttaataaaattttaatcttttagattttttgtccagtgtgtttgaggccataaacatccatttaagaatggcggatgtgcatatagatccatttctcttaacattatcaaagcaggttaaattatagattatctgtgggaaccctaacttaactcctgctttagaattattgttagctgtttgtcttccatgtggcattgttcttattaatatttcattgagagaacagtagtaacaatatcctgtatacccttgtgtaagtaaagagagcagatcactattttattgaccatctttcaaaagatcgattttgtgtgtttttttgttttgttttgagatagtctcacattgtcgcccaggctgcttggattgcagtagtacaatcttggctcactgcaacctctgccttccgggttgaagcgattcttgtgcctcagcctccagagtagctggtactacaggtgtgcaccaccatgcctggctatttttttgtattttaatagacaggtttcaccatgttggcctggctggtctcaaactcctggcctcaagtgatccacccacctcggcctcccacagcgctaggattacaggcttgagccaccacatccagccaattttgatgttttcatggactgatacttgtaataaacatttcaattatatatagcattgatgtagaaatgtaccaaatttacatttttttagcttatggaataaataaatgtttaaactgaaattgattcgaaactagattgaacttgcctttttcctatttgtaatttacatttttaatagtgtatcaaaagccttaaaccattttctgtggtgcaggttgactgcctcttgctggaaatgcttgggatgagaagtgttccagactttgggctttttcagattttggaatatttgcattatgctcacgagttaagcattccaaaactgaaatagcccaatgagcatttcctttttttttccttttttttgagacagagtttcgctcttgttgcccaggctggagtgcgacggcatgatctcgactcactgcaacctctgcctcctgggttgaagtgattctcctgcctcatcctcctgtgtagttgggattacagtcatgcggcaccatgcctggctaattttgtagttttagtagagacagggtttcttcatgttggtcaggctggtctcaaactccaaacctcaggtgagccgcccgccttgtgttgggattacaggcgtgagctatctcacccaacctgagcatttccttttagtgccatgttggtgctttaaaacttgcagatttggggttgggcgtggtggctcatgcctgtaatcccagcactttgggaggctgaggcaggtgggttgcctgaggtcaggagttggagaacagcctggccaacatagtgaaaccttgtctttacctaaaaaaaaaaaaaaatcagctgggcgtggtgacgggcacctgtaatcccagctactctgggaggctgaggcaggagaatcgcttgaactcgggaggtggaggttgcagtgagcggagatagcaccattgcactccagcctgggccacaagaatgaaactccatctcaatcagtcagtcaatcttgcagatattggagtgtttcagatttcagatttggggtacttaaactgtacgtgaaaattagctgctggggaggagaggaattggaatatgtaacatggactcccacattttaaggatttttctaggactgcatctttctcttaataagtcagatccttatttggttgaaaatgtttactgcatgactatcactgactatgtaagatgctgatgtacaactctatgacttgaagattgagttgcttctatgggaatatgacaccatttgaattaatttgttctcaatattttaaagagttttagtgaattctgttcatataaaaatcaggttcaataatgcgtgctttttacgctatcattgagtatccagtgtttacaaggtgtttctgagggataagattattattgctgtgtaaagaatttggcagatggtgtgtaccttctaagttagcttgaggtttatttaaatctcatctttttagcttgctgaagttgatactatgcagttgcaagtttatattgactatttgatattgctgtgtttttatttgaaatgggactgttagacacatttttctttatattgagcaatagagctggaatattaaagatgtatgcattaacccttgcatttggaacatttacatgtcataagctgcctttcagtaagtggttaggcatttctacgggtgtgtattatattttgaataaattttatatggctttccaagaaacaattagagcatttgacccaccgactttgttgtttatttttatttttttgagatggagcctcccgcagtagagatagagtttcactatgttggccaggctggtcttgaattccgcctcaggtgatccacgtgccttggcctcccaaagtgctgggattacaggtgtgagccaccatgcccaacctgacctaccaactttggatgtgaatttttttcatttatattgagaagaatagggtcttgggccactagattgtaccagtgctaagtcagtatctgaatccattgaagatcctgttggcaacgtcaggacttatcaaagacacacaacttcaatgagaacctttctttggaattaattaattaatgatatggagccttgatctgtcactcaggctggagtgcagtggcactatttcagctcactaggaatgcatctttctcttctctttctccacctcccaggtttaagcacttctcctgcctcagcctcccgagtagctgggactgcaggcacaagccaccatgctgagctaatttttgtatttttagcagagacaaggttttgccatgttggccaggctggtctcgaactcctggcctcacgtgatctgcccacctcagcctcccaaagtactgggattacaggcttgagccactgtgcccggctgccttgtttgatttttttttttaaagagacagagatcccctctgttgcccaggctgaagtgcagtgacacaatcatagctcgttgtaacttcagtctcctgggtgatgggtagaattctgccacagcccaagtagctaggagtataggcacgaacgactgtgcctagctaatttttttattttttgtggaaatggggccttgctgtgttgcccaagctggtctcaagctcgtttcctcaaaccctcctcccatgtcagccttccaaagctccaggattacaggtgtgagccatcgtgcgtgacttgtttttgatttttgtatcgttttcttcactcttttttttttttttttgagatggagtctcccgctgtcacccaagctggagtgcagtggcacaatcttggctcactgcaactgcatcttgggttcaagtgattctcctgcctcagtctccccaagtagctgggactacaggcgcatgccaccacgcccagctaaatttttttgtttttattttttgcatttttagtagagacgaggtttcaccacgttggccaggctggtcttgaactcttgacctcagatgatctgcccgtctcggcctcccaaagtgctgggattacaggtgtgagccaccgcgcccggccttcttcaccttttgtatcaagctttttaaggaagagcttagaaagccagtttaaaggaattgaaatgtgttatgtaaatgtctgttttgcaactgagacccactaatttatttagaacaaaaagtcagagaccagtaatgggtccttttctgtcaaatttcaagctgagctgtttctgctacttagaaacatttcgattttctacctagatatgtattatatcattgctaattatttatttatttatttatttatttatttgaggtggagtctcactctgtcgcccaggcttgagtgtactaatttatttttaagtgcagtttaacattggatttttttttttttttttgagacggaatcttgctctgtcgcccagactggagtgcagtggcacgatcttggctcagagcaacctctggctcctgggttcaagcgtttctcctgcctcagcttcccaggtagctgggattacaggcatgagccactgctcctggcctacagttggaattttttgttgttgtttttgagacggagtcttgctctgtcacccaggcttgagtgcagtggcgcgatctcagctcactgcattgtccatttcctgggttcaaatgattctcatgcctcagcctcctgagtagctgggattataggcgcgtgccaccatgcctggctaattttgttgtatttttattagagacagggtttcaccatgttggccaggctggtctggaactcctgacctcaagtgatctgcctgcctcggccttccagagtgttgggattacaggcgtgagccatccgtccggctggaatgctattcttaattgacctgcatttatttatttatttatttatttggcaagccttgaggaagggatttggggaatgaacaatggtacttgatcaaataatccttgtactaggcaatcacagtttctagggccactgtacctggccatgggggttttattgataataatctgtaaggaacaaaagggttagtactatcggaatttttgattagatgtagtgagcattaaggacatatggaaagtagtttgaagtaaaatatatacagtataagagtcagaatcagccaggcgcggtggctcatgtaatcccagcacttcgggaggccgaggtgggcggatcacctgaagtcaggagttcgagatggcctggccaaaatggtgaaaccccatctctagtgaaaatacaaaaaaaagccaggtgcggtggctcacgtctgtaatctcagcactttgggatgctgaggcaggataatcgcttaaacctggaaggcagaggttgcagtgagctgagatcacgccactgcacaccaatctggggtacagtgaggctctgtctcaaaaaaaaaatacaaaaaaagtagccagacatagtggcatctacttgtagtccagggtactcaggaggctgaggcaggagaatcacttgaacccaggaggcggccgtgtcagtgagcctagatcacaccactgcactccagcctggaagacagaggaagactccatctcaaaaaaaaaaaaaaaaagtgagaatgttgcatagattacccaagttaattcttataatttagtgttcatttaaaaggaaaattgatttcctactttttgtttttaaaaatagtattaggctgggtatggtgggtcaggcctgtaatcccaacataaaatgtggccaaggcaggaggattgcttgaggtttggagttcaaggccagccccagcaacaatgagaccaggaaaaatcagccaggcacggtgctaagcacctgtggtcccagctagtcagctagctgaggcaggaggatcgcttgagtccagaagttcaaggctgcagtgagctgtgatggcaccactgcattctagtgtgggcaacagaccaagaccctgcctctaaaacaaaatgtaaaaaatatattttccatttccctattcattttatgtatttgtagcataaatgttactatgcatattgacacttaacaccattagatttctcttacatgtattacgttgctttactgcattagtaatatttttttcgtaattaggaaagtccataattactgttacagaaattttttatttgggatattgtgggaaatggctagtgttgtcatagttaataaaaattatataattaagtgccattgaagaaccatagtttgaaagtgaatttaatacattagctcatagttatacaatctcacaagcattttgctgccttcaggttgtcagtttcctgctaatgctaatgactaaattttttatttttcttttcaacgaaaatttcactcagttctatatatgccagatgaggcttggaacatacagctctacaacctttaactgcttttccaaaaatctgaacgctatgaaaatgaaaaatcttcataatttaactgatttggtgacaaagcgtaaagtgaacagatgtgagagtatttgtaattgttaattttacgtagtaggaaatagtaatttgttcaattagggttgctacttcatatccttttagtgtttcaatataggtgtaccacactacttttcctttaaaaatgttctcagaatttaacattctgcaacactcttgaaccctgtgattttggagaatggaacctatagtagatgctcagcaaattctacatgatgcaaattaaaatcaaggatatgagtatcatgtcttaactgtttaaagagtaggttttactatgaagagatccataagtaaagagcatttgaaatgaaaactttttcctaaacttccctcttttttttaacattgtgtgtgtgaagttaatgttgtatttctaatatgagcttaatgttgcaattaatgtatagtggaaaataataacacgtatattaattcatttttgagacaagagttcgctctgttgcccaggctggagtgcagtggcatgatctccgttcactgcagcctccgcctctaggcctcaagcgatccaccggcttcatccttccaaagtgctgggattacaggagtaagccactgtgcccaagccatcaataaatttttatgggttagaagtttgggccaggcctggtggctcatgcctataatcccagcagtctgggaggccaaggcaggtggattacttgaggtcaggagtttcagaccagcctagccaacatggtgaaaacatgtctctataaaaatacaaaaagtagctgggtgtgctgggcgcagtggctcacgcctgtaatcccagcactttgggaggccgaggcaggcagatcacgaggtcaggagatcgagaccatcctggctaacacggtgaaaccccatctctactaaaaatacaaaaaaatagccgagcatggtggcgggcgcctgtagtcccagctacttgggaggctgaggcatgagaatggcgtgaacccaggaggtggagcttgcagtgaggcgagatcgcgccactgcactccagcctgggcgacagagcgagattctgtctcaaaaaaaaaaaaatagtagctggatgtggtggtgcgtgcctgtaatcccagctgctcaggatgctgaggcaggacaattgcttgaacccaggaggtggaggcggaggttgcagtgaaccaagattgcacctctgcactccagcctgggcaacagagcaagactgtctccaaaaaaaagaaagaaaaggccgggtgcagtagctcacacctataatcccagcactttgggaggccgaggagggcggatcacttgaggtcaggagttcaagatcagcctggccaacatggtgaaaccttgtctcttattgaaaatacaaaaattagccaggcatggtggttgatgcctgtactcgggagcctgaggcaggagaatcacttgaacctgggaggcagaggttgcagggagccaagattgtgccactgcactccagtgtgtgtgacataacaggactccgtctcaaaaaaaaaaaaaaaaaagaaaagaaacacatggaaccaaatcaggatgaaagaaactggaatagcagtttgttataggctgggcttgttggcttgttcctgtaattccagcactttgggaggcccaggcaggaggatcacttgagtctatgagtttaagaccaacctgggcaacaatgccagatcccatctttaaaaatatgaatagcacattaaattcattgattttttttttttaagtcttgctctgttgcccaggctggagtgcaatgacgtgatgtctgctcactgcaacctccacctcccggattcaagtgattcccctgcctcagcctcccgagtagctgggattacaggcacccgccaccacgcccagttaatttttgtatttttagtagagacagggtttcaccatgttggtcatgctggtctcgaattcctggcctcaggtgatccacccacctcagcctcccaaagaattgctgggattacaagcgtgagccaccgcaccgggccggaatttttttaaaatgccaatactggtgacaggattagagtatattaactgattttacttagtctttccattcccacattaattagttctcaaaatttatttgcatgctacaaaagagctcaacaatttttttattacgtgcaatttttttaataggaataaaaaaatacgttgttggcctcattatcaagacgtcatctgacccaacttgtgtagaggtaagagtttattttggagcttattgggagagcataaaatcatttagatattgagtctgactacaacctaattctgtcaagacacatagtcacacatatgcacagtcagtcatttacagtagagctgtaatcatttgttaggattgtctggttatattcttatttatacttacctcaggctctcatttaatcttttacttttccttagaaagaaaaggtgtatatcggaaaattaaatatgatccttgttcaggtaagctttaacttaactgttttccttagaagaattatgcttattatttgaacaaaatgttcgacctacttaggaaataaagtatactaatattttgcagaagtagtgatagtattcttataataataggtaacctactgtctagtacttgaatgttaatttgctgtggcagtaatcatcaaataacgttaaagccatcatttatgtggctgcagtgtggactggactctgttggattcttatttatcttttcttttcttttttttttttttttggagacagtctccctctgttgcccaggctggagtgcagtggcatgatctcggctcactgcagcctctgctacccgggttcaagcgattgttctgcctcagcctcctgagtggctggaattacgggtgcttaccaccacgtttggctaattttttgtatttttagtagagacagggtttcaccatgttggccaggctggtctcaaactcttgacctcaggtgatccacccacctcgacctcccaaagtgctgggattataggtgtgagccgctgcacctggccggattgttttttaattttctgatatgcctgtgcatatttcctttgcatgtatgtctctgagtcctttgatttcctcgtccttctaattgatttccatgcttagtccttaaactgtctatgtagactaaatttataatttttatgtttatctgttttctatagtaatatcataaaattttttccagagaaccctggtatgtgtgggggaaaaaacagtaatttctatttaaataagacttagaaacatccaagcttccaaaaattttagtgtattcagtaattaactccagcttttattatactttagagctttctgttagcccttctctgagtggtgagagagaggagagaatataaagaaggttaacatgtatttttataatctgaaaaatcccttgtgtgtgccataaatagtccagacttgcatacaaatataatgcagttcatgaggcttttggttaaaagtttattcaggccccgattgcagtgcgtcctctcttttaaattcatatatccaaaccctactacatttcaaggctcaaattgcatccaataataagctgtcttaaccggtcactttttatcaccaatggttaattaaatccttgagtctcctaggataatttcttcttttcttgtttgaaatggagtgtcgctctgtcgcccatgctggagtgcagtggcaccgtcttagttcactgaaacctccacctcccaggttcaagcaattctcctgccttggcctccccagtagctgagactactggcccgcgccaccacccctggctaatttttgtatttttagtagagacggggtttcaccatgttggccaggctgctcttttttttttttttttttttgagatggagtctcatcctgttgcccagccttgagtgcagtggcctggtctcggctcactgcaacctctgcctcccaggttcaagagattctcctgcctcagcctcccgagcagctgggatcacaggcacacgtcaccatgcctcgctaatttttgtatttttagtagagacagggtttcaccatgttggccaggctggtcttgaactcctgacctcgtgatcctcctacctcggcctcccaaagtgctgggattacaggcacgagctaccacgcccagcctggccaggctgttctcagactcctggcctcaagtgatctgcccaccctggctccccacaaagtgctgggattacaggcatgagcaaccgcgcaaggcctcctagaataatttctacatatctatcaggcagatactaatacacagacagacccattagacggattggacctttcattaggataattgaaaagggtcctgcggtgattaagataaaagactttgtgttttgttttctacccagtagggtgaagagggtggcacatttcttcctttaataaaggaggagaaaatgaaaagtgatttatccttactcctgcctttatccattacataatttctttgaagtttgttttatttgcctttgagaaatgaagtgcgattaacatttcatgtcttgttttagatactgaaacaagaatggcccaaacattggccaacttttatcagtgatattgttggagcaagtaggaccagcgaaagtctctgtcaaaataatatggtgattcttaaactcttgagtgaagaagtatttgatttctctagtggacagataacccaagtcaaatctaagcatttaaaagacaggcaagtaataattatgttttagaattttaaagtgatttctcaaacaatttcaagcagtttggatgtaaattgtagatattttaaggaactatgatcagtaatatgttaaattgcttgtagtggttttcaactgcagattaagaaatagtcctagacggggcctaataatttacctctgaaggttgaaaaatgaattgttcaagacacacttcaggaattgttttgtatggtaactagtttaataggttctaagcaaatgatttgtgtccaaacatacgtattagttattttattttattttgagacaagtcttgctctattgcctggggtggagtgcagcagcgcaatcttggctcaccacaacccccacctcctggattgaggtgattttcttgcctcagtttcccaaatagctgtgactgcaggtgcatgccacagagcctggcctcaaatcagttattgtctctgcttcttttcagttccccaattgttaacaatagtgttctttttaaaacaaaacagaaaactagatttgcctctaatagtaagcaactggtataaactatagttatacttccattaagttttaaacatttgttgtagtcattaggaaatctttttccccttgggttgcccaggctggtctcaaacaatccttctgccatggcctcccaaagttctgcgattacaggcatgagccactgtactgggctttaatcatttttattagtattatagataactgatacttatttctgtgtcttctaaatctgatatttttgtgtgtttttttttttagcatgtgcaatgaattctcacagatatttcaactgtgtcagtttgtaatggtaagtgtttttaatttcatttttaaaaacaataataggaaagcaattatttacaagtgtgttttgttataggaaaattctcaaaatgctccacttgtacatgcaaccttggaaacattgctcagatttctgaactggattcccctgggatatatttttgagaccaaattaatcagcacattgatttataaggtacagtgaatacatttcagttatttgtcaccggatagccacatatattcttttcacatgtaaagctctcatctctgcattctaaaccttattcaaccttgtttctaacacgaggacgctgctcaggagaaatttcccatattcacacctagtaaattatttaaagtgagtttcaaatctgattctgccacttagaccatgtaattttatgaattcattttgaacaatggatttgattatattgcttttagtttgagtaagttacagtgaggtaagtcaagtgctatttctgaaaaatgaaaagttcatcttttaactgataatttaaaattgataccatgttatggcttaagttctataatggtttagcctgggcaagttggtgaaaccggtctctactaaaaatacaaaacagccaggcgtggtggtgtatgcctgtagtcccagctactcgggaggctgtggcaggagaatctcaaactcaggaggcagaaggtgcagtgagccaagatcgtgccactgcactccagcctgggcaacagagcgagaccctgtctcaaaataagtaaagttctacagtggtttatccagagataatcactgttaccagttggttgtattatattttcagatgttttcttgactgatataatgaataaattaagtatctaattggaacattataacttgacctcttcaacttcgtagtttagtttggtaagataatatggatttatagtatttgaatgatcagtttattgcttaattatgtaaaaacctttctattgtcaacagtcctacagagaacattctcagacataagatattatgcaattgtccaaacattaatttatttaaatattttaatgtttaatcaccagattattaggtatgtttaattttaaggttttaatgccccctgatttccaaccccagacgataactgtttatcttctcaacaatagaatatataagccaattttcccatattcttattactcttagatacattgaccatttcccaaaattctaagcaatcacaagttttaggtcctgtgtaattacacagaaagtataacattcctaaaagtcatatcacagattctaggaaagttgttaaggagccttgttattttaggacacatcaaaagaaagcagtttaggccgggcgctgtggctcacgcctgtaatcccagcactttgggaggtcgaggtgagcggatcacgaggtcaggagatcgagaccagcctggcccaacgtggcaaaaccctgtctctactaaaaatacaaaaattagccgggcgtggtggcatgcatgtgtagtcccagctatttgagaggctgaggcaggagaatcgcttgaatccaagaggtgaggttgcagtgagccgagatcaagcccctgcatttcagcctgggcgagcgagactctgtctcaaaaaaacaaaaaaagtttgctcctaaagcatttactgtatactaggtaggcaataaaattccctctcagtatatctgcatgataaaatatgttcattcacttggcctgtttttgacatctacccctatatttaattgttaaagcctttttccttttaattgtgaattttaagtaaagtgtgtatcaggccaattaattttatggttccctccccccttttaaatagttcctgaatgttccaatgtttcgaaatgtctctctgaagtgcctcactgagattgctggtgtgagtgtaagccaatatgaagaacaatttgtaacactatttactctgacaatgatgcaactaaagcaggtaatataatactatcttgaaaattggctgaataattttagtgccttagaaaataccaaattccaaatgagttattttagaacgacgtatcaaagataagccataatcttttgtttattacataaaatttgtagtaagctacaaatttttatgatgtttccaaaaatttcttaaaattcaggtttggggtgtgttgtggtaatttatttctgcacactttaggagcttggtcttttgggagatacctgaccagacagtgggaaacctgggacttgttcctaacattgtgtctgaaggaattcttttcagccctagtttgattggttatctattaaatgatctagaaggttattcataatactgtgttcatggccaggcatggtggttaatactgtaatcccagaactttgggaggccagaatgggaggaccagttgatgccaggagttcgagaccagccaggacaacataaccagaccatacctacgaaagatttaaaaaatagctagctgtggtgttgcacacctgtagttccagctactctggaggctgaggcaataggatcgcttgagcctattaatacaaagttaaaatgagctatggtcacactattgcactccagcctggatgacagggtaaatccctgtctcttttaaaaaacaaggaaagatagattactatgtatgtttgtgatctgaatgaatgaattgattatttttacatttttcaatgtcagtgagaaatactagaaaaatttaaaggctgtgatagcggcctttaatttatttgagaagagtcaaaatctaagtcctagagatataagaataggtatactggacctaggagttctgtatgtggtttaatattagcaaaagggtgttgggatattagggcttaaaaataatagtgttggctgagtgcaatagctcagacctttaatcccagcactttgggaggctaaggtgggaggattgcttgagccaggagtttgagaccagcctggacaacataacaagataccgtctctacaaaaatgttaaaaataagcttagtgcgatggcacatacctgtggttccagctactcgggaggggctgaggaggactgattgggcctaggaggtggaggctgcagtgagctttggtcataccactgcactccagcctggacagagtgataccttgtctcaaaaaaataataataaaatattaagtgtctttagttgttttataaaatgcgaactgatcgtcccttttaaaatttgcagatgcttcctttaaataccaatattcgacttgcgtactcaaatggaaaagatgatgaacagaacttcattcaaaatctcagtttgtttctctgcacctttcttaaggaacatgatcaacttatagaaaaaagattaaatctcagggaaactcttatggaggtaagatatgtggagcttttgctcctaaaattctgctctgcctactaataactcttaaaagtgcctttttctaaaatgtatgtaccttttgagatttcttattacttaatatttgatcagtacattatatatattctcaattctgaattacagttataagcccagttttctgattttatgttctccataaagctaggactaaaaatttataatcaaaattaaattactaattattatatcatttctaaggttaaaatttcaaagaccttattttaaaatttcagttttaattcaaataacatgcatttgttcatttaaagatatacaattcatcgtgtaatcccagcactttgggaggcggaggtgggtggatcacttgaggcaggagttcgagaccagcctggcctacatcgtgaatctctgtctctattaaaaatacaaaaaaattagctgtgcgtggtgtcacatgactgtaatcccagctcctcaggaggctgaagcacaggaattgctttagcccagtaggctgaggttgcagtgagccaagatcacagtactgcactccagcctgagtgacagagcaagactctgtctgaaggaagaaaatgtctctctctctctctttatatatatatataaacttaagtatatatatatataaacataagtatatatatatatacacacacacacacaattcagtggcatattagtatatatacaatgttatacaaccattaatacctagatccaaaacattttcatcacccgaaggtgaccctttacccctaaaacagtcactttctcctttgttctctccccaacttctggcaaccattattttggtttctgtctctgtagatatatctattctgattataccatataaagggaatcatgcatgtgaccttttgtgtctggtttcttttatttggtgttgtgttttcaatgttcttccatgttgtaacctgtatcaatacctcactttttatcatgtctgaagaatattctcattgtatgaatattcagtattttgtttgttctctcctctgtgatggtacatttgggttgtgataccacttattggcacccaaggccttttaaataaatgtcgttccattaggagacatgataaaaatacatattgatcaactactatgtgagagatttttgaagtgctttagggcatgtcagaagaagcagagttactccagagtttgctgtctatttgataagtattgaaatctgagttgtgatgaataaaacatgaatttttattttcccttaaggtgtaacaagtgaaaagcaatttgaagttggtaatgtttaagaattattttaacagttttggtcttctgtgtaggcccttcattatatgttgttggtatctgaagtagaagaaactgaaatctttaaaatttgtcttgaatactggaatcatttggctgctgaactctatagagagagtccattctctacatctgcctctccgttgctttctggaagtcaacattttgatgttcctcccaggagacagctatatttgcccatgttattcaaggtaacagagcggttggttgagtgttcttcctgttgcatactgtggttttgaggtctgaatccaaatacttctaatctgtgtaaataaattagctataaaaagagaacccaacaacttctccatgagtgtggaaaactagaacatgaaaggagttgagtctagaaccttgattctcaagagtgtggtccttctctcagtatcaacattggttgtgatttcgttaggcaaattcattggccacctgccaatctactaaaccagagtctaggaatgagacacaggaaactcctgtaacagaagttggttaaaaaaatcacattaaaacacacttaaataattataaagccatttttgtagaattacagtgaaaaaaaattttttcttttggagacagggtcttgctctgtggctcaggttggagtgcagtggcgtggtcatagctcactacaatcttgaactcctagactaaagcaattctcttgtgtcagcctcccaagtaattggttgcaggcacacaccaccatgcctagcaaattttaaattttttagttttacttcatttatatttacatagttttttctgttgtgctttaagccccagtatttttattgttttagagattgggtgtcattttgtgttgctcaagctgctctcaaattcctggccacaacagttctttttgcctcggccctccggaatagttggaattataggcatgaatccctacacatggctggcttgtggtttttttggttttgtttgtttttaactaagcttctacactaatgatttcagtgatctaacgatttttttcttgattgatatattgttgagtataggtccgtttattaatggttagtcgaatggctaaaccagaggaagtattggttgtagagaatgatcaaggagaagttgtgagagaattcatgaaggatacagattccataaatttgtataagaatatgagggaaacattgggtaagttaataaatactgttaatctttacctttataaatctattctggggtggaaatacattttaggaaatgtacttgtagtttctaaatattttctaaatgtattgttactcatcaataaaattctgctcattatttgcatttgaaaccatgtttttctttgtagtttatcttactcatctggattatgtagatacagaaagaataatgacagagaagcttcacaatcaagtgaatggtacagagtggtcatggaaaaatttgaatacattgtgttgggcaataggctccattagtggagcaatgcatgaagaggacgaaaaacgatttcttgttactgttataaaggtatgcaagggataggtatgaattagaattgctaaataagtattatgttgttacaataaataatacaaatttgtcttatttacaggatctattaggattatgtgaacagaaaagaggcaaagataataaagctattattgcatcaaatatcatgtacatagtaggtcaatacccacgttttttgagagctcactggaaatttctgaagactgtagttaacaagctgttcgaattcatgcatggtaaatctctttctttactatattttgcttttatttttattgaagaaaataaatgaatgtttttgtcttgttagagacccatgatggagtccaggacaaaataaatgaatatttttgtcttgttagagacccatgatggagtccaggatatggcttgtgatactttcattaaaatagcccaaaaatgccgcaggcatttcgttcaggttcaggttggagaagtgatgccatttattgatgaaattttgaacaacattaacactattatttgtgatcttcagcctcaacaggtatgttaagcactgagcatatgttatttttagaaagtaacacttgtatcaatctgtatgtatcaatggaaataggagggcaactattggatccaatagaagtgtttctgattaaattttctttcttttttccttgagacagggtcttactctgttgcccaggcttgagtgcagtggcacaattacggctcactgcagccttgaactcccaggctcaggtgatcctcccaccttggcctcgtgggtagctgggactacaggcatgcactgccatcacactcagctaacctttttcccccccttggtagagatggggttttgccaagtggcccaggctggtcttgaactcctagcttcaagcgatacgcttgcctcagcctcccaaaatgattttatatgtgtgagccaccacgcccagcctggttaaattttcatagtgagacagattcttgaccagaagattgttaggctgttgtcctatgtaaaattattccgaacaaacaaaatcaggtgttttttgttttgttttgttttggggtgtgtgtgtgtgtgtgtgtgtgtgtgtgtgtgtgtgtttgttttttgagatggagtttcactctgtcgtccatgctggagtgcagtggcgcaatctcggctcactgcagccttgcctcctggggtcaaacgattctcttcctcagtggctatgattaacaggtgcttgccaccacgcccagctaatttttttatttttagtagagacggggtttctccatgttggtcaggctcatctccaactcctgacctcatgatccgcccgcctcggcctcccaaagtgctgggattacaggcgtgagccaccaccatgcctggccagtttgggttgtttgtttgtttgttttttgaggtggagtcttcctctgtcacccaggctcgagtgcagtattgcaatctcggctcactgcaacctctgcctcccaggttcaagcaattcaaacctcccaagtaactggaattataggcacctgccaccacgcttggctaatttctttgtatttgtagaagagatggggtttcaccacgttggtcaggctggtctgcaactcctgaccacaagtgattggcctgccttggcttctcaaagtattgggattacaggagtgatccactgcacctgggccaaaatcagtttcaagacgtttgtgaattgcttgtgtgtggttttccttattagggtgtataacataaacgttaaaatgtctgctttttaaaataggttcatacgttttatgaagctgtggggtacatgattggtgcacaaacagatcaaacagtacaagaacacttgatagaaaagtacatgttactccctaatcaagtgtgggatagtataatccagcaggcaaccaaagtaagtatttctaccttttcttaaaagttttcatgggatttaacaagacgtgttctttacaaatgtattgaattcaagccttttaacatgtatgtgtgatccataagtgcttttatgtgtgtctttctataatttattatctgggcgaggtgtggtggctcacgcctgtaatcctggcacattggaaggccgaggcgggcggatcacctgaggccagaagttcgagatcagcctggccaacatggcaaaaccccgtctctactaaaaatacaaaaattagctgggcgtggttgcacatgcctgtaatcccagctactgaggaggcttaggcaggagaatcacttgaacccaagaggcagaggttgcagtgagccgagattgagctactgttctctagccgagacgacagagcaagactctgtctcaaaaaaaaaaaaataaatgaaaaatctgggccgggctcggtggctcacgcctgtaatcccagcactttgggagaccgagacgggtggatcactaggtcaggagattgagaccatcctggccaacgtggtgaaaccccgtctctactaaaaatacaaaaattagccaggcatggtggtgggcgcctgtaatcccagctactcgggaggctgagccaggagaatggcttgaacccaggaggcggagcttgcagtgagtcaagagcatgccactgcactccagcctggtgacagaggaagactctgtctcaaaaaaaaaaaaaaatactgtaatttccattctcatttgatattaaaataggaataggctgggtgtggtggctcatgcctgtaatcccagcactttgggaggccgaggcaggcggatcaccaggtcaggggatcgagaccatcatggctaacgcagtgaaaccctgtctctactaaaaatacaaaaattagctgagtgtggcggcgggcgcctgtaagtcccagctactcaggaggctgaggcaggagaatggcgtgaacctgggaggcagagcttgcagtgagccgagatcacgccgctgcactctagcctgggcaacagaacgagactccgtcccaaaaaaaaaaaaatagaactatattacttcattcttaagtagatgtagacaaaaaggcgtttgtgttcgtttttaccatttgggattataaatatggtttagggtaagggaagcgtaatggcttttgctttggtaattatgtggattttttttttttttgagatggagtttcactcttggtgcccgggctggagtgcaatggcgtgatctcggctcactgcaacctctgcctcccgagctcaagcagttctcctgcctcagcctcccaagtggctgggattacaagcaagcaccattgtgcctggctaattttgtatttttagtagagacagggtttctccatgttggtcaggctggtcttgaactcccgacctcaggtgatgcacccgactcagcctcccaaagtgctgggattataggtgtgagccacctcgcctggccattatgatggataattctttttttttttttgagacggagtcttgctctttcgcccaggctggagtgcagtggtgcgatctcggctcactgcaaactccatctctagcgttcacgccgttctcctgcctcaacctcccgagtaggtgggactacaggcggctgccaccacgcctggctattttttttgtatttttagtagagacggggtttcaccgtgttatccaggatggtcccgatctcctgaactcatcatccgcccgcctcggcctctcagagtgctgggattacaggcgtgagccactgttcccagccgtggataattcttatatgataaatggaatttgctttttttcctccaagaatgtggatatactgaaagatcctgaaacagtcaagcagcttggtagcattttgaaaacaaatgtgagagcctgcaaagctgttggacacccctttgtaattcagcttggaagaatttatttagatatgcttaatgtatacaagtgcctcagtgaaaatatttctgcagctatccaagctaatggtaggtgattctgatttcttacacaatgcagtataaacaaaccacttctcttctactgccttaagtcaaacatttgatgttttttacagatttaaatcagacctcccatttcccaaatgaccctagacatatttaaaacagttaagtgtacctttcccttttaaaattagtcttaaagcttattttcccaataaattttgtgaacttttggctttaaactttttaatggtaaaatggaattgcatctaatgtacacctgagtaccactgtataagtttagtggtaaaattagattccatttgattctgttttgtaggtgaaatggttacaaagcaaccattgattagaagtatgcgaactgtaaaaagggaaactttaaagttaatatctggttgggtgagccgatccaatgatccacagatggtaagtgagagatgctttgcttttgatttctagtgttgatgctgtgttttatggaatatgctatactctattatgtgcattttgctaatttaaagcatatcaactttgtggttattttatggcattttatttattgtagtccttacgttaatatactaatagctgtattccatcttcaaaagaaactgctgttaatcagtagcgaagggtggtgatatgtaacaagatagctaagaaaattgggtcattttatgtttccatagataggttaggaggatttaattaatggagtaccggtgcagtttttgcattcctcttgatttttagaacaattgctagagctacaaagttgtcattactttacctctttagcaaagtgattgcttcccagattaaaggcctgaaagtcttttttacaccctttttcctaaatgatttgcagaaaaggaaatcattttcagtaataaaaaccagctgcgtatgcctcaacttgtaaaattgtgaattagttttaggttttaactgtatcgtttcattcttgttattcaattgagccttgggagagtccaaaaaattctaatactactattacttggaatagtgttggttttttgttttttggtttttttttttacaagtgtgctagttattttcatagttttgaaatttcagtattgtttcttgttaaggaaatacttttcagtaaacttgttctgaatataattcttgtggaatacttaagttggctaacctaaatatcgaaaggttctgaacatgcgtattatgtgaacagaactgtatttaaaatttgaaagcagaaagtaagatgtattgaaggaattgtgatgtttgtaatttacaagaagcttgagcacgtgtcgggagcacagtgggaataatacaaagggtatcatcttttgtaacattaatgttaaagtttgggatatttgttcacatgaaacattgtgtttattttccttgtcttggcttttcacggtggctcatgcctgtaatcccagcactttgggaggccgaggcgggtggatcacttgaagtcaggaggctgaggcaggagaatcacttgaaccccagaggtggaggtgacagtgagccaagattgcgccattgcaccccagtctgggccacaagtgggaaacttcgtctcaaaaaaaaaaaaagaacaagaagttactctttaagtataactcagtttacttagaatcatgaaaatcttactgggcattgtagcatgcacctgtaatcccaaccaccagggagggtaaggcaggcgaatcaccccagctcaagtccagtttaggcaacatggcaagattcagtttcaaaaaaataatagaaatccatagtctttcttattttctgagagtaattgattgatgttatttctgcttgtgaaaatactcaccagttagcattcattagattaaaacattagtctgagttgggtggatcacgaggtcaggaaatcaagaccatcctggctaacacggtgaaacaccccgtctctactaaaaatataaaaaattagctgggcgtggtggcaggtgcctgtactcccagctactcgataggctgaggcaggagaatggcgtgaacctggaggcggagcttgcagtgagccaagatggcaccactgcactccagcctgggcgacagagcaagactccgtctcaaaaataaaaagacagtattgagggctcgcttgctgccatcttacatatacagtatacgtagaatcctgattctgccacctaagttggagacacccactgaattttgagcctcacttttcttattgtgagagttttgtagctgggcatggtgctatacctatagtcccagctactcaggagactgaggcacaagaattgcttgaacctgggaggtggaggttgcagtgagcagagatttgccactgcactctggtctgagtgacagtgagactgtctcaaaaaaaaaaagtcttgaatgacagtgtgtccatgagacttcccaacccattgtgatttcctgctttcttttgctaaaaactgttttgacgtaggaaaccctaatacaaacacaagattttcctgttttcagtagatgatcatgctacatctcatagacaggaataaccttgttgtttaaaatagtcaccatgtacctaaattaaaacataacttttttttccctccccaacaggtcgctgaaaattttgttccccctctgttggatgcagttctcattgattatcagagaaatgtcccagctgctagagaaccagaagtgcttagtactatggccataattgtcaacaagttagggggacatataacagctgaaatacctcaaatatttgatgctgtttttgaatgcacattgaatatgataaataaggtgtgtaatatttcagttatgtaagggggaaattctgcaggatagccttaattcttgaaagctaaagtatgtctgtggatataacataattttaatgccatggagtttaaatatttaaacttgtatattagggaaatactttcttggttttcaagaacttacttcccaggagtttgaaaccaacctgggcaatatagtgagacttcatctctacaaaaagttcaaaaagtaaccagtcatggtggcatgtgccggtagtcccaactactcgaaaggctgaagtgggggggggggtcacttgagcctgggagttcaagatggcagtgagctgagattgcgccactgcactccaagaagaagaatttactacacagaatcttgattggtaaaaagtaaatatggaaaacagattttagcattcacatggtatgtagcatttattgaaacctcataggtcggggcatccttttatgaacgtagttgtattaattggtttgaataaatgagaaagtaagtctgcatgtttcaattataaaagtgtagtatatgcttataagaaactgaaaaatgtgttaacaagagaaaataggctggccatggtggcttacacctgtaatcccagcacttcagaaggccaaggcgggcggatgacctgaggtcgggagttcaagaccagcctgcctaacgtggcaaaaccccatctctattaaaaatacaaaaatggccaggcgtggtggctcaacacctgtaatcccaacactttgagaggccgaggccggtggatcacctgaggtcaggatttcaagaccagcctgaccaacatggtgaaaccccatctctactcaaagattaggctgggtgccgtggctcacgcttgtaatcccagcactttgggaggccgaggtgggcagatcacgaggtcaggagatggagaccatggtgaaaccctgtctctactaaaaatacaaaaaattatccgggtgtggtggtgggcgcctgtagtcccagctactcggagaggctgaggcaggagaatggcatgaacccgggaggcggagcttgcagtgagccaagatcgcgccacgcactccagcctgggtgacagagcaagactctgtctaaagaaaaaaaattagctgggcatggtgccgcatgcctgtagtcccagctactcgggaggctgaggcaggagaatctcttgaacccaggaggcggaggttgcagtcagctgagattgcgccactgcactacagcctgggtgacagagtgagactgtttaaaaagaaaaaagagataaaagatacgttaagtggacacatttacacggtaacttaaatttttttgtaatctgtagtggtgatttcaaattaaaaacaaaagtgatagtagtagtcttatggtaataatggtttagatgagttctctattaaaaaggttgtctttctccttcaatttgataactcatgtgcgtaacgggacagtttcattttccgtgagaggtggattgtattttacttgggtttacctttcaggaggcattctatcttctgtggtttattgaaaactccaaatatttatactggattaagccttgcttttcccctcctgtctagcacaacaaagacactgaaacattattttgtttccaccacttatttttaggactttgaagaatatcctgaacatagaacgaactttttcttactacttcaggctgtcaattctcattgtttcccagcattccttgctattccacctacacagtttaaacttgttttggattccatcatttgggctttcaaacatactatgaggaatgtcgcagatacgggtaaataaaagatgttcttttattcatttgcctgccaatccaaaaatacaaatatagttaattgtacataggaaggtattacttgttcagagttttgagtgtgtgaattacatatatgaacatctgagaaaatcctataagcagtttaatcaactgttccactccactccaagtgagtccataggcagaattgagttatggggagagcggcctagtaataattggtttgcgtaatacaaagttctactgggtagtgatgttgtagaagttcatatagaatcagctgagctttcagaaatggtgaaagggtggtaatagtcataacttagattgtaatttttttcccataggcttttaaaaaatattcatgaggttctttttttatttcaatagtttttggggaacaggtggtttttggttacatgaataagttcttcagtggtgatttctgagattttggtgcacctgtcatgtgagcagtatgaactctactttatgtgtagtcttatccctcatgtgtatgaactccaccttatgtgtagtcttatccctcacccactcctgcccttccccacaagtccccaaagtccattatatgatctttatgcctttacatcttcacagtttagctctcacacaacttattataatttataagtaagccagcattggatatagttgtattccattattaatttaagaaaccttatgcaagtaattattagtcatcatcccaaaaaaaagggagaacagggttagattcagaatactttgataagagctaaatactatcatgagtgctgtcagtctgtagtaactttccattggtattctatgtcttttaggcttacagatactttttacactcttacaaaatgttgcacaagaagaagctgcagctcagagtttttatcaaacttatttttgtgatattctccagcatatcttttctgttgtgacagacacttcacatactgctggtaagaatttaatacgatttaaatgttaagtgccagctgggcacagggcctcacgcctataatcccagcactttgggaggtcgaggcggggagattatgaggtcaggagttcgagaacagcctggccaccatggtgaaactgtctgtactaaaaataccataaaaaaataaaagatacaataaaaatactgggcatggtggcatgtgattgcaatcccacctattcgggaggctgaggcaggagaatggcttggaccgaggaggcagaggttgcagtgaactaagattgcgccacggcattccagcttgggtgacagagcgagactccgtctaaaaaaaaaaaacaaaacaaaaaaaaacgctaagatctatagttatattacattttggagttaataattttcttcttatcaacaggtttaacaatgcatgcatcaattcttgcatatatgtttaatttggttgaagaaggaaaaataagtacatcattaaatcctggaaatccagttaacaaccaaatctttcttcaggaatatgtggctaatctccttaagtcggccttccctcacctacaagagtaaatataccttttaataaacgtagaatgttcctggtcgggcacagtggctcacacctgtaatcccagcactttgggaagcctaaggtgggaggattgcttgggcccaaaagttggagaccaacctagacaacaaaacaagatcccgtctctacaaaaaaaaaagtagtcagaagtggtatgcatctgtaggaccagctgttggagaggctgaggcgagagggttgtttgcatcctggagtttaagactgcagtgagctatgatcgcaccactgtacaccagcctgggtgatagagtgagaccctgcctctttaaaaaagcaaaaaaaaaaaaaaaaaaaaaaaggccacgcacggtggctcatgactgtaatcccaacactttgggaggctgaggtgggtgaatcacaaggtcaggagttcaagaccagcctggccaagatggtgaaaccccgtttctactaaaaatacaaaaaattagttgggcatggtggtgggtgcctgaaatcccagctacttgggaggctgagggggagaactgcttgaacccaggaggcagaggttgcagtgagccgagattgtgccactgcactccagtgtgggtgacagagcaagactgtctcaaaaaataaaaaggctgggcacggtggcaaacgcctgtaatccaagcactttgggaggcctaggcgggcagattacctgaggtcaggagtttgagatttgcctgaccaacatggagaaaccctgtctctactaaaaatacaaattagccgggcatggtggtgcatgcctgtaatcccagctacttgggaggctgaggcaggagaatagcttcagaggttgcggtgagccgcgattgtgcgattgtactccaacctggtaaacgagcaaaactttgtctcaaaaattaaaaaaaaattcttgattaaaaaaaaaaaacattattgggacgctgaggcaggagaatgtcttgaacccgggaggcagagattacagtgagcagagatcatgccactgtactccagcctggtgacagagcaatactctgtctcgggggaaaaataaatcattatttaatcattgtgttttgatttgcagtgctcaagtaaagctctttgtgacagggcttttcagcttaaatcaagatattcctgctttcaaggaacatttaagagatttcctagttcaaataaaggtatgtatttatttgctcttgcagaaatattaggggtagatgtgaccacttttatgttacattgtagaatttttatcacttgatttgtcatgccaaataaatggggtttcaagataatacgtttacacaatctctgtaatcaaaaaacctgagactggtaatacagtgaaaaactaaagtccaataaggatagatatgtttgagatgttattcggataaacttattactaatgtaattcattttaggtagtcttaaatgtataatggaatattgggtaagaaaaacgttggtagttctttttataattttataccaattttgttagttgagggaacttgtgaaagttactagatagaatgtctttcttctgctgttatacagtgctttattcatacttttgggaagggtttttctttgaacatcttgctttaaagaaatttggaagtactgtgaaaccctaagtagttgatgaatagtttatccatgattgttgaataagaattagtctcttagctcttaaatattttctccaaaatacaaaggttttttttttttactgtaaaaatattagccaatttttaaaaaactaatgaaagttacctaggctgggcgcagttgctcatgcctgtaatcccagcactttgggaggccaaggtgggtgggtcacctgatgtcgggagtttgagactagcacggccaacatggtgaaacccccgtctctactaataatacaaaaattagccaggcgtggtggcgcacagctgtattcgcagctacttgagaggctgaggcaagagaattgcttgaacccacgaggcaaaggttgcggtgagccgagatcacgtcattgcactccaacctgggtgacaagagtgaaacttcatctcaaaaaaaaaaaaaaaaagttaactgatagctacgaagtcaatgataatataactaaacttaatttaatgacagttattaattagccttaggagaaacatctttcttggtatcttggcatatgaagaatttttagctgggcacagtggctcacacctgtaatcccagcactttgggaggccgaggcagacagatcagttgaggtcaggagttcaggatcagcccggccaacatggtgaaacctcatctctactaaaaatacaaaaattagccaggtctggtggcaggtgcctgtagtcccagctactcgggaggcagaggcaggagaatcacttgaacccaggaggcagaggtttcagtgagctgagatcataacactgcacgccagcctgggcgacagagcaagactgcctctcaaaagaaaagagaaaaaagtgtctgggtgcagtggctcatgcctgtaatcctagcactttgggaggccgagacaggtggattgtctgagcttgggagtttgagatcagcctgggcaacatggtgaaactacgtctctagtaaaaatacaaaaaatgagccagatgtggtggtgcctgtaatcccagctgctggggaggctgaggcaggagaattgcttgcatcttggaggaagaggttgagataatgtgctggggctacagaacaagactctatcacaaagagaacaaaatttgtgtgaatacatagtaggtgtatatacttaggggatgggatgcatgagatacttcggtagaagcatacaatgcataataatcacattgaagactatttactgtaaggtatcacaccattttttttgttttttttgggggggcacagtctcgcttttatcacccaggctggagagcagtggcgtgatcttggctcactgcaacctccgccatgcaggttcaagtgattctcctgcctcagcctcccaagtagctgggattacaggcgcctgtgccaccatgcatggctaattttagtaatgacagggtttcaccatgttggccagggtggtctcctgacatcaagtattcttcccgtctctgcctcccaaagttgggattacaggcgtgagccaccatgccggggcccatgattcttttgtaatcttcccccccaccagttaacaggtttgcagttcattcagctatgtagtatactgtgtcactatcctataatttaaaacccagccactttatggataatttatattccttccttctctaaaaaggaaattgctcatctatgatttctttctttgcaagttgaagtttattgcgttgacatttcaactatctgttttcacaggaatttgcaggtgaagacacttctgatttgtttttggaagagagagaaatagccctacggcaggctgatgaagagaaacataaacgtcaaatgtctgtccctggcatctttaatccacatgagattccagaagaaatgtgtgattaaaatccaaattcatgctgttttttttctctgcaactcgttagcagaggaaaacagcatgtgggtatttgtcgaccaaaatgatgccaatttgtaaattaaaatgtcacctagtggccctttttcttatgtgtttttttgtataagaaattttctgtgaaatatccttccattgtttaagcttttgttttggtcatctttatttagtttgcatgaagttgaaaattaaggcatttttaaaaattttacttcatgcccatttttgtggctgggctggggggaggaggcaaattcgatttgaacatatacttgtaattctaatgcaaaattatacaatttttcctgtaaacaataccaatttttaattagggagcattttccttctagtctatttcagcctagaagaaaagataatgagtaaaacaaattgcgttgtttaaaggattatagtgctgcattgtctgaagttagcacctcttggactgaatcgtttgtctagactacatgtattacaaagtctctttggcaagattgcagcaagatcatgtgcatatcatcccattgtaaagcgacttcaaaaatatgggaacacagttagttatttttacacagttctttttgtttttgtgtgtgtgtgctgtcgcttgtcgacaacagctttttgttttcctcaatgaggagtgttgctcatttgtgagccttcattaactcgaagtgaaatggttaaaaatatttatcctgttagaataggctgcatctttttaacaactcattaaaaaacaaaacaactctggcttttgagatgacttatactaatttacattgtttaccaagctgtagtgctttaagaacactacttaaaaagcaaaataaacttggtttacatttatttttcctttattgactcatttattcctatattaatgatagtgggtatttgtgtttaagcatcaagtaacattttaaatgaagtt

SEQ ID NO: 15884 - DNA, 58773 bp, Homo sapiens
agcttgggatgggggagggaggggctgccgactccctgttcctccagcaaggaaactcgaaagctctccggttttgcagagtggcatgtgaagtaggaaagatcagtttttcaggggcctgcacatgggattccgtcttgtagttccttttcaggggtttgaatgtgataagttggttaaaccatttactgttggccttgtacagtggaggatgccctgattctccttcattccgatgtctgtgagtttgggttgggtgggaggaagtggtgtagtagaggaagcattcagtactggctcagcccggacctcctctgatcacgccgaggccatgctgcatagagaaaggggcggtgaacttaaggcgcctggtctaaatgcctcctccgagtaagggcggggtgagtgcgtgctcctgtgtgctatagttagaagggctgcaaatcggttcgggtgggaagcgaggggagggcgggccctaatgaggtgtgtttttcctgaatgaagcgggcgattgcccacacaacctaaggagcagtctttcgccttgtagcgacttgtttttcacctagtgtgaagttattaagcaacggttatgattttctgggttttgtttaggaattggcattgggtgtcacttgtagagtcacattatccattaagctggataatccctagtgtatgttatccagtgagtggattttaggattgaagagcccaatgggaatgagcgttcgtggttacacctctcgcactatggcttgtttgctgtctgattgtatatcttaagtgtgggacactgctgttagtggaaagaatgttttggaagcggtttgatttgggggactaaatgtgcttggcattgaccacaaagccgccatttctgtactatgtacagttcaggaataggtaggtgatttcgaagatagccgctagttctaaggatggcaaactactgtatttaaatccttctattctaaatctcgtttttcacatcagtctagttcggagaattttataagaacagtgtatttgaaaatgaaacttgtaagagtcattttcttaatccttttttgttttagcattcaactatggtagtaaataggtgaaaagtttgttcaatatttaaccgaaatatttgaaaacttttgatacatggatcttggtgctttgtggacattgcttttaagcctcaaataattaagattgttctgatcttttaaattttatggtacttgaaggtggaggagagtttacacattcatttgtggaatatatatttcctctcagtatttagatcttaaggtttttttgtggtgtgtaacaagtattctgctgtttaaaaacgtttgtttaatgcctactacgaaacgttttgaagtctcatcagttttgtcaataatggaccaattcttgaactcctaatttcttgagttttacattatttttacatcatatcaatcataggtgactcatcttttggagttctaatctgttgtaacagacgttatatttaaataagacaattgcattaaaatagaatttgctgccattattgttatggacatttttaagctgttataaaatagccaggaattaatgactttttttccgccctgccaagctagtttgtctaaatataatgtaaagaaattagctactcattttctggtccacgaaagttcctaaaatgggaagaagtggagatctgaccttgttagttctaaatacactaaactgggagtgccatggatggctttcaggatgtcctgaatcctctataattgtatacaaaatcgtgagtttttaaaaactgggttagagctattggttcctcagagtctcaggcatcttagacccccaaaaaggttaaggactactgacttaaccaattaggtttgagtggcattggctttgaagaaaagcagaggaaagatatattttataattctgggcaacaaaaaagtggatgtgtgccagcatcttagagtagaatcctcttaaaaggatagcactgcatatgaactagtaggttttaaccagtgcatatttaggcgaagtagctcatttttctgttagaattcttttttatttgggaatgggcaagcttttacagcttttaccttgccaatgaatacctggaatttaaaaaatcttgttaggcatattgcccataaagttttttttcctagatcatatattcagtaaatatgtttgtagctttatttcaatcccccaattcattgagggttgaaacaatttgaatggtttgagtgtagaagctaagttatttctgtagaggctaagggcatttataccaagatatgttagacttgtggttcctgctaaccattgctgtagacaataggaattactgtatatccacattttaatttttaacatcattctgtctttgtttgtttgtttttgagatggagtctcattctcttgcccaggctagagtgtggtggtgcatctcggcttactgcaaactccgtctcctgggttcaagcagttctcctgcctcagcttcccaagtagctgggattacaggtgcccgcctccatgcctggctgatttttgtatttttagtagagacggggttttgccatgttggccaggctggtctggaactcctgacctcaagtgattcgcccacctcggcctcccaaagtgctgggattacaggtgtgagccaccacgctcggcccattctgtctttatagcattatttttataaagttaagataatgtgaagtgagcttttactgagttattcagaagaccctacttgggaagaaaagaaaatcacattcacttgaacttaatcctacttgcttaaaaagttttgacatcaagatactgaactgtatcacgttttaggaccataaaatcctaatagtggatgcgtttaaataataggttagcatactttataaatgttagtagaataggaaagtcttcctggtgtataaactaaacactagaaaagttgaatggaccataataatttatgtaattatcaaatagctaagtaatttcagcttttgttacttgcttttactatctcagttttctgtaattaaagtctctaaagtattcattaaaatatttgtaataacatggttgaagtaaaataacttgtaggaagtttttgataataccaaaacttgataggcagcttcaattttttttctttattttcagtaatctatgccagcaattatgacaatgttagcagaccatgcagctcgtcagctgcttgatttcagccaaaaactggatatcaacttattagataatgtggtgaattgcttataccatggagaaggagcccaggtaaagtagccaaccaaaactttataacattatgacagtgtaacagagttgttgggtttagaataaaattttaaattatcacctttaaaaaagatattccatagtttgcattaatttggaattctgtattaaccataatgaaaattggtttggagaaagaaattgcatgtttgacatggttagagtgggttgttttggaatattatacttgttttgtccttaagagccaaatgttattaaatactttgtaggtattaaaggttctctgtacttttatatatacttaatatgtttggcactaatacgattcttctacttttaaaacatttacagaagtacttcacagatatgtttgtttaaataaaaacaggaataccaagtatttttatgttagttgaattttgtgcacttttcaaagtggtactgttaatgtagggaattatcttaaacataaaccaaattttgatcagtttaagatttttggtttttttgaacccaactaaaaggtgaaacagaaatgtgtgtacaattttaaattgtatatgtcacaagaaaaaaaacttgattttttacctgtggggccaaacttttttttgagacagtctcgctctgtggtccaggcaggagtgcagtggcgctatctcagctcactgcaacccctgcctcctgggttcaagcgattgtcttgcctcagcctccctggtagctgggattacaggcacacgccaccatgcctggctaatttttgtatttttagtagagatggggtttcaccgtgttggccaggctggtcttggaactcctgacctcaggtgatccacctgactcggcctcccaaagtgctgggattacaggcatgagccaccgcgtgctggcccaaacatgtttttgaatgagtaaaaagttttgcagttgggtcagaaatcttttttttttttcagatggagtcttgctctgtcaccaggcctgagtgcagtggcacagtctcggctcactgcaacctctgcctcccaggttttcaagcaattcacctgccttagcctcccgagtagctgggactacagacgcgccaccatgcccagctaattttttgtattttagtagagatgggtttcatcatattggccaggatggtctccatctcctgacctcgtgatccgcctgccttggcctcccaaagtgtggagatgacaggcatgagccaccgcgcctggccagaaatcttttatggtagttttgttgccagaacagtagatttctggttagataaatgttcagctagtagatgggaggttacttatattgtcaagatatttatatttgcataattaagaaactgagtgccggccgggcgcggtggctcacgcctgtaatcccagcactttgagaggccgacgccggcggatgacgaggtcaggagatcgagaccatcctggctaacacggtgaaaccccgtctctactaaaaacacaaaaaattagccaggcgtggtggcgggcgcctgtagtcccagctactcgggaggctgaggcaggagaatggcgtgaacccgggaggcggagcttgcagtgagccgaggttgcgccactgcactccagcctgggcaacggcatgagacttcgtctcaaaaataaaaataaataaataaaataaaataaaaaaacctaaacctgagtgccattacactttctgaaaatatataaggtggatacagtactatcttttatagtagtccaaaaagcatcatgtataaatgtttccattcccttatgaaatgcaacagtactgcttttactatagtagaaacttgaaaaaggtccatggaaacgctaaaagtagaaaaaattactcttgcagtgattctgtaagcttgttagcccaggtttatacttttagggcgttttgatcagtatattatctcctaaagcattcttgaaaaaattaaccatccgtatttattatccctgtcatttagttgttactcatgctatacattcaacatgaagctttaagcttcatttcttctagcatggatgcatagaaagcagctgcttttggaggaagctatgaaagtaaggttgggttcaactctgaatgtaatattggaagcacaggtctgtagccattgggaaaaagggcatttaattttttccgcatagattcagctactaatactgtttaatcttcacactaaactagttcactacatctaaaggtatgataaataaaccaacatagagcagtgttcttcatggcttgtaacagaattagtggcaatttttgtaattgagaatatattacagcaatactgcttttaataatgtttcatagtattaagaaatttaatggtttgttttaaaattgacttgttaataaaaagtagattaagaaaagtgtttctaaatttttttgtttgtaaggacaataggttaactttcccaaagtaaaaggattttgtctgcagtagttaatagatcatgtgacaaaatcagttgcgtagaaataactagcaaacttattttgtattataaatgaagaaacaagatttagagcttaaagctggttaaggagtccttttggtctctaaaagtcctatgtcgttagttcagtctacttttcgtttaccacctccttgggggtcttatttcaaaggaaaaggagtagtagtagcagcgagctgctatagtggaaaacatgatttttagtgttagacgtcttaatttgattcttggaagctctctctagtcattgcttaagtcccatgtacaaatatgacctgtcctacaagagattggagggttagttatgaggtttaaaagcacctattacagtgcttgataggtagaaggcactcagcttaaagggtacatttagcagtataatgaaaatgatttagcatatgtgatactcattgcttaaaattaaaaaaattttttttttgctactcataaaatatgcactaatgacaagaaaaatttattatgctaattaagcttttaaagtcaactgggaaaaaaagctgtaggtaggtttttttttttttaaaggaatgtgtaacttgggggaggggaagaaattatttacaagggtgacttttaatctgtagacagaacttctgcatacatggttagtatagtaggatatttagcagtgtaacattaggactaccctctaccctctgttatcagcatttttctatttttagccaagtagacagctagaaaaaagatgcgggaagagttggatgttttctccaatattgtgttctgttaaagatcttgaactctattgcttagcaactaaaatgctttcaccattcagttagtagtacaagggagatgctaggttttctctctttagtttgcttttgtgtcttttttttttaaacccctgctggggttttaagtttataaagaacattatgtaagaatggtgggattagaataaatcagaatgcaaatactagaagtagcatcagagagtaaaattacaactaacaggaaagaatattatttatgtagcgattgatgtgagtggtgatagtgtgggaagtatttgattctgtgtagaatgcttatcacttcaaagcatctgacaaaatggtaacttgaccaagtaacttttactgtgtgaggatctttgatacaacttttcctctagttagataaggttatctagctagatattctcagggagaagaccaaaacactgctaaaatgtgctttggccctagataagccacatcattattctttcggccttctgtcatttctcatatgacacattatgcccatcagtcctttaatgaaatcaaatagaaatgtgtatgattgtattttaaagtatacacattaactcttgtaaccacagactcacaatggaagcaggcgtctgatcttttcaggcaaccacagtggttctggtgggtttctgggtagagaacaaccatataagttattgagtgtgtagcagtgtgttttcctgattgatgtatgggatagtcatgaatgtggtattgtatttcctacctgaggaaaaggtcatgattaaaataaagcatcaaagccaggataagcatataatttctttctttttttttttttttgtaatgagacagagtctcactctgtagcccaggctggagtgcagtggtgtgatctcaaatcactgcaacctccgccttccgggtcctggttcaagcaattctcctgcctcagcctcctgagtaactgggattacaagtacgccccaccatgcccagctaatttttgaatttttagtagagacggggtttcaccatgttggccaggctggtcttgaacttctgacctcgtgatccacccaccttggccacccaaagtgttgggattacaggcgtgagccacggtgcccacccgagcatacgattgttttaaaaaagactagaataaaagccaagctaaagattataaggtatctttgtcagaaatggttgtgagagtgcttcctaccctgtttttgatgctttattgtttataaccatagaattaaacccatgataaagtaaagtataagagaaagataactgacagattttaaagtcatcaaacttttttcttgctctgtcacacaggctggagcacaatggcttgatcacagctcactgcagccttgacttcccaggctcaatcttcccacctcagcctcctgagtagctgggaccataagtgcgtgtcccaccacacctggctcattattaatttttctttgttgcccaggctggtcttgaactcctgggattacagacatgagccaccacacctggtccaaactttttgcttacaacttttaatagaaataggtaaaagaaataggaaggatctaattgagttataaaacaacctttaaagatacaaaagtgaaaaagattaagccattgctttttgtcaatagaattaaaagctgttggtaaaaatattaatgtatgaaaaacttattgaaatgaaaaaactatatatatatatatatatatatatatatatatatatatatatatataaataaaatgtcgacatggctggatcttaaaaactgtcaaatgaaaaaaactaattgcaggaaagattttttttttttttttgagagggagtctcacgcagtcaacccaggttggagtgcactggggcaatcttcctgattcttggggaatcttggctcactgcaacctccgctcctggattcaagcgattctcctgcctcagcctcccgagtagctgggactataggcgcacgccaccattcccggctagtttttgtatttttagtagagatggggtttcgccatattggtcaggatggtcttgaactcctgaccttgtgatctgctcacctcggcctcccatagtgccaggattacaggcgtaagccaccgtgcccagcctaaaagatttttaagtatactattaacataaaatttggtagccgtacaaccctattcatgaaatttacacacatgccgtgaaaatgtggacaggaaaagacacactaagttcatgatgaaagccattactttttaaagaaggaacaaaggtgtaatcccagcactttggggaggctgaggcaggcgggtcacgaggtcaggagttcaagaccagcctggccaatacagtgaaaccctgtctctactgaaaatacaaaaattagccaggcgtggtggcaggtgcctgtagtcccagctacttgggaggctgaggcaggagaattgcttgaacccgggaggtgaaggttgcagtgagtcgagatcctgccattgcactccagcctgggtgacagagcaagactccaactttaaaaaaaaaaaagagagaaaaaaggaataaaggaaggaaatggcactagggaaaggcacaaagatgacttccataaactttagttattttatgctaaaagaaaatctgatacaagcacaagatgatgactacgtagattagtatttctgggttgcatgttaaaaatatgaaaataaaaacggaaatagtttccaaaacaaagattttatatatgaaattagtgaaatttcagaatggagaaaggatggttacaataaatgttaggagccctctttaaagagctcaaatggtatgtaagtatttgggatttgtggtttaattagacctagttttcagcagtctttccatgaaatgtatttttgtatttagagagatcttggtaactcttgtaaagcagagtgtcctgctacattacataacttacctaagtaggtgtgcttttttttgtttttctagagacagggtctctgctctttcacccaggctgaagtgtagtggcaccatcatagctcggtgcaaccttgatttccagggctcaagtgatcctcccatctcggtctcctgagtagttaggactataggtgcaagccaccatgtgcagctttcttttttttttttttttggagagtcatggcctcgttacattgcctgtcacctagactggccagctggtcttgaacccctggcctcaagtggtcctcctgcctcagtctcccaaagtattgggattacaggcatgaaacactgctactggcctagataagaatttttatattgtttttggttgatttaagtgctgagaacttatttgcttcagaatagatctttggttgaaatgcagttcagttttgagactaaaaaataaaccagatttactcccaaaaatgttactgtttcaaataagtaaaatatttgcacctttaaagattaggagttggctgggcatggtggctcactcctataatctcagcactttgggaggccaaggcaggcagatcacctgaggtcaggagttcaagaccagcctggccaacatggtgaaaccccatctctactaaaaatacaaaaattagctggctgtggtggcacctgcctataatcccagctactcaggaggctgaggcgggagaatcgcttgaacccaggaggcagaggttgcagggtgctgagatcgcaccactgcagtccagcctgggtgatagagccaagactctgtctcaaaaaaaaaaaaaaaaaattgggagtcatatttatataattttatttctatttctgtaaggtctaatttttgagtatttctgaacatcaataatagaatctctgtccaattagaatttgtgccttgctcagtagttttcattttaatgaatgattcaaaagaatacattagcttaagttttgttttttttaataatattttagcaaagaatggctcaagaagtactgacacatttaaaggagcatcctgatgcttggacaagagtcgacacaattttggaattttctcagaatatgaatacgaaagtaagcaagtggtggttttaaaatctgttatttcttttcttccagtcataaactttgaggaaggtatctcatttttagtattagcatttgttatctcaaattattttatattgttaatttgtttcaaaatttagtcttaagcatataattaattcttgcaaatagtcctaagaattatgaatgaagttttgtaatgggactagtatgcaaggtggcttttttggttgtctgattttgtttttttctttttagtatatgtatacaggtctaagtagcataaattctgaatgttattcagagattaaacataacattaaggaattattttgggcaagtaatcaatataatacaggccaggcacctctgacaccaagttgtgtggacagcttaaaaccctactccatggcattgggcttctaatgggacagcactcagtttttatttacaatggaaaatgttataattctggtccttttttaagtttgaacagaagggttgatcaaaatgtgttttgtctgttttaggcttgatgattcacgcttctctttaaactgccttaaagtaataaatactatggcattctgtttaatacacgaaaggtttccacttgatatacattgtgttaaaacagaagatagccatattcacatctgtttctgaaaccagactttgttaattaacagttttaaaatattaattagttttgacatcttgtaaattttaggtcaaaaatacagtccagaacttcctcaaagtgctaaccttaagtaacataacagtgtttgcctgtttgcttgcctggtaaattttgctttttatactgacagacattactaatgtttaagttgatttatcaacagtatttttaaaaactcaaatttgtcttgtgaaaaatgagatgattagaggaacagaaagaaagcaacaggtaaagaattcttcaatttacataaattacaaatgatttggtgctaaatttatgcactatgacatttggcttttatgcaatcatttttttttctttaaagatgttaacactacctgatattaatcataatgttccattatgttgattgcttgtaataggaagaaaaggggtgtcttcctgtgcaactgacacagctaggctttgacggcaggcctccacaaggtctacccttttgattccctttaactgaattctgttcatcaattgtttttgtttcatgggcggtgggaggggaaaggggaattcaatgcataaaataagtatttctaagggctcagtagaaatttctaccatagggatcatttcatgcatttattttttcatttagtctttgctgttatctgtccctcatcttcataactcagcagtggatttctcaagtttggagatgtaaggcaaaagtataattcttcagaatgtttggattgtagtgatttatcattggctttcagatttgactgtcacttcagatttttgagcaaaaatactaaaaaaaaaaagaaaaaaaattctttgaagagacaggacctctgttgcccaggctggagtgcagtggtgtgattatagctcactgtaacctcaaactcctgggcttaagtgacatttctgcctcaactttctgagtagctagggctacaggtgcgtgtcaccatgcctcgctaacttaccaatttttttatagaagtggggtctccctgtgttgctcaggctgatcttgaactcctggccctcccgccttggcctccccaaaatgttgggattacaggcgagggccactttgcctggccccaaataacattttttcaaaggaatgtaaattttttttgttttagtttcataggcaaagtctttatgtctgggagagattggattttaggatattatagtaacagatgtattcctttgacctaacctgggcaaagcatttattgggctccctgcttcaacccccttggcagaaagatgaaatatgaattgtatcttcatcaagcttatgctacctttatacagttgtagaaaatacaggttagtaaatagtaattttaggtaacagtatcaaataggaagaagtaaataaaaaagaaaggacagtgtctttccattaaaaatgtaaaaaagtttggttaaataagatgaagttatctttaagatttttatttgtaactatatttatggtgggttttgtttcttagtgttttaaaggctttttaattgatttttggcaagaggatatattgtaagcagtgcattgctttgacttactgagtcttgacaatctgattttgtgcctataaaattaaagaaaatgcttagggtagtatgtttttaaaagctaattaagaacttcaggcatttggacaactctcttttttttacatatttctcagacctagacataataaatagatatgtttttaaaagtgaacaggttagaaagcatcactatttactgctgattatgaaacattttaatagcatcaaatttgtaattttagaattttgctttggccttgtttttattttgaaagtttttaaggaatgttctgcaaatgtagtactttagttgaaatggcaaaattttcttgaagagtgtgaaatgttaaaatgaaagaaaacagcaaaaacattcactgtttgagcacaatgtagtttgggacagtctatattgtgctttggataaaatgagcattcacatgatccctttggttgaaatactaatgctcctattttattgtgtaatgactaaccattttaaagatgaactcttattctcagccaaaacttgcaatctgaggttatatgtctatatatgaatgagcttacctttcagatattatagctgattcttccctaattctctcagttgaaatgtaccacaacggttttgtcccttttcttcctcctgcctatccacactaattggtcatagtaattcaggtagtaactcctggggctttataaattattataaatattgttgactatttagagtgagtaatcagcaggagggacaaaatggcttgaaagtggtatctctgttttttaattttttatacttttagttataactttcagtatttaggaagaaatacctgaaaggtagatacagattgcaacatgcgtttgtgattattttgactgtgcacaaaagtttatctttaaattagtagaaatagcaactataagggtggggttaaaatataaaataaacccatgggttgtcttgctgctccttaagtaacacaccagtgatgcttgtaaacactttctatagaaagtatctgtgacaatactttaatatttggccaaaagcttataactcctagaggatggtaggaagcttgatagcatccaagctgctaaattcttaggagcctgttcgtgttaaagtacgtgagcctatgagcagtcatttatgctgtgaattcatatctggctgctacttttccttcgacagataagcctatttggctgctaaagggctttttatttggttcttcctcctggtgtgagcatgtataaacagcaggacgttatatagagtagcaaacaataaaatgaggaaaatgcatgaaaactcagtatatgggtgaatagatacttgtttaatatgtgtaattaaacttggtagcataatgtttttgaaactttagatgtaaatgtgtgaatgtctgtccatttgtgaatcctgagagttgccagtcctataagcaatatattcacatgcttctattctccaattttcagtactatggactacaaattttggaaaatgtgataaaaacaaggtggaagattcttccaaggaaccagtgcgaaggtaggaaaataaagaattataaattcagagttttgtttttcctggcatttttattgtagttgactgtttgagggggcatgtaatgaatctttagtatattttgctctaatggagcttattgcttttatcatgaagcaaacaggtctgtttgtattggtgggtacaggaaggccacttacaggttatcttttgggagaaagaggagactggactgttgaaaactctgacaataaatattctagttaaaaatatgggctatggcacagtggcccacgcctgtaatcctaacacttcaggaggccgaggcaagtagatcgcttgagtctgggagttctataccagcctaggcagtatagcaagacctcatctggacaaaaatttaaaaaattagctgggtatggtggttcatgtctgtggtcccagctatgtgggagcattgcttgagctcaaaaggtcgagactgcagtgagccatgatcctgccactgcacttcagcctgggtgacaagagtgagaccccatctccaaaaaaacatatatataaataaaatatgggccgggcacagtggctcaagcctgtaatcccaggacttcgtgaggctgaagtgggagggtcatttaaggccagaagtttgagaccatcctgggtaacatagcgagaccctgtgtttacaaaaaatttaaaaattagccaggtattttggtgcaggtggcggcggggacaggggtatcagtggggtgaggtaggaggatcccttgagccaagaggttgagactgcagtgagccatcattgtgccactgtactctagcctgggcaacgagcgaaactccgtctcaaaaaacaagaacaacaacaacaaaaaaaaccatatgtaaggttaactcgggaatggaaaagccaagtactaaagatcacaaagctgttttgccttttgtggttctgggaatgccttggaagaggttggcttctgaaatgaagaaagatcagaaaatgaaggtgtagtgatacctgttaatgagtaatttaacttttctgtctgtgctaccttgaggaatgtagtcatattttgagaaacctgaggcaacattagtttcttgggattctttgatttagctaatttcagttatgatacactgcctttttacctactatatttcatttatctctgaaaaatagaaatttttttcttgactttattatggggcacatgatacttctagtagtattttcatttaaaatatgtctaatttctttgattatttgtcttttaagtattgtccttcacctgcattctcttatcatcattatggtagaatagtgacatggatttacttagctaatctgacttaaaccttgacaaagtttgagcacatttagagttgaatgtgatgagattttaatgccagtgtctttttttaagaatattaagtatattcagtggcaatatctttaatacatcataaatcatagattaagagtgatagtgcaggagcaaataatgtgccctaaaagaggttctcatttctttaaatgttttattatggtttgaaactattttagatcacgttctgtgatggactgagaaattaataagcacaatttgactatgtggtccaagtaggtccttcatactttattcttcagggatctttagtgtagtcattccttgtttctttactactattgttttactcatgtgttatgagccccagatttaattttggccatggtctgccgtaccaagaaaaggtgatttacttctgtcccattttactgttgtataattttaaatcctccttttgttcttaaatctgcatctctgttttttatcacatttgatggttctggaagatgttttccaggttgaaaatagatatgattatactagtttatcaacactgtagttacatttgttacagacaaaattaatttaaaaaatttttgtttctttctttcttctttgttgagacagattctcactctgttcctcaggctggagtgcattggcaccatcactgcagcttcaaatagctgcggtcaagcaatcctcccacctcagcctcccgagtagctgggaacataggcatgccccaccatgccctactaaattttttttttttttaatgttttgtagggatggtgtctcgctgtgttgcccatgctgctggctgctgggcttgagcaatcctcccaccttggcctgccagagtgctgggattgtaagcatgagccaccatacttagtcaacatgattacctttttaattttaactgggaggcttctctaacctaaagatttatttcacaaaatacactagaacttctgaacattaattttccttcatctttaagtaactttggtattggaaattacataaattaatttaaaacattttatttcctttttctgtaagtgtcctgtcttttaaaggtattcgctttgctttttgctgtagctataccctttgtccaactaccatagcatatatatttgttcacctggggtgcatattgtgcgtttcctttgtaccgattactactaaatattaaggttataaaaatatacatgtacatcaaagtgctgtatgtcacagtgttatagttgggaagacaaaacacatgtaaaagaggaatcataaatcagcaaattaggtgtatataatgagtgcttcacaagctaaaagaacagaatgatgtctaagtccggccctttagctaagtttcattcacataattggaaagaaatgcctggtatattttaaaggaaggaaaggtttcactgcataagagtatgccaaaattagattcctgcattttttttctgatgtagaatttgttttatctgcttttaggttcttgtccacagcatgttaatttttacgtggtgtttttttttttttttttttttttttgagacggagtcttgctctgttgcccaggctggagtgcagtggcgcagtcttggctcactgcaagctccacctcctgggttcatgccattctcctgtctcagcctcctgagtagctgggactacaggcacccgccaccacacccagctaattttttttttttttttttagtagagatggtttcactatgttagccaggaaggtctcgatttcctgaccttttggtcctcccgcctcggcctccatgcctgttgagattacaggcatgagccactgcctggctaacatgttcttttaaattaatgacattttcaatttaggcctcttgtataaatactgtcaggaaaatctcatgattcttgagtgggttagatgtctcttgctgtgttatacgttactgtatcctgtaccagtgggtcacaggagaataaaattttaaagagcaaaagataggctcagcacggtggctcacgcctgtaatcccagcactttgggaggccaaggcaggcagataacgaggtcaggagtttgagaccagtcttaccaacatggagaaaccctatctctactaaaaatacaaaaattagccgggcgtggtggcacatgcctgtaatcccagctactcaggaggctgaggcaagagaattgcttgaacccgggaggcggaggttgcagtgagctgagatcacgccattgcactccaacagagcgagacttcatctcaaaaaaaaagagcaaaagatagacataattagaaagtaaggatgtttaaaagaacatttaattttccaaaagatatttttatagcaagagaaatggcgagataataaaacatttaaataagttgagatttgttatataaaatttattacatttctctggattttcatttagctttaggccgtaagtgtgtgtctatttgtttgtgttttatgtgttttgtccctcacaccccacattacacttggctgttttagtcactttattccccatccttcaaactataagctccttgatattggggctcagagtgtctttttttctttggtttttttttggtctgtttttgtgtttgtttttgtttaagacagagtctcgctctgttgcccaggctggagtgcagtggcgtgatctcggctcagtgcaagctctgcctcccggtttcacaccattctcctgcctcagcctcctgagtatctgggactgcaggcgcctgccaccacgcccggctaactttgtgtgtgtgtgtgtgtgtgtgtgtgtgtgtgtgtgtgtgtgtgtgttttgttttttgttttttgtttttttttttagtagagacggggtttcaccgtgttagccaggatggtctcgatctcctgacctcgtcatccgcctgcctcggcctcccaaagtgctgggattacaggtgcgaaccaccgcgcctggctttttctttgttttttaaagatgtagggtttcactctgttgctcaggctggagtacagtggtgcaatcatggttcactgcagcctggaactcctgggctccagtgatcctcttgcctcaggctttttttcttttttttttgtgagacagagtccctctctgtcacccaggctggagtgcagtggcgcagtcttggctcactgcaccctctgcctcctgggctcaagtgattctcatgtgtcagtctcccaagtagctgggattacagatgcacaccaccatgcctggctaatttttgtatttgttttagtaaggacagggtttcgccatgttgaccaggctggtctcgaactcctgacttcaggtgatcctcaccctcccagagtgctgggattataggcgtgagccattgcatcctgccctcttgcctcagccttgagagtagctagcactgtaggtccgcaccaccatgcccagctaattaaaaaaaatttttttttttagagatagagtctcactgtgaagcccaggctggttttaaactcctgggtttaaagcagtcttcctactttgccgtcccaaattgctaccaagcctggctgggaaattttaatatgtcaaatggaagaattccctaataaagagtggttgctattcatggtagtcttttatttattcatttgttttgagacaagatctcactgtatcacccatgctggagtacagtggcacaatcatagcacactgcagccttaaactcctgagctcaggcagttaccacgccttagcctgccaaaatagctaggactacaggcatgtgccaccacacccagctaagtttttctaattttgatagagacacagtttgcctatgttgtccaggcttgtcttgaactcctggcctcaagtgatgctccaacctcagcatcccaaagtgctggggttacaggtatatcaccactcctagccatcactgaagtcttaaaggtcctctaggactgccagtggtgttgattctttatcagagtcatgattcagataattccccatccctttttaaaaatggcatttaggctgggtgtggtggcttacacctgtaatcccagcactttgggaggctgaggtgggcagatcacctgaggtcagttcgagactagcctggccagtgtggtgaaacccggtctctactaaaaataccaaaattagctgagtgtggtggcagatgcctttaatcccagctaattgagaggctgaggcaagagaatcggttgaacctgggaggtggagcttacagtgagccaagacagcacgactgcactccagcctgggcaacaagagtgaaactctgaaattaaaaaataattaattaattaattaaaaatggcatttagataattcaaataaaaaaaaagaggaagcctcctttgttcctgttggggggaaagatgatgctatataaaggtatttctgtactttttatttaaaccaagggattgttttaatcagttaatgtgtatggcttatagatcatttcattgattgataaaaacttactcacaggcggggcatggtggctcatgcctgtaatcccagcactttgggaggctgaggcgggcagatcacctgaggtccggagttcgagaccagcctgaccaacatggagaaaccccatctctactacaaatacaaaattagccaggcgtggtggcgcatgcctgtaatcccagctattggggaggctgaggcaggagaatcgcttgaacccgggaggcagaggtcgcggtgagctgagatcgcgccattgcactacggcctgggcaccaagagcgaaactcagtctcaaaaaaaaacccacacttggctcacattgaatagagaagaagcgaatttatgaaaaaagtaatccaaagtggaaagatcgtaattacaaggtttgattttttttttttgtttggtttggttttttcgaggcggagtttcgctgttgttgcccaggctggagtgcagtggctcaatctccactcactgcagcctccgcctcctgggttcaagctattctcctgcctcagcctcccgagtagctgggattacaggcatgtgccaccatgcaaggttggttttgttttgttttgtttttttttaattttgcgacggagtttcgctctgtcgcccaggctggagtgtagtggcgagatcttgggtcactggatgctcagcctcctgggttcacaccattcttctgcctcagcctcctgagtagctgggactacaggtgcctgctaccacgtctggctaattttgtgtgtgtgtgtgtgtgtgtgtgtgtgtgtgtgtggtttttttttttttttttagtagagatggggtttcaccgtgttagccaggatggtctcgatctcctgacctcgtgatccaccctcctcggcctcccaaagtgctgggattacaggcgtgagccaccgtgcccggccaggttggattttataagtagttgggccactaaaatttctgagttgtacagtttcatgtctttagttggcagaccaaagctgatccactcataaaattttatttagtgctctcctttgacgtgagacacgtggtatatttattggcaccgtaatactggctacattatttgacctcatatttcagtttgtgttgcaaggttttgggcattagagctaatgtataggaagccctgtgcttacatatgctgagtatgagtaagtagtgggttaccaactgtttttgatgaaatatctgcatttcaccaaattgccatataccagtctcaaaatatcctgaaccttctgaaataccttcctaagtgagctcactaacacctacttttctgtgtcctttacaattttttcaccacaaagtctcaaagtttcagaaacggaactaatagggtcacttctgctgaagatctcctgtagtattgaagatatttaacatgtttcctttaattgatattggcctttgagaatttttgtatttgccttatttattaggtttaaagtgtacagttggataagttttatcttgtgcatgctcctgtgaaactacctctgtataatcaagatctgcctctatccgattactttcaccttcactgcccctcttcacatgtgcttgttgtcacttgcttggtaagagtggaatggctggattgtgtggatttttttttttttttttttaagacagtcacactactctgtcgcccaggctggagtgcagtgtcatgatcttggctcattgcaacctctggctctcgggttcaagcgattcttgtgcctcagcctcccaagtaggtgggattacaagcatgcaccaccacaccagcataatttttgtttttgtaatagagtttcgccatattggcctggctggtctcaaactcccgacctcaggtgatctgtccacttcggcctctcacagtgctgagattatactcataagccactgcgcccagcccatatggatgttttggtgtatgtttaagcatccaactgtattccaaagtggtcatgtcagtctcaccagcagtgtataagtatgtttcacatctcggctgacatttggtatagacaatgtttttagtttggctattgtagtgcatatacaatagcatctcatggtggttttaatttctttcttttttttttttttttttaaagacagagtcttgctctgtcgcccaggctggagtgcagtggcctgatctcggctgactgcaacctctgtttcccgggttcaagcgattctcctgcctcagcctcctgagtagctgagactacaggcatgtgccaccacacccagctaattattttgtatttttagtagagacgagctttcaccatgttggccaggatggtctcgaactcctgacctggtaatcagcccacctcagcctcccaaagtgctgggattacaggcatgagccaccacgcccagccttaatttccatgtggagtagtgttgttctgtgttccatcacatatccttacatgttctttgccatgccagtatgtttttggtgaaatgtctgttcaaaaattttgctcagttttttttttttttgagacggagcctggctctattgccccagctggagtgtggtggcacaatctcagctcactgcaacctctgcctcctgggttcaagcgattctcctgtctcagtctcctgagtagctgggattacaggtatgcaccaccacgccctgctactttttcgtatttttagtagtagagatggggtttcaccatgttagccacgctggtctctatctcctgacctcgtgatccacctgcctcagcctcccaaagcgctaggattacaggcgtgtaagcccaccatgccccgccaattttgcccagtttttattgggctattcccttattgagatctaagggctctttgtattctagtcaggagtattttgttaactgtatattttgcaagtgttttgtctgtggcttcctgtttaatttttgtaatggtgtcttttgcagagcaaaaatttcagattttgattaaaatcagtgttgatttttttttctttatatagttgatgttttttgtgttgtattcaagaaatctttgtcatgcaaaggtcacttaagattttctgtaagtttttggctgggcacagtggctcacgcctgtaattccagcaatttgggaggccgaggcaggcagatctcttgaggtcagcagttcgagacgagcctggtcaacagggtgaaaccgcatgtctactaaagatacaaaaattagctgggtgtgttggtgaattgcttgaactggggaggcagagactgcagtaagcctagatcacaccactgccctccagcctgggtgacagagcaagactctctctcaaaaaaaaaaaaaaaaaaaagatattctgtacgttttcttatagaacctttatagttttagcttttgcattaagatctgtgatttggctgggcacagtagctcacaattgtaatcccagcactgggaggccaaggcaggcggaaacaatacaaacaaattagccaggcgtggtggcatgcacctgtaatcccgactgccaggaagctgaggtgggaggaatgcttgagttgagttcgggaggtggaggttgcagtgagccgagatcatgccactgcactccagcctgggcgacaaagaccctgtctgaaaaaagcatcatgtgattcattttactcaatttttgtatatgaggtgaggtaagggtcaaggtttatatatttatttgagacagagtcatgctctgtctcctggccagagtacagtggcgcgatcttggctcactgcaaactccacctgccagattacaggtgcacaccaccacacccggctaatttttgtatttttagtagagatggggttgccccatgttggccaggctggtctggaactccagacctcaagtgatccgccagtctcagcctcccaaagtgctgggattatgtgtgagctaccgcacccagctccccaactttgtttctaaaaggtttggctattgttggttttttgctgttccataaaaattttagagtgaaatctggcaaatttcaacaaaagctgtcctgaaatttttattgagattgccttggatctgtggatgcatttggagagaatgaacatctttaatgtcaattcctgattatttcttgctaatatagagaattgccattgttcacttatctcttgaacgtgtagtttaatccagctagtcaaagcccagttcaaactcactttcccttcctgttgtgagaaaacacctcaattttgcaaaagctcttggaatttaacatttctgctgcttttccctgtatgtgtggtgtttagtcttttcatagttcgttgactatggaattcagagcagaaaccctatttcctaatttccttgggaagttttcagaactagatgataatgtaagtttctaataagttgatagtgttactcagaggtgattgtttcatttatgattttgaaaagaaaatgtaaatattagacttaagtccttgcatctaaaacaaattcatgagaaatcccacagaatacaatgttagagatgggagcaaaaattatcagtctaatctcagagagttgacaggcattccaaatcgttttttgtcagtatttaaaccatggtaggataatgtaagaaatatacttaatgcctggtgcgatgtctcacgcctgtaatcccagcactttgggaggcctaggcaggcaattgtctgaggtcaggagttcgagaccagtctggccaacatggtgaaaccccgtctctactaaaaatacaaaaaaaattagccgggcatggtggcgtgtgcctgtaatcccagaatcccagctactcggtaggttgcagcaggggagttgcttggaccagggaggtggaggctgcagtgagctgtgatcatgccactgcattccagcctgggcgacagagcaaggctccgtctcaaaaagaaaaaaaagaaaagaaaaagaaatatctgtaagctataaattatgtttttcatttctaaaaaaaacaaggcaggccaggcacagtgattgaggcctgcaatcccagcagtttgggaggctctcttgagcccagaaatttgagatcagccaggacaagatagttagacttctctctactaaaaatacagaaaactagcagtgtatggtcgagtgcccctgtagtttcagccactcaggaggctgaggcgggagaatcatttgagtccaggcaggaggtcgagccctgattgattgcaccactgcactccagcctgggcaacagagtgataatatctgaaaagataggctgggcacagtggctcttgcctgtaatcccaggactttgggaggctgaggcaggcagatcacctgaggttgggagttcgagatcagcctgaccaacatggtgaaaccccatctctactaaaaataacaaaaaaattagctgggcgtggtggcgcattcctgtaatccctgctactctgaaggctgaggccggagaattgcttaaacctgggaggtggaggttgcagtgagccgagattgcgccattgcattccagcctgggcaacaagaacgaaactctgtctaaaaaataaagaaaagaaagcagtattttcaggcacattgtatatgattgataggaatagtatttccatttctggttaatgtaacaatttgccccattccaagtattttgattacaggcctccatgaaaggcctatacttgatacctaacagtgtttgatccctagcttacatccatgtaacttttttttttttttttttttttgagataaggtctcacgctgtcgcccaagctggagtgcagtggcgggatcatggcttaactctagcctcaacttccggggctctagcaatcctcctgcgtcagtctcctgcataactgggactacgtgcgcatgaatcatacctggctcactgtttctattttttgtagagatggggtctcgctatgttgcctaggctggtcctgaactcctgggctcaagcgatcctctgcctcagcctcccaaagtgtttagattacagtcaagagctactgtgctcgacctgctttcaccttttggctatcatgagtgatgctcctgtcaattttaataaaattttaatcttttagattttttgtccagtgtgtttgaggccataaacatccatttaagaatggcggatgtgcatatagatccatttctcttaacattatcaaagcaggttaaattatagattatctgtgggaaccctaacttaactcctgctttagaattattgttagctgtttgtcttccatgtggcattgttcttattaatatttcattgagagaacagtagtaacaatatcctgtatacccttgtgtaagtaaagagagcagatcactattttattgaccatctttcaaaagatcgattttgtgtgtttttttgttttgttttgagatagtctcacattgtcgcccaggctgcttggattgcagtagtacaatcttggctcactgcaacctctgccttccgggttgaagcgattcttgtgcctcagcctccagagtagctggtactacaggtgtgcaccaccatgcctggctatttttttgtattttaatagacaggtttcaccatgttggcctggctggtctcaaactcctggcctcaagtgatccacccacctcggcctcccacagcgctaggattacaggcttgagccaccacatccagccaattttgatgttttcatggactgatacttgtaataaacatttcaattatatatagcattgatgtagaaatgtaccaaatttacatttttttagcttatggaataaataaatgtttaaactgaaattgattcgaaactagattgaacttgcctttttcctatttgtaatttacatttttaatagtgtatcaaaagccttaaaccattttctgtggtgcaggttgactgcctcttgctggaaatgcttgggatgagaagtgttccagactttgggctttttcagattttggaatatttgcattatgctcacgagttaagcattccaaaactgaaatagcccaatgagcatttcctttttttttccttttttttgagacagagtttcgctcttgttgcccaggctggagtgcgacggcatgatctcgactcactgcaacctctgcctcctgggttgaagtgattctcctgcctcatcctcctgtgtagttgggattacagtcatgcggcaccatgcctggctaattttgtagttttagtagagacagggtttcttcatgttggtcaggctggtctcaaactccaaacctcaggtgagccgcccgccttgtgttgggattacaggcgtgagctatctcacccaacctgagcatttccttttagtgccatgttggtgctttaaaacttgcagatttggggttgggcgtggtggctcatgcctgtaatcccagcactttgggaggctgaggcaggtgggttgcctgaggtcaggagttggagaacagcctggccaacatagtgaaaccttgtctttacctaaaaaaaaaaaaaaatcagctgggcgtggtgacgggcacctgtaatcccagctactctgggaggctgaggcaggagaatcgcttgaactcgggaggtggaggttgcagtgagcggagatagcaccattgcactccagcctgggccacaagaatgaaactccatctcaatcagtcagtcaatcttgcagatattggagtgtttcagatttcagatttggggtacttaaactgtacgtgaaaattagctgctggggaggagaggaattggaatatgtaacatggactcccacattttaaggatttttctaggactgcatctttctcttaataagtcagatccttatttggttgaaaatgtttactgcatgactatcactgactatgtaagatgctgatgtacaactctatgacttgaagattgagttgcttctatgggaatatgacaccatttgaattaatttgttctcaatattttaaagagttttagtgaattctgttcatataaaaatcaggttcaataatgcgtgctttttacgctatcattgagtatccagtgtttacaaggtgtttctgagggataagattattattgctgtgtaaagaatttggcagatggtgtgtaccttctaagttagcttgaggtttatttaaatctcatctttttagcttgctgaagttgatactatgcagttgcaagtttatattgactatttgatattgctgtgtttttatttgaaatgggactgttagacacatttttctttatattgagcaatagagctggaatattaaagatgtatgcattaacccttgcatttggaacatttacatgtcataagctgcctttcagtaagtggttaggcatttctacgggtgtgtattatattttgaataaattttatatggctttccaagaaacaattagagcatttgacccaccgactttgttgtttatttttatttttttgagatggagcctcccgcagtagagatagagtttcactatgttggccaggctggtcttgaattccgcctcaggtgatccacgtgccttggcctcccaaagtgctgggattacaggtgtgagccaccatgcccaacctgacctaccaactttggatgtgaatttttttcatttatattgagaagaatagggtcttgggccactagattgtaccagtgctaagtcagtatctgaatccattgaagatcctgttggcaacgtcaggacttatcaaagacacacaacttcaatgagaacctttctttggaattaattaattaatgatatggagccttgatctgtcactcaggctggagtgcagtggcactatttcagctcactaggaatgcatctttctcttctctttctccacctcccaggtttaagcacttctcctgcctcagcctcccgagtagctgggactgcaggcacaagccaccatgctgagctaatttttgtatttttagcagagacaaggttttgccatgttggccaggctggtctcgaactcctggcctcacgtgatctgcccacctcagcctcccaaagtactgggattacaggcttgagccactgtgcccggctgccttgtttgatttttttttttaaagagacagagatcccctctgttgcccaggctgaagtgcagtgacacaatcatagctcgttgtaacttcagtctcctgggtgatgggtagaattctgccacagcccaagtagctaggagtataggcacgaacgactgtgcctagctaatttttttattttttgtggaaatggggccttgctgtgttgcccaagctggtctcaagctcgtttcctcaaaccctcctcccatgtcagccttccaaagctccaggattacaggtgtgagccatcgtgcgtgacttgtttttgatttttgtatcgttttcttcactcttttttttttttttttgagatggagtctcccgctgtcacccaagctggagtgcagtggcacaatcttggctcactgcaactgcatcttgggttcaagtgattctcctgcctcagtctccccaagtagctgggactacaggcgcatgccaccacgcccagctaaatttttttgtttttattttttgcatttttagtagagacgaggtttcaccacgttggccaggctggtcttgaactcttgacctcagatgatctgcccgtctcggcctcccaaagtgctgggattacaggtgtgagccaccgcgcccggccttcttcaccttttgtatcaagctttttaaggaagagcttagaaagccagtttaaaggaattgaaatgtgttatgtaaatgtctgttttgcaactgagacccactaatttatttagaacaaaaagtcagagaccagtaatgggtccttttctgtcaaatttcaagctgagctgtttctgctacttagaaacatttcgattttctacctagatatgtattatatcattgctaattatttatttatttatttatttatttatttgaggtggagtctcactctgtcgcccaggcttgagtgtactaatttatttttaagtgcagtttaacattggatttttttttttttttttgagacggaatcttgctctgtcgcccagactggagtgcagtggcacgatcttggctcagagcaacctctggctcctgggttcaagcgtttctcctgcctcagcttcccaggtagctgggattacaggcatgagccactgctcctggcctacagttggaattttttgttgttgtttttgagacggagtcttgctctgtcacccaggcttgagtgcagtggcgcgatctcagctcactgcattgtccatttcctgggttcaaatgattctcatgcctcagcctcctgagtagctgggattataggcgcgtgccaccatgcctggctaattttgttgtatttttattagagacagggtttcaccatgttggccaggctggtctggaactcctgacctcaagtgatctgcctgcctcggccttccagagtgttgggattacaggcgtgagccatccgtccggctggaatgctattcttaattgacctgcatttatttatttatttatttatttggcaagccttgaggaagggatttggggaatgaacaatggtacttgatcaaataatccttgtactaggcaatcacagtttctagggccactgtacctggccatgggggttttattgataataatctgtaaggaacaaaagggttagtactatcggaatttttgattagatgtagtgagcattaaggacatatggaaagtagtttgaagtaaaatatatacagtataagagtcagaatcagccaggcgcggtggctcatgtaatcccagcacttcgggaggccgaggtgggcggatcacctgaagtcaggagttcgagatggcctggccaaaatggtgaaaccccatctctagtgaaaatacaaaaaaaagccaggtgcggtggctcacgtctgtaatctcagcactttgggatgctgaggcaggataatcgcttaaacctggaaggcagaggttgcagtgagctgagatcacgccactgcacaccaatctggggtacagtgaggctctgtctcaaaaaaaaaatacaaaaaaagtagccagacatagtggcatctacttgtagtccagggtactcaggaggctgaggcaggagaatcacttgaacccaggaggcggccgtgtcagtgagcctagatcacaccactgcactccagcctggaagacagaggaagactccatctcaaaaaaaaaaaaaaaaagtgagaatgttgcatagattacccaagttaattcttataatttagtgttcatttaaaaggaaaattgatttcctactttttgtttttaaaaatagtattaggctgggtatggtgggtcaggcctgtaatcccaacataaaatgtggccaaggcaggaggattgcttgaggtttggagttcaaggccagccccagcaacaatgagaccaggaaaaatcagccaggcacggtgctaagcacctgtggtcccagctagtcagctagctgaggcaggaggatcgcttgagtccagaagttcaaggctgcagtgagctgtgatggcaccactgcattctagtgtgggcaacagaccaagaccctgcctctaaaacaaaatgtaaaaaatatattttccatttccctattcattttatgtatttgtagcataaatgttactatgcatattgacacttaacaccattagatttctcttacatgtattacgttgctttactgcattagtaatatttttttcgtaattaggaaagtccataattactgttacagaaattttttatttgggatattgtgggaaatggctagtgttgtcatagttaataaaaattatataattaagtgccattgaagaaccatagtttgaaagtgaatttaatacattagctcatagttatacaatctcacaagcattttgctgccttcaggttgtcagtttcctgctaatgctaatgactaaattttttatttttcttttcaacgaaaatttcactcagttctatatatgccagatgaggcttggaacatacagctctacaacctttaactgcttttccaaaaatctgaacgctatgaaaatgaaaaatcttcataatttaactgatttggtgacaaagcgtaaagtgaacagatgtgagagtatttgtaattgttaattttacgtagtaggaaatagtaatttgttcaattagggttgctacttcatatccttttagtgtttcaatataggtgtaccacactacttttcctttaaaaatgttctcagaatttaacattctgcaacactcttgaaccctgtgattttggagaatggaacctatagtagatgctcagcaaattctacatgatgcaaattaaaatcaaggatatgagtatcatgtcttaactgtttaaagagtaggttttactatgaagagatccataagtaaagagcatttgaaatgaaaactttttcctaaacttccctcttttttttaacattgtgtgtgtgaagttaatgttgtatttctaatatgagcttaatgttgcaattaatgtatagtggaaaataataacacgtatattaattcatttttgagacaagagttcgctctgttgcccaggctggagtgcagtggcatgatctccgttcactgcagcctccgcctctaggcctcaagcgatccaccggcttcatccttccaaagtgctgggattacaggagtaagccactgtgcccaagccatcaataaatttttatgggttagaagtttgggccaggcctggtggctcatgcctataatcccagcagtctgggaggccaaggcaggtggattacttgaggtcaggagtttcagaccagcctagccaacatggtgaaaacatgtctctataaaaatacaaaaagtagctgggtgtgctgggcgcagtggctcacgcctgtaatcccagcactttgggaggccgaggcaggcagatcacgaggtcaggagatcgagaccatcctggctaacacggtgaaaccccatctctactaaaaatacaaaaaaatagccgagcatggtggcgggcgcctgtagtcccagctacttgggaggctgaggcatgagaatggcgtgaacccaggaggtggagcttgcagtgaggcgagatcgcgccactgcactccagcctgggcgacagagcgagattctgtctcaaaaaaaaaaaaatagtagctggatgtggtggtgcgtgcctgtaatcccagctgctcaggatgctgaggcaggacaattgcttgaacccaggaggtggaggcggaggttgcagtgaaccaagattgcacctctgcactccagcctgggcaacagagcaagactgtctccaaaaaaaagaaagaaaaggccgggtgcagtagctcacacctataatcccagcactttgggaggccgaggagggcggatcacttgaggtcaggagttcaagatcagcctggccaacatggtgaaaccttgtctcttattgaaaatacaaaaattagccaggcatggtggttgatgcctgtactcgggagcctgaggcaggagaatcacttgaacctgggaggcagaggttgcagggagccaagattgtgccactgcactccagtgtgtgtgacataacaggactccgtctcaaaaaaaaaaaaaaaaaagaaaagaaacacatggaaccaaatcaggatgaaagaaactggaatagcagtttgttataggctgggcttgttggcttgttcctgtaattccagcactttgggaggcccaggcaggaggatcacttgagtctatgagtttaagaccaacctgggcaacaatgccagatcccatctttaaaaatatgaatagcacattaaattcattgattttttttttttaagtcttgctctgttgcccaggctggagtgcaatgacgtgatgtctgctcactgcaacctccacctcccggattcaagtgattcccctgcctcagcctcccgagtagctgggattacaggcacccgccaccacgcccagttaatttttgtatttttagtagagacagggtttcaccatgttggtcatgctggtctcgaattcctggcctcaggtgatccacccacctcagcctcccaaagaattgctgggattacaagcgtgagccaccgcaccgggccggaatttttttaaaatgccaatactggtgacaggattagagtatattaactgattttacttagtctttccattcccacattaattagttctcaaaatttatttgcatgctacaaaagagctcaacaatttttttattacgtgcaatttttttaataggaataaaaaaatacgttgttggcctcattatcaagacgtcatctgacccaacttgtgtagaggtaagagtttattttggagcttattgggagagcataaaatcatttagatattgagtctgactacaacctaattctgtcaagacacatagtcacacatatgcacagtcagtcatttacagtagagctgtaatcatttgttaggattgtctggttatattcttatttatacttacctcaggctctcatttaatcttttacttttccttagaaagaaaaggtgtatatcggaaaattaaatatgatccttgttcaggtaagctttaacttaactgttttccttagaagaattatgcttattatttgaacaaaatgttcgacctacttaggaaataaagtatactaatattttgcagaagtagtgatagtattcttataataataggtaacctactgtctagtacttgaatgttaatttgctgtggcagtaatcatcaaataacgttaaagccatcatttatgtggctgcagtgtggactggactctgttggattcttatttatcttttcttttcttttttttttttttttggagacagtctccctctgttgcccaggctggagtgcagtggcatgatctcggctcactgcagcctctgctacccgggttcaagcgattgttctgcctcagcctcctgagtggctggaattacgggtgcttaccaccacgtttggctaattttttgtatttttagtagagacagggtttcaccatgttggccaggctggtctcaaactcttgacctcaggtgatccacccacctcgacctcccaaagtgctgggattataggtgtgagccgctgcacctggccggattgttttttaattttctgatatgcctgtgcatatttcctttgcatgtatgtctctgagtcctttgatttcctcgtccttctaattgatttccatgcttagtccttaaactgtctatgtagactaaatttataatttttatgtttatctgttttctatagtaatatcataaaattttttccagagaaccctggtatgtgtgggggaaaaaacagtaatttctatttaaataagacttagaaacatccaagcttccaaaaattttagtgtattcagtaattaactccagcttttattatactttagagctttctgttagcccttctctgagtggtgagagagaggagagaatataaagaaggttaacatgtatttttataatctgaaaaatcccttgtgtgtgccataaatagtccagacttgcatacaaatataatgcagttcatgaggcttttggttaaaagtttattcaggccccgattgcagtgcgtcctctcttttaaattcatatatccaaaccctactacatttcaaggctcaaattgcatccaataataagctgtcttaaccggtcactttttatcaccaatggttaattaaatccttgagtctcctaggataatttcttcttttcttgtttgaaatggagtgtcgctctgtcgcccatgctggagtgcagtggcaccgtcttagttcactgaaacctccacctcccaggttcaagcaattctcctgccttggcctccccagtagctgagactactggcccgcgccaccacccctggctaatttttgtatttttagtagagacggggtttcaccatgttggccaggctgctcttttttttttttttttttttgagatggagtctcatcctgttgcccagccttgagtgcagtggcctggtctcggctcactgcaacctctgcctcccaggttcaagagattctcctgcctcagcctcccgagcagctgggatcacaggcacacgtcaccatgcctcgctaatttttgtatttttagtagagacagggtttcaccatgttggccaggctggtcttgaactcctgacctcgtgatcctcctacctcggcctcccaaagtgctgggattacaggcacgagctaccacgcccagcctggccaggctgttctcagactcctggcctcaagtgatctgcccaccctggctccccacaaagtgctgggattacaggcatgagcaaccgcgcaaggcctcctagaataatttctacatatctatcaggcagatactaatacacagacagacccattagacggattggacctttcattaggataattgaaaagggtcctgcggtgattaagataaaagactttgtgttttgttttctacccagtagggtgaagagggtggcacatttcttcctttaataaaggaggagaaaatgaaaagtgatttatccttactcctgcctttatccattacataatttctttgaagtttgttttatttgcctttgagaaatgaagtgcgattaacatttcatgtcttgttttagatactgaaacaagaatggcccaaacattggccaacttttatcagtgatattgttggagcaagtaggaccagcgaaagtctctgtcaaaataatatggtgattcttaaactcttgagtgaagaagtatttgatttctctagtggacagataacccaagtcaaatctaagcatttaaaagacaggcaagtaataattatgttttagaattttaaagtgatttctcaaacaatttcaagcagtttggatgtaaattgtagatattttaaggaactatgatcagtaatatgttaaattgcttgtagtggttttcaactgcagattaagaaatagtcctagacggggcctaataatttacctctgaaggttgaaaaatgaattgttcaagacacacttcaggaattgttttgtatggtaactagtttaataggttctaagcaaatgatttgtgtccaaacatacgtattagttattttattttattttgagacaagtcttgctctattgcctggggtggagtgcagcagcgcaatcttggctcaccacaacccccacctcctggattgaggtgattttcttgcctcagtttcccaaatagctgtgactgcaggtgcatgccacagagcctggcctcaaatcagttattgtctctgcttcttttcagttccccaattgttaacaatagtgttctttttaaaacaaaacagaaaactagatttgcctctaatagtaagcaactggtataaactatagttatacttccattaagttttaaacatttgttgtagtcattaggaaatctttttccccttgggttgcccaggctggtctcaaacaatccttctgccatggcctcccaaagttctgcgattacaggcatgagccactgtactgggctttaatcatttttattagtattatagataactgatacttatttctgtgtcttctaaatctgatatttttgtgtgtttttttttttagcatgtgcaatgaattctcacagatatttcaactgtgtcagtttgtaatggtaagtgtttttaatttcatttttaaaaacaataataggaaagcaattatttacaagtgtgttttgttataggaaaattctcaaaatgctccacttgtacatgcaaccttggaaacattgctcagatttctgaactggattcccctgggatatatttttgagaccaaattaatcagcacattgatttataaggtacagtgaatacatttcagttatttgtcaccggatagccacatatattcttttcacatgtaaagctctcatctctgcattctaaaccttattcaaccttgtttctaacacgaggacgctgctcaggagaaatttcccatattcacacctagtaaattatttaaagtgagtttcaaatctgattctgccacttagaccatgtaattttatgaattcattttgaacaatggatttgattatattgcttttagtttgagtaagttacagtgaggtaagtcaagtgctatttctgaaaaatgaaaagttcatcttttaactgataatttaaaattgataccatgttatggcttaagttctataatggtttagcctgggcaagttggtgaaaccggtctctactaaaaatacaaaacagccaggcgtggtggtgtatgcctgtagtcccagctactcgggaggctgtggcaggagaatctcaaactcaggaggcagaaggtgcagtgagccaagatcgtgccactgcactccagcctgggcaacagagcgagaccctgtctcaaaataagtaaagttctacagtggtttatccagagataatcactgttaccagttggttgtattatattttcagatgttttcttgactgatataatgaataaattaagtatctaattggaacattataacttgacctcttcaacttcgtagtttagtttggtaagataatatggatttatagtatttgaatgatcagtttattgcttaattatgtaaaaacctttctattgtcaacagtcctacagagaacattctcagacataagatattatgcaattgtccaaacattaatttatttaaatattttaatgtttaatcaccagattattaggtatgtttaattttaaggttttaatgccccctgatttccaaccccagacgataactgtttatcttctcaacaatagaatatataagccaattttcccatattcttattactcttagatacattgaccatttcccaaaattctaagcaatcacaagttttaggtcctgtgtaattacacagaaagtataacattcctaaaagtcatatcacagattctaggaaagttgttaaggagccttgttattttaggacacatcaaaagaaagcagtttaggccgggcgctgtggctcacgcctgtaatcccagcactttgggaggtcgaggtgagcggatcacgaggtcaggagatcgagaccagcctggcccaacgtggcaaaaccctgtctctactaaaaatacaaaaattagccgggcgtggtggcatgcatgtgtagtcccagctatttgagaggctgaggcaggagaatcgcttgaatccaagaggtgaggttgcagtgagccgagatcaagcccctgcatttcagcctgggcgagcgagactctgtctcaaaaaaacaaaaaaagtttgctcctaaagcatttactgtatactaggtaggcaataaaattccctctcagtatatctgcatgataaaatatgttcattcacttggcctgtttttgacatctacccctatatttaattgttaaagcctttttccttttaattgtgaattttaagtaaagtgtgtatcaggccaattaattttatggttccctccccccttttaaatagttcctgaatgttccaatgtttcgaaatgtctctctgaagtgcctcactgagattgctggtgtgagtgtaagccaatatgaagaacaatttgtaacactatttactctgacaatgatgcaactaaagcaggtaatataatactatcttgaaaattggctgaataattttagtgccttagaaaataccaaattccaaatgagttattttagaacgacgtatcaaagataagccataatcttttgtttattacataaaatttgtagtaagctacaaatttttatgatgtttccaaaaatttcttaaaattcaggtttggggtgtgttgtggtaatttatttctgcacactttaggagcttggtcttttgggagatacctgaccagacagtgggaaacctgggacttgttcctaacattgtgtctgaaggaattcttttcagccctagtttgattggttatctattaaatgatctagaaggttattcataatactgtgttcatggccaggcatggtggttaatactgtaatcccagaactttgggaggccagaatgggaggaccagttgatgccaggagttcgagaccagccaggacaacataaccagaccatacctacgaaagatttaaaaaatagctagctgtggtgttgcacacctgtagttccagctactctggaggctgaggcaataggatcgcttgagcctattaatacaaagttaaaatgagctatggtcacactattgcactccagcctggatgacagggtaaatccctgtctcttttaaaaaacaaggaaagatagattactatgtatgtttgtgatctgaatgaatgaattgattatttttacatttttcaatgtcagtgagaaatactagaaaaatttaaaggctgtgatagcggcctttaatttatttgagaagagtcaaaatctaagtcctagagatataagaataggtatactggacctaggagttctgtatgtggtttaatattagcaaaagggtgttgggatattagggcttaaaaataatagtgttggctgagtgcaatagctcagacctttaatcccagcactttgggaggctaaggtgggaggattgcttgagccaggagtttgagaccagcctggacaacataacaagataccgtctctacaaaaatgttaaaaataagcttagtgcgatggcacatacctgtggttccagctactcgggaggggctgaggaggactgattgggcctaggaggtggaggctgcagtgagctttggtcataccactgcactccagcctggacagagtgataccttgtctcaaaaaaataataataaaatattaagtgtctttagttgttttataaaatgcgaactgatcgtcccttttaaaatttgcagatgcttcctttaaataccaatattcgacttgcgtactcaaatggaaaagatgatgaacagaacttcattcaaaatctcagtttgtttctctgcacctttcttaaggaacatgatcaacttatagaaaaaagattaaatctcagggaaactcttatggaggtaagatatgtggagcttttgctcctaaaattctgctctgcctactaataactcttaaaagtgcctttttctaaaatgtatgtaccttttgagatttcttattacttaatatttgatcagtacattatatatattctcaattctgaattacagttataagcccagttttctgattttatgttctccataaagctaggactaaaaatttataatcaaaattaaattactaattattatatcatttctaaggttaaaatttcaaagaccttattttaaaatttcagttttaattcaaataacatgcatttgttcatttaaagatatacaattcatcgtgtaatcccagcactttgggaggcggaggtgggtggatcacttgaggcaggagttcgagaccagcctggcctacatcgtgaatctctgtctctattaaaaatacaaaaaaattagctgtgcgtggtgtcacatgactgtaatcccagctcctcaggaggctgaagcacaggaattgctttagcccagtaggctgaggttgcagtgagccaagatcacagtactgcactccagcctgagtgacagagcaagactctgtctgaaggaagaaaatgtctctctctctctctttatatatatatataaacttaagtatatatatatataaacataagtatatatatatatacacacacacacacaattcagtggcatattagtatatatacaatgttatacaaccattaatacctagatccaaaacattttcatcacccgaaggtgaccctttacccctaaaacagtcactttctcctttgttctctccccaacttctggcaaccattattttggtttctgtctctgtagatatatctattctgattataccatataaagggaatcatgcatgtgaccttttgtgtctggtttcttttatttggtgttgtgttttcaatgttcttccatgttgtaacctgtatcaatacctcactttttatcatgtctgaagaatattctcattgtatgaatattcagtattttgtttgttctctcctctgtgatggtacatttgggttgtgataccacttattggcacccaaggccttttaaataaatgtcgttccattaggagacatgataaaaatacatattgatcaactactatgtgagagatttttgaagtgctttagggcatgtcagaagaagcagagttactccagagtttgctgtctatttgataagtattgaaatctgagttgtgatgaataaaacatgaatttttattttcccttaaggtgtaacaagtgaaaagcaatttgaagttggtaatgtttaagaattattttaacagttttggtcttctgtgtaggcccttcattatatgttgttggtatctgaagtagaagaaactgaaatctttaaaatttgtcttgaatactggaatcatttggctgctgaactctatagagagagtccattctctacatctgcctctccgttgctttctggaagtcaacattttgatgttcctcccaggagacagctatatttgcccatgttattcaaggtaacagagcggttggttgagtgttcttcctgttgcatactgtggttttgaggtctgaatccaaatacttctaatctgtgtaaataaattagctataaaaagagaacccaacaacttctccatgagtgtggaaaactagaacatgaaaggagttgagtctagaaccttgattctcaagagtgtggtccttctctcagtatcaacattggttgtgatttcgttaggcaaattcattggccacctgccaatctactaaaccagagtctaggaatgagacacaggaaactcctgtaacagaagttggttaaaaaaatcacattaaaacacacttaaataattataaagccatttttgtagaattacagtgaaaaaaaattttttcttttggagacagggtcttgctctgtggctcaggttggagtgcagtggcgtggtcatagctcactacaatcttgaactcctagactaaagcaattctcttgtgtcagcctcccaagtaattggttgcaggcacacaccaccatgcctagcaaattttaaattttttagttttacttcatttatatttacatagttttttctgttgtgctttaagccccagtatttttattgttttagagattgggtgtcattttgtgttgctcaagctgctctcaaattcctggccacaacagttctttttgcctcggccctccggaatagttggaattataggcatgaatccctacacatggctggcttgtggtttttttggttttgtttgtttttaactaagcttctacactaatgatttcagtgatctaacgatttttttcttgattgatatattgttgagtataggtccgtttattaatggttagtcgaatggctaaaccagaggaagtattggttgtagagaatgatcaaggagaagttgtgagagaattcatgaaggatacagattccataaatttgtataagaatatgagggaaacattgggtaagttaataaatactgttaatctttacctttataaatctattctggggtggaaatacattttaggaaatgtacttgtagtttctaaatattttctaaatgtattgttactcatcaataaaattctgctcattatttgcatttgaaaccatgtttttctttgtagtttatcttactcatctggattatgtagatacagaaagaataatgacagagaagcttcacaatcaagtgaatggtacagagtggtcatggaaaaatttgaatacattgtgttgggcaataggctccattagtggagcaatgcatgaagaggacgaaaaacgatttcttgttactgttataaaggtatgcaagggataggtatgaattagaattgctaaataagtattatgttgttacaataaataatacaaatttgtcttatttacaggatctattaggattatgtgaacagaaaagaggcaaagataataaagctattattgcatcaaatatcatgtacatagtaggtcaatacccacgttttttgagagctcactggaaatttctgaagactgtagttaacaagctgttcgaattcatgcatggtaaatctctttctttactatattttgcttttatttttattgaagaaaataaatgaatgtttttgtcttgttagagacccatgatggagtccaggacaaaataaatgaatatttttgtcttgttagagacccatgatggagtccaggatatggcttgtgatactttcattaaaatagcccaaaaatgccgcaggcatttcgttcaggttcaggttggagaagtgatgccatttattgatgaaattttgaacaacattaacactattatttgtgatcttcagcctcaacaggtatgttaagcactgagcatatgttatttttagaaagtaacacttgtatcaatctgtatgtatcaatggaaataggagggcaactattggatccaatagaagtgtttctgattaaattttctttcttttttccttgagacagggtcttactctgttgcccaggcttgagtgcagtggcacaattacggctcactgcagccttgaactcccaggctcaggtgatcctcccaccttggcctcgtgggtagctgggactacaggcatgcactgccatcacactcagctaacctttttcccccccttggtagagatggggttttgccaagtggcccaggctggtcttgaactcctagcttcaagcgatacgcttgcctcagcctcccaaaatgattttatatgtgtgagccaccacgcccagcctggttaaattttcatagtgagacagattcttgaccagaagattgttaggctgttgtcctatgtaaaattattccgaacaaacaaaatcaggtgttttttgttttgttttgttttggggtgtgtgtgtgtgtgtgtgtgtgtgtgtgtgtgtgtgtttgttttttgagatggagtttcactctgtcgtccatgctggagtgcagtggcgcaatctcggctcactgcagccttgcctcctggggtcaaacgattctcttcctcagtggctatgattaacaggtgcttgccaccacgcccagctaatttttttatttttagtagagacggggtttctccatgttggtcaggctcatctccaactcctgacctcatgatccgcccgcctcggcctcccaaagtgctgggattacaggcgtgagccaccaccatgcctggccagtttgggttgtttgtttgtttgttttttgaggtggagtcttcctctgtcacccaggctcgagtgcagtattgcaatctcggctcactgcaacctctgcctcccaggttcaagcaattcaaacctcccaagtaactggaattataggcacctgccaccacgcttggctaatttctttgtatttgtagaagagatggggtttcaccacgttggtcaggctggtctgcaactcctgaccacaagtgattggcctgccttggcttctcaaagtattgggattacaggagtgatccactgcacctgggccaaaatcagtttcaagacgtttgtgaattgcttgtgtgtggttttccttattagggtgtataacataaacgttaaaatgtctgctttttaaaataggttcatacgttttatgaagctgtggggtacatgattggtgcacaaacagatcaaacagtacaagaacacttgatagaaaagtacatgttactccctaatcaagtgtgggatagtataatccagcaggcaaccaaagtaagtatttctaccttttcttaaaagttttcatgggatttaacaagacgtgttctttacaaatgtattgaattcaagccttttaacatgtatgtgtgatccataagtgcttttatgtgtgtctttctataatttattatctgggcgaggtgtggtggctcacgcctgtaatcctggcacattggaaggccgaggcgggcggatcacctgaggccagaagttcgagatcagcctggccaacatggcaaaaccccgtctctactaaaaatacaaaaattagctgggcgtggttgcacatgcctgtaatcccagctactgaggaggcttaggcaggagaatcacttgaacccaagaggcagaggttgcagtgagccgagattgagctactgttctctagccgagacgacagagcaagactctgtctcaaaaaaaaaaaaataaatgaaaaatctgggccgggctcggtggctcacgcctgtaatcccagcactttgggagaccgagacgggtggatcactaggtcaggagattgagaccatcctggccaacgtggtgaaaccccgtctctactaaaaatacaaaaattagccaggcatggtggtgggcgcctgtaatcccagctactcgggaggctgagccaggagaatggcttgaacccaggaggcggagcttgcagtgagtcaagagcatgccactgcactccagcctggtgacagaggaagactctgtctcaaaaaaaaaaaaaaatactgtaatttccattctcatttgatattaaaataggaataggctgggtgtggtggctcatgcctgtaatcccagcactttgggaggccgaggcaggcggatcaccaggtcaggggatcgagaccatcatggctaacgcagtgaaaccctgtctctactaaaaatacaaaaattagctgagtgtggcggcgggcgcctgtaagtcccagctactcaggaggctgaggcaggagaatggcgtgaacctgggaggcagagcttgcagtgagccgagatcacgccgctgcactctagcctgggcaacagaacgagactccgtcccaaaaaaaaaaaaatagaactatattacttcattcttaagtagatgtagacaaaaaggcgtttgtgttcgtttttaccatttgggattataaatatggtttagggtaagggaagcgtaatggcttttgctttggtaattatgtggattttttttttttttgagatggagtttcactcttggtgcccgggctggagtgcaatggcgtgatctcggctcactgcaacctctgcctcccgagctcaagcagttctcctgcctcagcctcccaagtggctgggattacaagcaagcaccattgtgcctggctaattttgtatttttagtagagacagggtttctccatgttggtcaggctggtcttgaactcccgacctcaggtgatgcacccgactcagcctcccaaagtgctgggattataggtgtgagccacctcgcctggccattatgatggataattctttttttttttttgagacggagtcttgctctttcgcccaggctggagtgcagtggtgcgatctcggctcactgcaaactccatctctagcgttcacgccgttctcctgcctcaacctcccgagtaggtgggactacaggcggctgccaccacgcctggctattttttttgtatttttagtagagacggggtttcaccgtgttatccaggatggtcccgatctcctgaactcatcatccgcccgcctcggcctctcagagtgctgggattacaggcgtgagccactgttcccagccgtggataattcttatatgataaatggaatttgctttttttcctccaagaatgtggatatactgaaagatcctgaaacagtcaagcagcttggtagcattttgaaaacaaatgtgagagcctgcaaagctgttggacacccctttgtaattcagcttggaagaatttatttagatatgcttaatgtatacaagtgcctcagtgaaaatatttctgcagctatccaagctaatggtaggtgattctgatttcttacacaatgcagtataaacaaaccacttctcttctactgccttaagtcaaacatttgatgttttttacagatttaaatcagacctcccatttcccaaatgaccctagacatatttaaaacagttaagtgtacctttcccttttaaaattagtcttaaagcttattttcccaataaattttgtgaacttttggctttaaactttttaatggtaaaatggaattgcatctaatgtacacctgagtaccactgtataagtttagtggtaaaattagattccatttgattctgttttgtaggtgaaatggttacaaagcaaccattgattagaagtatgcgaactgtaaaaagggaaactttaaagttaatatctggttgggtgagccgatccaatgatccacagatggtaagtgagagatgctttgcttttgatttctagtgttgatgctgtgttttatggaatatgctatactctattatgtgcattttgctaatttaaagcatatcaactttgtggttattttatggcattttatttattgtagtccttacgttaatatactaatagctgtattccatcttcaaaagaaactgctgttaatcagtagcgaagggtggtgatatgtaacaagatagctaagaaaattgggtcattttatgtttccatagataggttaggaggatttaattaatggagtaccggtgcagtttttgcattcctcttgatttttagaacaattgctagagctacaaagttgtcattactttacctctttagcaaagtgattgcttcccagattaaaggcctgaaagtcttttttacaccctttttcctaaatgatttgcagaaaaggaaatcattttcagtaataaaaaccagctgcgtatgcctcaacttgtaaaattgtgaattagttttaggttttaactgtatcgtttcattcttgttattcaattgagccttgggagagtccaaaaaattctaatactactattacttggaatagtgttggttttttgttttttggtttttttttttacaagtgtgctagttattttcatagttttgaaatttcagtattgtttcttgttaaggaaatacttttcagtaaacttgttctgaatataattcttgtggaatacttaagttggctaacctaaatatcgaaaggttctgaacatgcgtattatgtgaacagaactgtatttaaaatttgaaagcagaaagtaagatgtattgaaggaattgtgatgtttgtaatttacaagaagcttgagcacgtgtcgggagcacagtgggaataatacaaagggtatcatcttttgtaacattaatgttaaagtttgggatatttgttcacatgaaacattgtgtttattttccttgtcttggcttttcacggtggctcatgcctgtaatcccagcactttgggaggccgaggcgggtggatcacttgaagtcaggaggctgaggcaggagaatcacttgaaccccagaggtggaggtgacagtgagccaagattgcgccattgcaccccagtctgggccacaagtgggaaacttcgtctcaaaaaaaaaaaaagaacaagaagttactctttaagtataactcagtttacttagaatcatgaaaatcttactgggcattgtagcatgcacctgtaatcccaaccaccagggagggtaaggcaggcgaatcaccccagctcaagtccagtttaggcaacatggcaagattcagtttcaaaaaaataatagaaatccatagtctttcttattttctgagagtaattgattgatgttatttctgcttgtgaaaatactcaccagttagcattcattagattaaaacattagtctgagttgggtggatcacgaggtcaggaaatcaagaccatcctggctaacacggtgaaacaccccgtctctactaaaaatataaaaaattagctgggcgtggtggcaggtgcctgtactcccagctactcgataggctgaggcaggagaatggcgtgaacctggaggcggagcttgcagtgagccaagatggcaccactgcactccagcctgggcgacagagcaagactccgtctcaaaaataaaaagacagtattgagggctcgcttgctgccatcttacatatacagtatacgtagaatcctgattctgccacctaagttggagacacccactgaattttgagcctcacttttcttattgtgagagttttgtagctgggcatggtgctatacctatagtcccagctactcaggagactgaggcacaagaattgcttgaacctgggaggtggaggttgcagtgagcagagatttgccactgcactctggtctgagtgacagtgagactgtctcaaaaaaaaaaagtcttgaatgacagtgtgtccatgagacttcccaacccattgtgatttcctgctttcttttgctaaaaactgttttgacgtaggaaaccctaatacaaacacaagattttcctgttttcagtagatgatcatgctacatctcatagacaggaataaccttgttgtttaaaatagtcaccatgtacctaaattaaaacataacttttttttccctccccaacaggtcgctgaaaattttgttccccctctgttggatgcagttctcattgattatcagagaaatgtcccagctgctagagaaccagaagtgcttagtactatggccataattgtcaacaagttagggggacatataacagctgaaatacctcaaatatttgatgctgtttttgaatgcacattgaatatgataaataaggtgtgtaatatttcagttatgtaagggggaaattctgcaggatagccttaattcttgaaagctaaagtatgtctgtggatataacataattttaatgccatggagtttaaatatttaaacttgtatattagggaaatactttcttggttttcaagaacttacttcccaggagtttgaaaccaacctgggcaatatagtgagacttcatctctacaaaaagttcaaaaagtaaccagtcatggtggcatgtgccggtagtcccaactactcgaaaggctgaagtgggggggggggtcacttgagcctgggagttcaagatggcagtgagctgagattgcgccactgcactccaagaagaagaatttactacacagaatcttgattggtaaaaagtaaatatggaaaacagattttagcattcacatggtatgtagcatttattgaaacctcataggtcggggcatccttttatgaacgtagttgtattaattggtttgaataaatgagaaagtaagtctgcatgtttcaattataaaagtgtagtatatgcttataagaaactgaaaaatgtgttaacaagagaaaataggctggccatggtggcttacacctgtaatcccagcacttcagaaggccaaggcgggcggatgacctgaggtcgggagttcaagaccagcctgcctaacgtggcaaaaccccatctctattaaaaatacaaaaatggccaggcgtggtggctcaacacctgtaatcccaacactttgagaggccgaggccggtggatcacctgaggtcaggatttcaagaccagcctgaccaacatggtgaaaccccatctctactcaaagattaggctgggtgccgtggctcacgcttgtaatcccagcactttgggaggccgaggtgggcagatcacgaggtcaggagatggagaccatggtgaaaccctgtctctactaaaaatacaaaaaattatccgggtgtggtggtgggcgcctgtagtcccagctactcggagaggctgaggcaggagaatggcatgaacccgggaggcggagcttgcagtgagccaagatcgcgccacgcactccagcctgggtgacagagcaagactctgtctaaagaaaaaaaattagctgggcatggtgccgcatgcctgtagtcccagctactcgggaggctgaggcaggagaatctcttgaacccaggaggcggaggttgcagtcagctgagattgcgccactgcactacagcctgggtgacagagtgagactgtttaaaaagaaaaaagagataaaagatacgttaagtggacacatttacacggtaacttaaatttttttgtaatctgtagtggtgatttcaaattaaaaacaaaagtgatagtagtagtcttatggtaataatggtttagatgagttctctattaaaaaggttgtctttctccttcaatttgataactcatgtgcgtaacgggacagtttcattttccgtgagaggtggattgtattttacttgggtttacctttcaggaggcattctatcttctgtggtttattgaaaactccaaatatttatactggattaagccttgcttttcccctcctgtctagcacaacaaagacactgaaacattattttgtttccaccacttatttttaggactttgaagaatatcctgaacatagaacgaactttttcttactacttcaggctgtcaattctcattgtttcccagcattccttgctattccacctacacagtttaaacttgttttggattccatcatttgggctttcaaacatactatgaggaatgtcgcagatacgggtaaataaaagatgttcttttattcatttgcctgccaatccaaaaatacaaatatagttaattgtacataggaaggtattacttgttcagagttttgagtgtgtgaattacatatatgaacatctgagaaaatcctataagcagtttaatcaactgttccactccactccaagtgagtccataggcagaattgagttatggggagagcggcctagtaataattggtttgcgtaatacaaagttctactgggtagtgatgttgtagaagttcatatagaatcagctgagctttcagaaatggtgaaagggtggtaatagtcataacttagattgtaatttttttcccataggcttttaaaaaatattcatgaggttctttttttatttcaatagtttttggggaacaggtggtttttggttacatgaataagttcttcagtggtgatttctgagattttggtgcacctgtcatgtgagcagtatgaactctactttatgtgtagtcttatccctcatgtgtatgaactccaccttatgtgtagtcttatccctcacccactcctgcccttccccacaagtccccaaagtccattatatgatctttatgcctttacatcttcacagtttagctctcacacaacttattataatttataagtaagccagcattggatatagttgtattccattattaatttaagaaaccttatgcaagtaattattagtcatcatcccaaaaaaaagggagaacagggttagattcagaatactttgataagagctaaatactatcatgagtgctgtcagtctgtagtaactttccattggtattctatgtcttttaggcttacagatactttttacactcttacaaaatgttgcacaagaagaagctgcagctcagagtttttatcaaacttatttttgtgatattctccagcatatcttttctgttgtgacagacacttcacatactgctggtaagaatttaatacgatttaaatgttaagtgccagctgggcacagggcctcacgcctataatcccagcactttgggaggtcgaggcggggagattatgaggtcaggagttcgagaacagcctggccaccatggtgaaactgtctgtactaaaaataccataaaaaaataaaagatacaataaaaatactgggcatggtggcatgtgattgcaatcccacctattcgggaggctgaggcaggagaatggcttggaccgaggaggcagaggttgcagtgaactaagattgcgccacggcattccagcttgggtgacagagcgagactccgtctaaaaaaaaaaaacaaaacaaaaaaaaacgctaagatctatagttatattacattttggagttaataattttcttcttatcaacaggtttaacaatgcatgcatcaattcttgcatatatgtttaatttggttgaagaaggaaaaataagtacatcattaaatcctggaaatccagttaacaaccaaatctttcttcaggaatatgtggctaatctccttaagtcggccttccctcacctacaagagtaaatataccttttaataaacgtagaatgttcctggtcgggcacagtggctcacacctgtaatcccagcactttgggaagcctaaggtgggaggattgcttgggcccaaaagttggagaccaacctagacaacaaaacaagatcccgtctctacaaaaaaaaaagtagtcagaagtggtatgcatctgtaggaccagctgttggagaggctgaggcgagagggttgtttgcatcctggagtttaagactgcagtgagctatgatcgcaccactgtacaccagcctgggtgatagagtgagaccctgcctctttaaaaaagcaaaaaaaaaaaaaaaaaaaaaaaggccacgcacggtggctcatgactgtaatcccaacactttgggaggctgaggtgggtgaatcacaaggtcaggagttcaagaccagcctggccaagatggtgaaaccccgtttctactaaaaatacaaaaaattagttgggcatggtggtgggtgcctgaaatcccagctacttgggaggctgagggggagaactgcttgaacccaggaggcagaggttgcagtgagccgagattgtgccactgcactccagtgtgggtgacagagcaagactgtctcaaaaaataaaaaggctgggcacggtggcaaacgcctgtaatccaagcactttgggaggcctaggcgggcagattacctgaggtcaggagtttgagatttgcctgaccaacatggagaaaccctgtctctactaaaaatacaaattagccgggcatggtggtgcatgcctgtaatcccagctacttgggaggctgaggcaggagaatagcttcagaggttgcggtgagccgcgattgtgcgattgtactccaacctggtaaacgagcaaaactttgtctcaaaaattaaaaaaaaattcttgattaaaaaaaaaaaacattattgggacgctgaggcaggagaatgtcttgaacccgggaggcagagattacagtgagcagagatcatgccactgtactccagcctggtgacagagcaatactctgtctcgggggaaaaataaatcattatttaatcattgtgttttgatttgcagtgctcaagtaaagctctttgtgacagggcttttcagcttaaatcaagatattcctgctttcaaggaacatttaagagatttcctagttcaaataaaggtatgtatttatttgctcttgcagaaatattaggggtagatgtgaccacttttatgttacattgtagaatttttatcacttgatttgtcatgccaaataaatggggtttcaagataatacgtttacacaatctctgtaatcaaaaaacctgagactggtaatacagtgaaaaactaaagtccaataaggatagatatgtttgagatgttattcggataaacttattactaatgtaattcattttaggtagtcttaaatgtataatggaatattgggtaagaaaaacgttggtagttctttttataattttataccaattttgttagttgagggaacttgtgaaagttactagatagaatgtctttcttctgctgttatacagtgctttattcatacttttgggaagggtttttctttgaacatcttgctttaaagaaatttggaagtactgtgaaaccctaagtagttgatgaatagtttatccatgattgttgaataagaattagtctcttagctcttaaatattttctccaaaatacaaaggttttttttttttactgtaaaaatattagccaatttttaaaaaactaatgaaagttacctaggctgggcgcagttgctcatgcctgtaatcccagcactttgggaggccaaggtgggtgggtcacctgatgtcgggagtttgagactagcacggccaacatggtgaaacccccgtctctactaataatacaaaaattagccaggcgtggtggcgcacagctgtattcgcagctacttgagaggctgaggcaagagaattgcttgaacccacgaggcaaaggttgcggtgagccgagatcacgtcattgcactccaacctgggtgacaagagtgaaacttcatctcaaaaaaaaaaaaaaaaagttaactgatagctacgaagtcaatgataatataactaaacttaatttaatgacagttattaattagccttaggagaaacatctttcttggtatcttggcatatgaagaatttttagctgggcacagtggctcacacctgtaatcccagcactttgggaggccgaggcagacagatcagttgaggtcaggagttcaggatcagcccggccaacatggtgaaacctcatctctactaaaaatacaaaaattagccaggtctggtggcaggtgcctgtagtcccagctactcgggaggcagaggcaggagaatcacttgaacccaggaggcagaggtttcagtgagctgagatcataacactgcacgccagcctgggcgacagagcaagactgcctctcaaaagaaaagagaaaaaagtgtctgggtgcagtggctcatgcctgtaatcctagcactttgggaggccgagacaggtggattgtctgagcttgggagtttgagatcagcctgggcaacatggtgaaactacgtctctagtaaaaatacaaaaaatgagccagatgtggtggtgcctgtaatcccagctgctggggaggctgaggcaggagaattgcttgcatcttggaggaagaggttgagataatgtgctggggctacagaacaagactctatcacaaagagaacaaaatttgtgtgaatacatagtaggtgtatatacttaggggatgggatgcatgagatacttcggtagaagcatacaatgcataataatcacattgaagactatttactgtaaggtatcacaccattttttttgttttttttgggggggcacagtctcgcttttatcacccaggctggagagcagtggcgtgatcttggctcactgcaacctccgccatgcaggttcaagtgattctcctgcctcagcctcccaagtagctgggattacaggcgcctgtgccaccatgcatggctaattttagtaatgacagggtttcaccatgttggccagggtggtctcctgacatcaagtattcttcccgtctctgcctcccaaagttgggattacaggcgtgagccaccatgccggggcccatgattcttttgtaatcttcccccccaccagttaacaggtttgcagttcattcagctatgtagtatactgtgtcactatcctataatttaaaacccagccactttatggataatttatattccttccttctctaaaaaggaaattgctcatctatgatttctttctttgcaagttgaagtttattgcgttgacatttcaactatctgttttcacaggaatttgcaggtgaagacacttctgatttgtttttggaagagagagaaatagccctacggcaggctgatgaagagaaacataaacgtcaaatgtctgtccctggcatctttaatccacatgagattccagaagaaatgtgtgattaaaatccaaattcatgctgttttttttctctgcaactcgttagcagaggaaaacagcatgtgggtatttgtcgaccaaaatgatgccaatttgtaaattaaaatgtcacctagtggccctttttcttatgtgtttttttgtataagaaattttctgtgaaatatccttccattgtttaagcttttgttttggtcatctttatttagtttgcatgaagttgaaaattaaggcatttttaaaaattttacttcatgcccatttttgtggctgggctggggggaggaggcaaattcgatttgaacatatacttgtaattctaatgcaaaattatacaatttttcctgtaaacaataccaatttttaattagggagcattttccttctagtctatttcagcctagaagaaaagataatgagtaaaacaaattgcgttgtttaaaggattatagtgctgcattgtctgaagttagcacctcttggactg

SEQ ID NO: 15885 - DNA, 59549 bp, Homo sapiens
ggagaagcggctgcagcggccgcggcaggagcagcgggagctacagcatcagcaagagcaacagtagctacagccccggcggcggtgcctgttccagtctttgctgctgcagtccgtgcaaccacccagagggggaggggggaaccaccagtcgctgaggaacaagagaaggggggaaagtttaggcgagccttgggggggggggggccagcgccggagccgcgtgagagagggagccgtgttttggtaggggggagtcggactgcaactggcagcagagcgtctccccggccgtgtggactctacaccccctactcctgccgcttctgctgctgcctgtggctggagggtccccctggggctgaatctttgggacttgaccccgttccctcccccttccctcactccccagccgggcgggagcatttattccccagattaattccccttttgggggggggcgggtgtgtgtgtgtgtgtgtgtgtgtgtgtgtgttgggggaagcgtccctgaaatagtaaatattattgagctctttttgcccttttcctgtccgtttttttaatttccttttttgaggtgggaaaactgaaacccaccttgattcgtcccctctcccccctccccaccttccctcgccctaatcccccaacgaggaaggaaggagcagttggttcaatctctgggtaagtcgactgtgtcttcggggccgagggtcgggcggcggcgcggccgggcgggcgggaggaggccggcgtggggcgcggcggcggcggccgcgggaagcgagcccgggaggcggcgggcgggccgggggcgcggcgggcccacagcggagcctgcgattgaatggagccgcttttgccgctgggggatggaggcggggaggcggcctcgggaggggagcgcttgctgggtcattcgcgtgtgcgggtggcggtggaggaaggcgaggagtgtgatagtgaagcggggccccgcgcggggtgggaggggttccccagcccctggggctggggagaagttggggtgatttcaggaacatctctgtaaattattaggagtggaagtttccagaaatatttagtgcagcagcattgaaacgtccgcctgcatcacgtggccccctcggtggagagcttgggatgggggagggaggggctgccgactccctgttcctccagcaaggaaactcgaaagctctccggttttgcagagtggcatgtgaagtaggaaagatcagtttttcaggggcctgcacatgggattccgtcttgtagttccttttcaggggtttgaatgtgataagttggttaaaccatttactgttggccttgtacagtggaggatgccctgattctccttcattccgatgtctgtgagtttgggttgggtgggaggaagtggtgtagtagaggaagcattcagtactggctcagcccggacctcctctgatcacgccgaggccatgctgcatagagaaaggggcggtgaacttaaggcgcctggtctaaatgcctcctccgagtaagggcggggtgagtgcgtgctcctgtgtgctatagttagaagggctgcaaatcggttcgggtgggaagcgaggggagggcgggccctaatgaggtgtgtttttcctgaatgaagcgggcgattgcccacacaacctaaggagcagtctttcgccttgtagcgacttgtttttcacctagtgtgaagttattaagcaacggttatgattttctgggttttgtttaggaattggcattgggtgtcacttgtagagtcacattatccattaagctggataatccctagtgtatgttatccagtgagtggattttaggattgaagagcccaatgggaatgagcgttcgtggttacacctctcgcactatggcttgtttgctgtctgattgtatatcttaagtgtgggacactgctgttagtggaaagaatgttttggaagcggtttgatttgggggactaaatgtgcttggcattgaccacaaagccgccatttctgtactatgtacagttcaggaataggtaggtgatttcgaagatagccgctagttctaaggatggcaaactactgtatttaaatccttctattctaaatctcgtttttcacatcagtctagttcggagaattttataagaacagtgtatttgaaaatgaaacttgtaagagtcattttcttaatccttttttgttttagcattcaactatggtagtaaataggtgaaaagtttgttcaatatttaaccgaaatatttgaaaacttttgatacatggatcttggtgctttgtggacattgcttttaagcctcaaataattaagattgttctgatcttttaaattttatggtacttgaaggtggaggagagtttacacattcatttgtggaatatatatttcctctcagtatttagatcttaaggtttttttgtggtgtgtaacaagtattctgctgtttaaaaacgtttgtttaatgcctactacgaaacgttttgaagtctcatcagttttgtcaataatggaccaattcttgaactcctaatttcttgagttttacattatttttacatcatatcaatcataggtgactcatcttttggagttctaatctgttgtaacagacgttatatttaaataagacaattgcattaaaatagaatttgctgccattattgttatggacatttttaagctgttataaaatagccaggaattaatgactttttttccgccctgccaagctagtttgtctaaatataatgtaaagaaattagctactcattttctggtccacgaaagttcctaaaatgggaagaagtggagatctgaccttgttagttctaaatacactaaactgggagtgccatggatggctttcaggatgtcctgaatcctctataattgtatacaaaatcgtgagtttttaaaaactgggttagagctattggttcctcagagtctcaggcatcttagacccccaaaaaggttaaggactactgacttaaccaattaggtttgagtggcattggctttgaagaaaagcagaggaaagatatattttataattctgggcaacaaaaaagtggatgtgtgccagcatcttagagtagaatcctcttaaaaggatagcactgcatatgaactagtaggttttaaccagtgcatatttaggcgaagtagctcatttttctgttagaattcttttttatttgggaatgggcaagcttttacagcttttaccttgccaatgaatacctggaatttaaaaaatcttgttaggcatattgcccataaagttttttttcctagatcatatattcagtaaatatgtttgtagctttatttcaatcccccaattcattgagggttgaaacaatttgaatggtttgagtgtagaagctaagttatttctgtagaggctaagggcatttataccaagatatgttagacttgtggttcctgctaaccattgctgtagacaataggaattactgtatatccacattttaatttttaacatcattctgtctttgtttgtttgtttttgagatggagtctcattctcttgcccaggctagagtgtggtggtgcatctcggcttactgcaaactccgtctcctgggttcaagcagttctcctgcctcagcttcccaagtagctgggattacaggtgcccgcctccatgcctggctgatttttgtatttttagtagagacggggttttgccatgttggccaggctggtctggaactcctgacctcaagtgattcgcccacctcggcctcccaaagtgctgggattacaggtgtgagccaccacgctcggcccattctgtctttatagcattatttttataaagttaagataatgtgaagtgagcttttactgagttattcagaagaccctacttgggaagaaaagaaaatcacattcacttgaacttaatcctacttgcttaaaaagttttgacatcaagatactgaactgtatcacgttttaggaccataaaatcctaatagtggatgcgtttaaataataggttagcatactttataaatgttagtagaataggaaagtcttcctggtgtataaactaaacactagaaaagttgaatggaccataataatttatgtaattatcaaatagctaagtaatttcagcttttgttacttgcttttactatctcagttttctgtaattaaagtctctaaagtattcattaaaatatttgtaataacatggttgaagtaaaataacttgtaggaagtttttgataataccaaaacttgataggcagcttcaattttttttctttattttcagtaatctatgccagcaattatgacaatgttagcagaccatgcagctcgtcagctgcttgatttcagccaaaaactggatatcaacttattagataatgtggtgaattgcttataccatggagaaggagcccaggtaaagtagccaaccaaaactttataacattatgacagtgtaacagagttgttgggtttagaataaaattttaaattatcacctttaaaaaagatattccatagtttgcattaatttggaattctgtattaaccataatgaaaattggtttggagaaagaaattgcatgtttgacatggttagagtgggttgttttggaatattatacttgttttgtccttaagagccaaatgttattaaatactttgtaggtattaaaggttctctgtacttttatatatacttaatatgtttggcactaatacgattcttctacttttaaaacatttacagaagtacttcacagatatgtttgtttaaataaaaacaggaataccaagtatttttatgttagttgaattttgtgcacttttcaaagtggtactgttaatgtagggaattatcttaaacataaaccaaattttgatcagtttaagatttttggtttttttgaacccaactaaaaggtgaaacagaaatgtgtgtacaattttaaattgtatatgtcacaagaaaaaaaacttgattttttacctgtggggccaaacttttttttgagacagtctcgctctgtggtccaggcaggagtgcagtggcgctatctcagctcactgcaacccctgcctcctgggttcaagcgattgtcttgcctcagcctccctggtagctgggattacaggcacacgccaccatgcctggctaatttttgtatttttagtagagatggggtttcaccgtgttggccaggctggtcttggaactcctgacctcaggtgatccacctgactcggcctcccaaagtgctgggattacaggcatgagccaccgcgtgctggcccaaacatgtttttgaatgagtaaaaagttttgcagttgggtcagaaatcttttttttttttcagatggagtcttgctctgtcaccaggcctgagtgcagtggcacagtctcggctcactgcaacctctgcctcccaggttttcaagcaattcacctgccttagcctcccgagtagctgggactacagacgcgccaccatgcccagctaattttttgtattttagtagagatgggtttcatcatattggccaggatggtctccatctcctgacctcgtgatccgcctgccttggcctcccaaagtgtggagatgacaggcatgagccaccgcgcctggccagaaatcttttatggtagttttgttgccagaacagtagatttctggttagataaatgttcagctagtagatgggaggttacttatattgtcaagatatttatatttgcataattaagaaactgagtgccggccgggcgcggtggctcacgcctgtaatcccagcactttgagaggccgacgccggcggatgacgaggtcaggagatcgagaccatcctggctaacacggtgaaaccccgtctctactaaaaacacaaaaaattagccaggcgtggtggcgggcgcctgtagtcccagctactcgggaggctgaggcaggagaatggcgtgaacccgggaggcggagcttgcagtgagccgaggttgcgccactgcactccagcctgggcaacggcatgagacttcgtctcaaaaataaaaataaataaataaaataaaataaaaaaacctaaacctgagtgccattacactttctgaaaatatataaggtggatacagtactatcttttatagtagtccaaaaagcatcatgtataaatgtttccattcccttatgaaatgcaacagtactgcttttactatagtagaaacttgaaaaaggtccatggaaacgctaaaagtagaaaaaattactcttgcagtgattctgtaagcttgttagcccaggtttatacttttagggcgttttgatcagtatattatctcctaaagcattcttgaaaaaattaaccatccgtatttattatccctgtcatttagttgttactcatgctatacattcaacatgaagctttaagcttcatttcttctagcatggatgcatagaaagcagctgcttttggaggaagctatgaaagtaaggttgggttcaactctgaatgtaatattggaagcacaggtctgtagccattgggaaaaagggcatttaattttttccgcatagattcagctactaatactgtttaatcttcacactaaactagttcactacatctaaaggtatgataaataaaccaacatagagcagtgttcttcatggcttgtaacagaattagtggcaatttttgtaattgagaatatattacagcaatactgcttttaataatgtttcatagtattaagaaatttaatggtttgttttaaaattgacttgttaataaaaagtagattaagaaaagtgtttctaaatttttttgtttgtaaggacaataggttaactttcccaaagtaaaaggattttgtctgcagtagttaatagatcatgtgacaaaatcagttgcgtagaaataactagcaaacttattttgtattataaatgaagaaacaagatttagagcttaaagctggttaaggagtccttttggtctctaaaagtcctatgtcgttagttcagtctacttttcgtttaccacctccttgggggtcttatttcaaaggaaaaggagtagtagtagcagcgagctgctatagtggaaaacatgatttttagtgttagacgtcttaatttgattcttggaagctctctctagtcattgcttaagtcccatgtacaaatatgacctgtcctacaagagattggagggttagttatgaggtttaaaagcacctattacagtgcttgataggtagaaggcactcagcttaaagggtacatttagcagtataatgaaaatgatttagcatatgtgatactcattgcttaaaattaaaaaaattttttttttgctactcataaaatatgcactaatgacaagaaaaatttattatgctaattaagcttttaaagtcaactgggaaaaaaagctgtaggtaggtttttttttttttaaaggaatgtgtaacttgggggaggggaagaaattatttacaagggtgacttttaatctgtagacagaacttctgcatacatggttagtatagtaggatatttagcagtgtaacattaggactaccctctaccctctgttatcagcatttttctatttttagccaagtagacagctagaaaaaagatgcgggaagagttggatgttttctccaatattgtgttctgttaaagatcttgaactctattgcttagcaactaaaatgctttcaccattcagttagtagtacaagggagatgctaggttttctctctttagtttgcttttgtgtcttttttttttaaacccctgctggggttttaagtttataaagaacattatgtaagaatggtgggattagaataaatcagaatgcaaatactagaagtagcatcagagagtaaaattacaactaacaggaaagaatattatttatgtagcgattgatgtgagtggtgatagtgtgggaagtatttgattctgtgtagaatgcttatcacttcaaagcatctgacaaaatggtaacttgaccaagtaacttttactgtgtgaggatctttgatacaacttttcctctagttagataaggttatctagctagatattctcagggagaagaccaaaacactgctaaaatgtgctttggccctagataagccacatcattattctttcggccttctgtcatttctcatatgacacattatgcccatcagtcctttaatgaaatcaaatagaaatgtgtatgattgtattttaaagtatacacattaactcttgtaaccacagactcacaatggaagcaggcgtctgatcttttcaggcaaccacagtggttctggtgggtttctgggtagagaacaaccatataagttattgagtgtgtagcagtgtgttttcctgattgatgtatgggatagtcatgaatgtggtattgtatttcctacctgaggaaaaggtcatgattaaaataaagcatcaaagccaggataagcatataatttctttctttttttttttttttgtaatgagacagagtctcactctgtagcccaggctggagtgcagtggtgtgatctcaaatcactgcaacctccgccttccgggtcctggttcaagcaattctcctgcctcagcctcctgagtaactgggattacaagtacgccccaccatgcccagctaatttttgaatttttagtagagacggggtttcaccatgttggccaggctggtcttgaacttctgacctcgtgatccacccaccttggccacccaaagtgttgggattacaggcgtgagccacggtgcccacccgagcatacgattgttttaaaaaagactagaataaaagccaagctaaagattataaggtatctttgtcagaaatggttgtgagagtgcttcctaccctgtttttgatgctttattgtttataaccatagaattaaacccatgataaagtaaagtataagagaaagataactgacagattttaaagtcatcaaacttttttcttgctctgtcacacaggctggagcacaatggcttgatcacagctcactgcagccttgacttcccaggctcaatcttcccacctcagcctcctgagtagctgggaccataagtgcgtgtcccaccacacctggctcattattaatttttctttgttgcccaggctggtcttgaactcctgggattacagacatgagccaccacacctggtccaaactttttgcttacaacttttaatagaaataggtaaaagaaataggaaggatctaattgagttataaaacaacctttaaagatacaaaagtgaaaaagattaagccattgctttttgtcaatagaattaaaagctgttggtaaaaatattaatgtatgaaaaacttattgaaatgaaaaaactatatatatatatatatatatatatatatatatatatatatatatataaataaaatgtcgacatggctggatcttaaaaactgtcaaatgaaaaaaactaattgcaggaaagattttttttttttttttgagagggagtctcacgcagtcaacccaggttggagtgcactggggcaatcttcctgattcttggggaatcttggctcactgcaacctccgctcctggattcaagcgattctcctgcctcagcctcccgagtagctgggactataggcgcacgccaccattcccggctagtttttgtatttttagtagagatggggtttcgccatattggtcaggatggtcttgaactcctgaccttgtgatctgctcacctcggcctcccatagtgccaggattacaggcgtaagccaccgtgcccagcctaaaagatttttaagtatactattaacataaaatttggtagccgtacaaccctattcatgaaatttacacacatgccgtgaaaatgtggacaggaaaagacacactaagttcatgatgaaagccattactttttaaagaaggaacaaaggtgtaatcccagcactttggggaggctgaggcaggcgggtcacgaggtcaggagttcaagaccagcctggccaatacagtgaaaccctgtctctactgaaaatacaaaaattagccaggcgtggtggcaggtgcctgtagtcccagctacttgggaggctgaggcaggagaattgcttgaacccgggaggtgaaggttgcagtgagtcgagatcctgccattgcactccagcctgggtgacagagcaagactccaactttaaaaaaaaaaaagagagaaaaaaggaataaaggaaggaaatggcactagggaaaggcacaaagatgacttccataaactttagttattttatgctaaaagaaaatctgatacaagcacaagatgatgactacgtagattagtatttctgggttgcatgttaaaaatatgaaaataaaaacggaaatagtttccaaaacaaagattttatatatgaaattagtgaaatttcagaatggagaaaggatggttacaataaatgttaggagccctctttaaagagctcaaatggtatgtaagtatttgggatttgtggtttaattagacctagttttcagcagtctttccatgaaatgtatttttgtatttagagagatcttggtaactcttgtaaagcagagtgtcctgctacattacataacttacctaagtaggtgtgcttttttttgtttttctagagacagggtctctgctctttcacccaggctgaagtgtagtggcaccatcatagctcggtgcaaccttgatttccagggctcaagtgatcctcccatctcggtctcctgagtagttaggactataggtgcaagccaccatgtgcagctttcttttttttttttttttggagagtcatggcctcgttacattgcctgtcacctagactggccagctggtcttgaacccctggcctcaagtggtcctcctgcctcagtctcccaaagtattgggattacaggcatgaaacactgctactggcctagataagaatttttatattgtttttggttgatttaagtgctgagaacttatttgcttcagaatagatctttggttgaaatgcagttcagttttgagactaaaaaataaaccagatttactcccaaaaatgttactgtttcaaataagtaaaatatttgcacctttaaagattaggagttggctgggcatggtggctcactcctataatctcagcactttgggaggccaaggcaggcagatcacctgaggtcaggagttcaagaccagcctggccaacatggtgaaaccccatctctactaaaaatacaaaaattagctggctgtggtggcacctgcctataatcccagctactcaggaggctgaggcgggagaatcgcttgaacccaggaggcagaggttgcagggtgctgagatcgcaccactgcagtccagcctgggtgatagagccaagactctgtctcaaaaaaaaaaaaaaaaaattgggagtcatatttatataattttatttctatttctgtaaggtctaatttttgagtatttctgaacatcaataatagaatctctgtccaattagaatttgtgccttgctcagtagttttcattttaatgaatgattcaaaagaatacattagcttaagttttgttttttttaataatattttagcaaagaatggctcaagaagtactgacacatttaaaggagcatcctgatgcttggacaagagtcgacacaattttggaattttctcagaatatgaatacgaaagtaagcaagtggtggttttaaaatctgttatttcttttcttccagtcataaactttgaggaaggtatctcatttttagtattagcatttgttatctcaaattattttatattgttaatttgtttcaaaatttagtcttaagcatataattaattcttgcaaatagtcctaagaattatgaatgaagttttgtaatgggactagtatgcaaggtggcttttttggttgtctgattttgtttttttctttttagtatatgtatacaggtctaagtagcataaattctgaatgttattcagagattaaacataacattaaggaattattttgggcaagtaatcaatataatacaggccaggcacctctgacaccaagttgtgtggacagcttaaaaccctactccatggcattgggcttctaatgggacagcactcagtttttatttacaatggaaaatgttataattctggtccttttttaagtttgaacagaagggttgatcaaaatgtgttttgtctgttttaggcttgatgattcacgcttctctttaaactgccttaaagtaataaatactatggcattctgtttaatacacgaaaggtttccacttgatatacattgtgttaaaacagaagatagccatattcacatctgtttctgaaaccagactttgttaattaacagttttaaaatattaattagttttgacatcttgtaaattttaggtcaaaaatacagtccagaacttcctcaaagtgctaaccttaagtaacataacagtgtttgcctgtttgcttgcctggtaaattttgctttttatactgacagacattactaatgtttaagttgatttatcaacagtatttttaaaaactcaaatttgtcttgtgaaaaatgagatgattagaggaacagaaagaaagcaacaggtaaagaattcttcaatttacataaattacaaatgatttggtgctaaatttatgcactatgacatttggcttttatgcaatcatttttttttctttaaagatgttaacactacctgatattaatcataatgttccattatgttgattgcttgtaataggaagaaaaggggtgtcttcctgtgcaactgacacagctaggctttgacggcaggcctccacaaggtctacccttttgattccctttaactgaattctgttcatcaattgtttttgtttcatgggcggtgggaggggaaaggggaattcaatgcataaaataagtatttctaagggctcagtagaaatttctaccatagggatcatttcatgcatttattttttcatttagtctttgctgttatctgtccctcatcttcataactcagcagtggatttctcaagtttggagatgtaaggcaaaagtataattcttcagaatgtttggattgtagtgatttatcattggctttcagatttgactgtcacttcagatttttgagcaaaaatactaaaaaaaaaaagaaaaaaaattctttgaagagacaggacctctgttgcccaggctggagtgcagtggtgtgattatagctcactgtaacctcaaactcctgggcttaagtgacatttctgcctcaactttctgagtagctagggctacaggtgcgtgtcaccatgcctcgctaacttaccaatttttttatagaagtggggtctccctgtgttgctcaggctgatcttgaactcctggccctcccgccttggcctccccaaaatgttgggattacaggcgagggccactttgcctggccccaaataacattttttcaaaggaatgtaaattttttttgttttagtttcataggcaaagtctttatgtctgggagagattggattttaggatattatagtaacagatgtattcctttgacctaacctgggcaaagcatttattgggctccctgcttcaacccccttggcagaaagatgaaatatgaattgtatcttcatcaagcttatgctacctttatacagttgtagaaaatacaggttagtaaatagtaattttaggtaacagtatcaaataggaagaagtaaataaaaaagaaaggacagtgtctttccattaaaaatgtaaaaaagtttggttaaataagatgaagttatctttaagatttttatttgtaactatatttatggtgggttttgtttcttagtgttttaaaggctttttaattgatttttggcaagaggatatattgtaagcagtgcattgctttgacttactgagtcttgacaatctgattttgtgcctataaaattaaagaaaatgcttagggtagtatgtttttaaaagctaattaagaacttcaggcatttggacaactctcttttttttacatatttctcagacctagacataataaatagatatgtttttaaaagtgaacaggttagaaagcatcactatttactgctgattatgaaacattttaatagcatcaaatttgtaattttagaattttgctttggccttgtttttattttgaaagtttttaaggaatgttctgcaaatgtagtactttagttgaaatggcaaaattttcttgaagagtgtgaaatgttaaaatgaaagaaaacagcaaaaacattcactgtttgagcacaatgtagtttgggacagtctatattgtgctttggataaaatgagcattcacatgatccctttggttgaaatactaatgctcctattttattgtgtaatgactaaccattttaaagatgaactcttattctcagccaaaacttgcaatctgaggttatatgtctatatatgaatgagcttacctttcagatattatagctgattcttccctaattctctcagttgaaatgtaccacaacggttttgtcccttttcttcctcctgcctatccacactaattggtcatagtaattcaggtagtaactcctggggctttataaattattataaatattgttgactatttagagtgagtaatcagcaggagggacaaaatggcttgaaagtggtatctctgttttttaattttttatacttttagttataactttcagtatttaggaagaaatacctgaaaggtagatacagattgcaacatgcgtttgtgattattttgactgtgcacaaaagtttatctttaaattagtagaaatagcaactataagggtggggttaaaatataaaataaacccatgggttgtcttgctgctccttaagtaacacaccagtgatgcttgtaaacactttctatagaaagtatctgtgacaatactttaatatttggccaaaagcttataactcctagaggatggtaggaagcttgatagcatccaagctgctaaattcttaggagcctgttcgtgttaaagtacgtgagcctatgagcagtcatttatgctgtgaattcatatctggctgctacttttccttcgacagataagcctatttggctgctaaagggctttttatttggttcttcctcctggtgtgagcatgtataaacagcaggacgttatatagagtagcaaacaataaaatgaggaaaatgcatgaaaactcagtatatgggtgaatagatacttgtttaatatgtgtaattaaacttggtagcataatgtttttgaaactttagatgtaaatgtgtgaatgtctgtccatttgtgaatcctgagagttgccagtcctataagcaatatattcacatgcttctattctccaattttcagtactatggactacaaattttggaaaatgtgataaaaacaaggtggaagattcttccaaggaaccagtgcgaaggtaggaaaataaagaattataaattcagagttttgtttttcctggcatttttattgtagttgactgtttgagggggcatgtaatgaatctttagtatattttgctctaatggagcttattgcttttatcatgaagcaaacaggtctgtttgtattggtgggtacaggaaggccacttacaggttatcttttgggagaaagaggagactggactgttgaaaactctgacaataaatattctagttaaaaatatgggctatggcacagtggcccacgcctgtaatcctaacacttcaggaggccgaggcaagtagatcgcttgagtctgggagttctataccagcctaggcagtatagcaagacctcatctggacaaaaatttaaaaaattagctgggtatggtggttcatgtctgtggtcccagctatgtgggagcattgcttgagctcaaaaggtcgagactgcagtgagccatgatcctgccactgcacttcagcctgggtgacaagagtgagaccccatctccaaaaaaacatatatataaataaaatatgggccgggcacagtggctcaagcctgtaatcccaggacttcgtgaggctgaagtgggagggtcatttaaggccagaagtttgagaccatcctgggtaacatagcgagaccctgtgtttacaaaaaatttaaaaattagccaggtattttggtgcaggtggcggcggggacaggggtatcagtggggtgaggtaggaggatcccttgagccaagaggttgagactgcagtgagccatcattgtgccactgtactctagcctgggcaacgagcgaaactccgtctcaaaaaacaagaacaacaacaacaaaaaaaaccatatgtaaggttaactcgggaatggaaaagccaagtactaaagatcacaaagctgttttgccttttgtggttctgggaatgccttggaagaggttggcttctgaaatgaagaaagatcagaaaatgaaggtgtagtgatacctgttaatgagtaatttaacttttctgtctgtgctaccttgaggaatgtagtcatattttgagaaacctgaggcaacattagtttcttgggattctttgatttagctaatttcagttatgatacactgcctttttacctactatatttcatttatctctgaaaaatagaaatttttttcttgactttattatggggcacatgatacttctagtagtattttcatttaaaatatgtctaatttctttgattatttgtcttttaagtattgtccttcacctgcattctcttatcatcattatggtagaatagtgacatggatttacttagctaatctgacttaaaccttgacaaagtttgagcacatttagagttgaatgtgatgagattttaatgccagtgtctttttttaagaatattaagtatattcagtggcaatatctttaatacatcataaatcatagattaagagtgatagtgcaggagcaaataatgtgccctaaaagaggttctcatttctttaaatgttttattatggtttgaaactattttagatcacgttctgtgatggactgagaaattaataagcacaatttgactatgtggtccaagtaggtccttcatactttattcttcagggatctttagtgtagtcattccttgtttctttactactattgttttactcatgtgttatgagccccagatttaattttggccatggtctgccgtaccaagaaaaggtgatttacttctgtcccattttactgttgtataattttaaatcctccttttgttcttaaatctgcatctctgttttttatcacatttgatggttctggaagatgttttccaggttgaaaatagatatgattatactagtttatcaacactgtagttacatttgttacagacaaaattaatttaaaaaatttttgtttctttctttcttctttgttgagacagattctcactctgttcctcaggctggagtgcattggcaccatcactgcagcttcaaatagctgcggtcaagcaatcctcccacctcagcctcccgagtagctgggaacataggcatgccccaccatgccctactaaattttttttttttttaatgttttgtagggatggtgtctcgctgtgttgcccatgctgctggctgctgggcttgagcaatcctcccaccttggcctgccagagtgctgggattgtaagcatgagccaccatacttagtcaacatgattacctttttaattttaactgggaggcttctctaacctaaagatttatttcacaaaatacactagaacttctgaacattaattttccttcatctttaagtaactttggtattggaaattacataaattaatttaaaacattttatttcctttttctgtaagtgtcctgtcttttaaaggtattcgctttgctttttgctgtagctataccctttgtccaactaccatagcatatatatttgttcacctggggtgcatattgtgcgtttcctttgtaccgattactactaaatattaaggttataaaaatatacatgtacatcaaagtgctgtatgtcacagtgttatagttgggaagacaaaacacatgtaaaagaggaatcataaatcagcaaattaggtgtatataatgagtgcttcacaagctaaaagaacagaatgatgtctaagtccggccctttagctaagtttcattcacataattggaaagaaatgcctggtatattttaaaggaaggaaaggtttcactgcataagagtatgccaaaattagattcctgcattttttttctgatgtagaatttgttttatctgcttttaggttcttgtccacagcatgttaatttttacgtggtgtttttttttttttttttttttttttgagacggagtcttgctctgttgcccaggctggagtgcagtggcgcagtcttggctcactgcaagctccacctcctgggttcatgccattctcctgtctcagcctcctgagtagctgggactacaggcacccgccaccacacccagctaattttttttttttttttttagtagagatggtttcactatgttagccaggaaggtctcgatttcctgaccttttggtcctcccgcctcggcctccatgcctgttgagattacaggcatgagccactgcctggctaacatgttcttttaaattaatgacattttcaatttaggcctcttgtataaatactgtcaggaaaatctcatgattcttgagtgggttagatgtctcttgctgtgttatacgttactgtatcctgtaccagtgggtcacaggagaataaaattttaaagagcaaaagataggctcagcacggtggctcacgcctgtaatcccagcactttgggaggccaaggcaggcagataacgaggtcaggagtttgagaccagtcttaccaacatggagaaaccctatctctactaaaaatacaaaaattagccgggcgtggtggcacatgcctgtaatcccagctactcaggaggctgaggcaagagaattgcttgaacccgggaggcggaggttgcagtgagctgagatcacgccattgcactccaacagagcgagacttcatctcaaaaaaaaagagcaaaagatagacataattagaaagtaaggatgtttaaaagaacatttaattttccaaaagatatttttatagcaagagaaatggcgagataataaaacatttaaataagttgagatttgttatataaaatttattacatttctctggattttcatttagctttaggccgtaagtgtgtgtctatttgtttgtgttttatgtgttttgtccctcacaccccacattacacttggctgttttagtcactttattccccatccttcaaactataagctccttgatattggggctcagagtgtctttttttctttggtttttttttggtctgtttttgtgtttgtttttgtttaagacagagtctcgctctgttgcccaggctggagtgcagtggcgtgatctcggctcagtgcaagctctgcctcccggtttcacaccattctcctgcctcagcctcctgagtatctgggactgcaggcgcctgccaccacgcccggctaactttgtgtgtgtgtgtgtgtgtgtgtgtgtgtgtgtgtgtgtgtgtgtgttttgttttttgttttttgtttttttttttagtagagacggggtttcaccgtgttagccaggatggtctcgatctcctgacctcgtcatccgcctgcctcggcctcccaaagtgctgggattacaggtgcgaaccaccgcgcctggctttttctttgttttttaaagatgtagggtttcactctgttgctcaggctggagtacagtggtgcaatcatggttcactgcagcctggaactcctgggctccagtgatcctcttgcctcaggctttttttcttttttttttgtgagacagagtccctctctgtcacccaggctggagtgcagtggcgcagtcttggctcactgcaccctctgcctcctgggctcaagtgattctcatgtgtcagtctcccaagtagctgggattacagatgcacaccaccatgcctggctaatttttgtatttgttttagtaaggacagggtttcgccatgttgaccaggctggtctcgaactcctgacttcaggtgatcctcaccctcccagagtgctgggattataggcgtgagccattgcatcctgccctcttgcctcagccttgagagtagctagcactgtaggtccgcaccaccatgcccagctaattaaaaaaaatttttttttttagagatagagtctcactgtgaagcccaggctggttttaaactcctgggtttaaagcagtcttcctactttgccgtcccaaattgctaccaagcctggctgggaaattttaatatgtcaaatggaagaattccctaataaagagtggttgctattcatggtagtcttttatttattcatttgttttgagacaagatctcactgtatcacccatgctggagtacagtggcacaatcatagcacactgcagccttaaactcctgagctcaggcagttaccacgccttagcctgccaaaatagctaggactacaggcatgtgccaccacacccagctaagtttttctaattttgatagagacacagtttgcctatgttgtccaggcttgtcttgaactcctggcctcaagtgatgctccaacctcagcatcccaaagtgctggggttacaggtatatcaccactcctagccatcactgaagtcttaaaggtcctctaggactgccagtggtgttgattctttatcagagtcatgattcagataattccccatccctttttaaaaatggcatttaggctgggtgtggtggcttacacctgtaatcccagcactttgggaggctgaggtgggcagatcacctgaggtcagttcgagactagcctggccagtgtggtgaaacccggtctctactaaaaataccaaaattagctgagtgtggtggcagatgcctttaatcccagctaattgagaggctgaggcaagagaatcggttgaacctgggaggtggagcttacagtgagccaagacagcacgactgcactccagcctgggcaacaagagtgaaactctgaaattaaaaaataattaattaattaattaaaaatggcatttagataattcaaataaaaaaaaagaggaagcctcctttgttcctgttggggggaaagatgatgctatataaaggtatttctgtactttttatttaaaccaagggattgttttaatcagttaatgtgtatggcttatagatcatttcattgattgataaaaacttactcacaggcggggcatggtggctcatgcctgtaatcccagcactttgggaggctgaggcgggcagatcacctgaggtccggagttcgagaccagcctgaccaacatggagaaaccccatctctactacaaatacaaaattagccaggcgtggtggcgcatgcctgtaatcccagctattggggaggctgaggcaggagaatcgcttgaacccgggaggcagaggtcgcggtgagctgagatcgcgccattgcactacggcctgggcaccaagagcgaaactcagtctcaaaaaaaaacccacacttggctcacattgaatagagaagaagcgaatttatgaaaaaagtaatccaaagtggaaagatcgtaattacaaggtttgattttttttttttgtttggtttggttttttcgaggcggagtttcgctgttgttgcccaggctggagtgcagtggctcaatctccactcactgcagcctccgcctcctgggttcaagctattctcctgcctcagcctcccgagtagctgggattacaggcatgtgccaccatgcaaggttggttttgttttgttttgtttttttttaattttgcgacggagtttcgctctgtcgcccaggctggagtgtagtggcgagatcttgggtcactggatgctcagcctcctgggttcacaccattcttctgcctcagcctcctgagtagctgggactacaggtgcctgctaccacgtctggctaattttgtgtgtgtgtgtgtgtgtgtgtgtgtgtgtgtgtggtttttttttttttttttagtagagatggggtttcaccgtgttagccaggatggtctcgatctcctgacctcgtgatccaccctcctcggcctcccaaagtgctgggattacaggcgtgagccaccgtgcccggccaggttggattttataagtagttgggccactaaaatttctgagttgtacagtttcatgtctttagttggcagaccaaagctgatccactcataaaattttatttagtgctctcctttgacgtgagacacgtggtatatttattggcaccgtaatactggctacattatttgacctcatatttcagtttgtgttgcaaggttttgggcattagagctaatgtataggaagccctgtgcttacatatgctgagtatgagtaagtagtgggttaccaactgtttttgatgaaatatctgcatttcaccaaattgccatataccagtctcaaaatatcctgaaccttctgaaataccttcctaagtgagctcactaacacctacttttctgtgtcctttacaattttttcaccacaaagtctcaaagtttcagaaacggaactaatagggtcacttctgctgaagatctcctgtagtattgaagatatttaacatgtttcctttaattgatattggcctttgagaatttttgtatttgccttatttattaggtttaaagtgtacagttggataagttttatcttgtgcatgctcctgtgaaactacctctgtataatcaagatctgcctctatccgattactttcaccttcactgcccctcttcacatgtgcttgttgtcacttgcttggtaagagtggaatggctggattgtgtggatttttttttttttttttttaagacagtcacactactctgtcgcccaggctggagtgcagtgtcatgatcttggctcattgcaacctctggctctcgggttcaagcgattcttgtgcctcagcctcccaagtaggtgggattacaagcatgcaccaccacaccagcataatttttgtttttgtaatagagtttcgccatattggcctggctggtctcaaactcccgacctcaggtgatctgtccacttcggcctctcacagtgctgagattatactcataagccactgcgcccagcccatatggatgttttggtgtatgtttaagcatccaactgtattccaaagtggtcatgtcagtctcaccagcagtgtataagtatgtttcacatctcggctgacatttggtatagacaatgtttttagtttggctattgtagtgcatatacaatagcatctcatggtggttttaatttctttcttttttttttttttttttaaagacagagtcttgctctgtcgcccaggctggagtgcagtggcctgatctcggctgactgcaacctctgtttcccgggttcaagcgattctcctgcctcagcctcctgagtagctgagactacaggcatgtgccaccacacccagctaattattttgtatttttagtagagacgagctttcaccatgttggccaggatggtctcgaactcctgacctggtaatcagcccacctcagcctcccaaagtgctgggattacaggcatgagccaccacgcccagccttaatttccatgtggagtagtgttgttctgtgttccatcacatatccttacatgttctttgccatgccagtatgtttttggtgaaatgtctgttcaaaaattttgctcagttttttttttttttgagacggagcctggctctattgccccagctggagtgtggtggcacaatctcagctcactgcaacctctgcctcctgggttcaagcgattctcctgtctcagtctcctgagtagctgggattacaggtatgcaccaccacgccctgctactttttcgtatttttagtagtagagatggggtttcaccatgttagccacgctggtctctatctcctgacctcgtgatccacctgcctcagcctcccaaagcgctaggattacaggcgtgtaagcccaccatgccccgccaattttgcccagtttttattgggctattcccttattgagatctaagggctctttgtattctagtcaggagtattttgttaactgtatattttgcaagtgttttgtctgtggcttcctgtttaatttttgtaatggtgtcttttgcagagcaaaaatttcagattttgattaaaatcagtgttgatttttttttctttatatagttgatgttttttgtgttgtattcaagaaatctttgtcatgcaaaggtcacttaagattttctgtaagtttttggctgggcacagtggctcacgcctgtaattccagcaatttgggaggccgaggcaggcagatctcttgaggtcagcagttcgagacgagcctggtcaacagggtgaaaccgcatgtctactaaagatacaaaaattagctgggtgtgttggtgaattgcttgaactggggaggcagagactgcagtaagcctagatcacaccactgccctccagcctgggtgacagagcaagactctctctcaaaaaaaaaaaaaaaaaaaagatattctgtacgttttcttatagaacctttatagttttagcttttgcattaagatctgtgatttggctgggcacagtagctcacaattgtaatcccagcactgggaggccaaggcaggcggaaacaatacaaacaaattagccaggcgtggtggcatgcacctgtaatcccgactgccaggaagctgaggtgggaggaatgcttgagttgagttcgggaggtggaggttgcagtgagccgagatcatgccactgcactccagcctgggcgacaaagaccctgtctgaaaaaagcatcatgtgattcattttactcaatttttgtatatgaggtgaggtaagggtcaaggtttatatatttatttgagacagagtcatgctctgtctcctggccagagtacagtggcgcgatcttggctcactgcaaactccacctgccagattacaggtgcacaccaccacacccggctaatttttgtatttttagtagagatggggttgccccatgttggccaggctggtctggaactccagacctcaagtgatccgccagtctcagcctcccaaagtgctgggattatgtgtgagctaccgcacccagctccccaactttgtttctaaaaggtttggctattgttggttttttgctgttccataaaaattttagagtgaaatctggcaaatttcaacaaaagctgtcctgaaatttttattgagattgccttggatctgtggatgcatttggagagaatgaacatctttaatgtcaattcctgattatttcttgctaatatagagaattgccattgttcacttatctcttgaacgtgtagtttaatccagctagtcaaagcccagttcaaactcactttcccttcctgttgtgagaaaacacctcaattttgcaaaagctcttggaatttaacatttctgctgcttttccctgtatgtgtggtgtttagtcttttcatagttcgttgactatggaattcagagcagaaaccctatttcctaatttccttgggaagttttcagaactagatgataatgtaagtttctaataagttgatagtgttactcagaggtgattgtttcatttatgattttgaaaagaaaatgtaaatattagacttaagtccttgcatctaaaacaaattcatgagaaatcccacagaatacaatgttagagatgggagcaaaaattatcagtctaatctcagagagttgacaggcattccaaatcgttttttgtcagtatttaaaccatggtaggataatgtaagaaatatacttaatgcctggtgcgatgtctcacgcctgtaatcccagcactttgggaggcctaggcaggcaattgtctgaggtcaggagttcgagaccagtctggccaacatggtgaaaccccgtctctactaaaaatacaaaaaaaattagccgggcatggtggcgtgtgcctgtaatcccagaatcccagctactcggtaggttgcagcaggggagttgcttggaccagggaggtggaggctgcagtgagctgtgatcatgccactgcattccagcctgggcgacagagcaaggctccgtctcaaaaagaaaaaaaagaaaagaaaaagaaatatctgtaagctataaattatgtttttcatttctaaaaaaaacaaggcaggccaggcacagtgattgaggcctgcaatcccagcagtttgggaggctctcttgagcccagaaatttgagatcagccaggacaagatagttagacttctctctactaaaaatacagaaaactagcagtgtatggtcgagtgcccctgtagtttcagccactcaggaggctgaggcgggagaatcatttgagtccaggcaggaggtcgagccctgattgattgcaccactgcactccagcctgggcaacagagtgataatatctgaaaagataggctgggcacagtggctcttgcctgtaatcccaggactttgggaggctgaggcaggcagatcacctgaggttgggagttcgagatcagcctgaccaacatggtgaaaccccatctctactaaaaataacaaaaaaattagctgggcgtggtggcgcattcctgtaatccctgctactctgaaggctgaggccggagaattgcttaaacctgggaggtggaggttgcagtgagccgagattgcgccattgcattccagcctgggcaacaagaacgaaactctgtctaaaaaataaagaaaagaaagcagtattttcaggcacattgtatatgattgataggaatagtatttccatttctggttaatgtaacaatttgccccattccaagtattttgattacaggcctccatgaaaggcctatacttgatacctaacagtgtttgatccctagcttacatccatgtaacttttttttttttttttttttttgagataaggtctcacgctgtcgcccaagctggagtgcagtggcgggatcatggcttaactctagcctcaacttccggggctctagcaatcctcctgcgtcagtctcctgcataactgggactacgtgcgcatgaatcatacctggctcactgtttctattttttgtagagatggggtctcgctatgttgcctaggctggtcctgaactcctgggctcaagcgatcctctgcctcagcctcccaaagtgtttagattacagtcaagagctactgtgctcgacctgctttcaccttttggctatcatgagtgatgctcctgtcaattttaataaaattttaatcttttagattttttgtccagtgtgtttgaggccataaacatccatttaagaatggcggatgtgcatatagatccatttctcttaacattatcaaagcaggttaaattatagattatctgtgggaaccctaacttaactcctgctttagaattattgttagctgtttgtcttccatgtggcattgttcttattaatatttcattgagagaacagtagtaacaatatcctgtatacccttgtgtaagtaaagagagcagatcactattttattgaccatctttcaaaagatcgattttgtgtgtttttttgttttgttttgagatagtctcacattgtcgcccaggctgcttggattgcagtagtacaatcttggctcactgcaacctctgccttccgggttgaagcgattcttgtgcctcagcctccagagtagctggtactacaggtgtgcaccaccatgcctggctatttttttgtattttaatagacaggtttcaccatgttggcctggctggtctcaaactcctggcctcaagtgatccacccacctcggcctcccacagcgctaggattacaggcttgagccaccacatccagccaattttgatgttttcatggactgatacttgtaataaacatttcaattatatatagcattgatgtagaaatgtaccaaatttacatttttttagcttatggaataaataaatgtttaaactgaaattgattcgaaactagattgaacttgcctttttcctatttgtaatttacatttttaatagtgtatcaaaagccttaaaccattttctgtggtgcaggttgactgcctcttgctggaaatgcttgggatgagaagtgttccagactttgggctttttcagattttggaatatttgcattatgctcacgagttaagcattccaaaactgaaatagcccaatgagcatttcctttttttttccttttttttgagacagagtttcgctcttgttgcccaggctggagtgcgacggcatgatctcgactcactgcaacctctgcctcctgggttgaagtgattctcctgcctcatcctcctgtgtagttgggattacagtcatgcggcaccatgcctggctaattttgtagttttagtagagacagggtttcttcatgttggtcaggctggtctcaaactccaaacctcaggtgagccgcccgccttgtgttgggattacaggcgtgagctatctcacccaacctgagcatttccttttagtgccatgttggtgctttaaaacttgcagatttggggttgggcgtggtggctcatgcctgtaatcccagcactttgggaggctgaggcaggtgggttgcctgaggtcaggagttggagaacagcctggccaacatagtgaaaccttgtctttacctaaaaaaaaaaaaaaatcagctgggcgtggtgacgggcacctgtaatcccagctactctgggaggctgaggcaggagaatcgcttgaactcgggaggtggaggttgcagtgagcggagatagcaccattgcactccagcctgggccacaagaatgaaactccatctcaatcagtcagtcaatcttgcagatattggagtgtttcagatttcagatttggggtacttaaactgtacgtgaaaattagctgctggggaggagaggaattggaatatgtaacatggactcccacattttaaggatttttctaggactgcatctttctcttaataagtcagatccttatttggttgaaaatgtttactgcatgactatcactgactatgtaagatgctgatgtacaactctatgacttgaagattgagttgcttctatgggaatatgacaccatttgaattaatttgttctcaatattttaaagagttttagtgaattctgttcatataaaaatcaggttcaataatgcgtgctttttacgctatcattgagtatccagtgtttacaaggtgtttctgagggataagattattattgctgtgtaaagaatttggcagatggtgtgtaccttctaagttagcttgaggtttatttaaatctcatctttttagcttgctgaagttgatactatgcagttgcaagtttatattgactatttgatattgctgtgtttttatttgaaatgggactgttagacacatttttctttatattgagcaatagagctggaatattaaagatgtatgcattaacccttgcatttggaacatttacatgtcataagctgcctttcagtaagtggttaggcatttctacgggtgtgtattatattttgaataaattttatatggctttccaagaaacaattagagcatttgacccaccgactttgttgtttatttttatttttttgagatggagcctcccgcagtagagatagagtttcactatgttggccaggctggtcttgaattccgcctcaggtgatccacgtgccttggcctcccaaagtgctgggattacaggtgtgagccaccatgcccaacctgacctaccaactttggatgtgaatttttttcatttatattgagaagaatagggtcttgggccactagattgtaccagtgctaagtcagtatctgaatccattgaagatcctgttggcaacgtcaggacttatcaaagacacacaacttcaatgagaacctttctttggaattaattaattaatgatatggagccttgatctgtcactcaggctggagtgcagtggcactatttcagctcactaggaatgcatctttctcttctctttctccacctcccaggtttaagcacttctcctgcctcagcctcccgagtagctgggactgcaggcacaagccaccatgctgagctaatttttgtatttttagcagagacaaggttttgccatgttggccaggctggtctcgaactcctggcctcacgtgatctgcccacctcagcctcccaaagtactgggattacaggcttgagccactgtgcccggctgccttgtttgatttttttttttaaagagacagagatcccctctgttgcccaggctgaagtgcagtgacacaatcatagctcgttgtaacttcagtctcctgggtgatgggtagaattctgccacagcccaagtagctaggagtataggcacgaacgactgtgcctagctaatttttttattttttgtggaaatggggccttgctgtgttgcccaagctggtctcaagctcgtttcctcaaaccctcctcccatgtcagccttccaaagctccaggattacaggtgtgagccatcgtgcgtgacttgtttttgatttttgtatcgttttcttcactcttttttttttttttttgagatggagtctcccgctgtcacccaagctggagtgcagtggcacaatcttggctcactgcaactgcatcttgggttcaagtgattctcctgcctcagtctccccaagtagctgggactacaggcgcatgccaccacgcccagctaaatttttttgtttttattttttgcatttttagtagagacgaggtttcaccacgttggccaggctggtcttgaactcttgacctcagatgatctgcccgtctcggcctcccaaagtgctgggattacaggtgtgagccaccgcgcccggccttcttcaccttttgtatcaagctttttaaggaagagcttagaaagccagtttaaaggaattgaaatgtgttatgtaaatgtctgttttgcaactgagacccactaatttatttagaacaaaaagtcagagaccagtaatgggtccttttctgtcaaatttcaagctgagctgtttctgctacttagaaacatttcgattttctacctagatatgtattatatcattgctaattatttatttatttatttatttatttatttgaggtggagtctcactctgtcgcccaggcttgagtgtactaatttatttttaagtgcagtttaacattggatttttttttttttttttgagacggaatcttgctctgtcgcccagactggagtgcagtggcacgatcttggctcagagcaacctctggctcctgggttcaagcgtttctcctgcctcagcttcccaggtagctgggattacaggcatgagccactgctcctggcctacagttggaattttttgttgttgtttttgagacggagtcttgctctgtcacccaggcttgagtgcagtggcgcgatctcagctcactgcattgtccatttcctgggttcaaatgattctcatgcctcagcctcctgagtagctgggattataggcgcgtgccaccatgcctggctaattttgttgtatttttattagagacagggtttcaccatgttggccaggctggtctggaactcctgacctcaagtgatctgcctgcctcggccttccagagtgttgggattacaggcgtgagccatccgtccggctggaatgctattcttaattgacctgcatttatttatttatttatttatttggcaagccttgaggaagggatttggggaatgaacaatggtacttgatcaaataatccttgtactaggcaatcacagtttctagggccactgtacctggccatgggggttttattgataataatctgtaaggaacaaaagggttagtactatcggaatttttgattagatgtagtgagcattaaggacatatggaaagtagtttgaagtaaaatatatacagtataagagtcagaatcagccaggcgcggtggctcatgtaatcccagcacttcgggaggccgaggtgggcggatcacctgaagtcaggagttcgagatggcctggccaaaatggtgaaaccccatctctagtgaaaatacaaaaaaaagccaggtgcggtggctcacgtctgtaatctcagcactttgggatgctgaggcaggataatcgcttaaacctggaaggcagaggttgcagtgagctgagatcacgccactgcacaccaatctggggtacagtgaggctctgtctcaaaaaaaaaatacaaaaaaagtagccagacatagtggcatctacttgtagtccagggtactcaggaggctgaggcaggagaatcacttgaacccaggaggcggccgtgtcagtgagcctagatcacaccactgcactccagcctggaagacagaggaagactccatctcaaaaaaaaaaaaaaaaagtgagaatgttgcatagattacccaagttaattcttataatttagtgttcatttaaaaggaaaattgatttcctactttttgtttttaaaaatagtattaggctgggtatggtgggtcaggcctgtaatcccaacataaaatgtggccaaggcaggaggattgcttgaggtttggagttcaaggccagccccagcaacaatgagaccaggaaaaatcagccaggcacggtgctaagcacctgtggtcccagctagtcagctagctgaggcaggaggatcgcttgagtccagaagttcaaggctgcagtgagctgtgatggcaccactgcattctagtgtgggcaacagaccaagaccctgcctctaaaacaaaatgtaaaaaatatattttccatttccctattcattttatgtatttgtagcataaatgttactatgcatattgacacttaacaccattagatttctcttacatgtattacgttgctttactgcattagtaatatttttttcgtaattaggaaagtccataattactgttacagaaattttttatttgggatattgtgggaaatggctagtgttgtcatagttaataaaaattatataattaagtgccattgaagaaccatagtttgaaagtgaatttaatacattagctcatagttatacaatctcacaagcattttgctgccttcaggttgtcagtttcctgctaatgctaatgactaaattttttatttttcttttcaacgaaaatttcactcagttctatatatgccagatgaggcttggaacatacagctctacaacctttaactgcttttccaaaaatctgaacgctatgaaaatgaaaaatcttcataatttaactgatttggtgacaaagcgtaaagtgaacagatgtgagagtatttgtaattgttaattttacgtagtaggaaatagtaatttgttcaattagggttgctacttcatatccttttagtgtttcaatataggtgtaccacactacttttcctttaaaaatgttctcagaatttaacattctgcaacactcttgaaccctgtgattttggagaatggaacctatagtagatgctcagcaaattctacatgatgcaaattaaaatcaaggatatgagtatcatgtcttaactgtttaaagagtaggttttactatgaagagatccataagtaaagagcatttgaaatgaaaactttttcctaaacttccctcttttttttaacattgtgtgtgtgaagttaatgttgtatttctaatatgagcttaatgttgcaattaatgtatagtggaaaataataacacgtatattaattcatttttgagacaagagttcgctctgttgcccaggctggagtgcagtggcatgatctccgttcactgcagcctccgcctctaggcctcaagcgatccaccggcttcatccttccaaagtgctgggattacaggagtaagccactgtgcccaagccatcaataaatttttatgggttagaagtttgggccaggcctggtggctcatgcctataatcccagcagtctgggaggccaaggcaggtggattacttgaggtcaggagtttcagaccagcctagccaacatggtgaaaacatgtctctataaaaatacaaaaagtagctgggtgtgctgggcgcagtggctcacgcctgtaatcccagcactttgggaggccgaggcaggcagatcacgaggtcaggagatcgagaccatcctggctaacacggtgaaaccccatctctactaaaaatacaaaaaaatagccgagcatggtggcgggcgcctgtagtcccagctacttgggaggctgaggcatgagaatggcgtgaacccaggaggtggagcttgcagtgaggcgagatcgcgccactgcactccagcctgggcgacagagcgagattctgtctcaaaaaaaaaaaaatagtagctggatgtggtggtgcgtgcctgtaatcccagctgctcaggatgctgaggcaggacaattgcttgaacccaggaggtggaggcggaggttgcagtgaaccaagattgcacctctgcactccagcctgggcaacagagcaagactgtctccaaaaaaaagaaagaaaaggccgggtgcagtagctcacacctataatcccagcactttgggaggccgaggagggcggatcacttgaggtcaggagttcaagatcagcctggccaacatggtgaaaccttgtctcttattgaaaatacaaaaattagccaggcatggtggttgatgcctgtactcgggagcctgaggcaggagaatcacttgaacctgggaggcagaggttgcagggagccaagattgtgccactgcactccagtgtgtgtgacataacaggactccgtctcaaaaaaaaaaaaaaaaaagaaaagaaacacatggaaccaaatcaggatgaaagaaactggaatagcagtttgttataggctgggcttgttggcttgttcctgtaattccagcactttgggaggcccaggcaggaggatcacttgagtctatgagtttaagaccaacctgggcaacaatgccagatcccatctttaaaaatatgaatagcacattaaattcattgattttttttttttaagtcttgctctgttgcccaggctggagtgcaatgacgtgatgtctgctcactgcaacctccacctcccggattcaagtgattcccctgcctcagcctcccgagtagctgggattacaggcacccgccaccacgcccagttaatttttgtatttttagtagagacagggtttcaccatgttggtcatgctggtctcgaattcctggcctcaggtgatccacccacctcagcctcccaaagaattgctgggattacaagcgtgagccaccgcaccgggccggaatttttttaaaatgccaatactggtgacaggattagagtatattaactgattttacttagtctttccattcccacattaattagttctcaaaatttatttgcatgctacaaaagagctcaacaatttttttattacgtgcaatttttttaataggaataaaaaaatacgttgttggcctcattatcaagacgtcatctgacccaacttgtgtagaggtaagagtttattttggagcttattgggagagcataaaatcatttagatattgagtctgactacaacctaattctgtcaagacacatagtcacacatatgcacagtcagtcatttacagtagagctgtaatcatttgttaggattgtctggttatattcttatttatacttacctcaggctctcatttaatcttttacttttccttagaaagaaaaggtgtatatcggaaaattaaatatgatccttgttcaggtaagctttaacttaactgttttccttagaagaattatgcttattatttgaacaaaatgttcgacctacttaggaaataaagtatactaatattttgcagaagtagtgatagtattcttataataataggtaacctactgtctagtacttgaatgttaatttgctgtggcagtaatcatcaaataacgttaaagccatcatttatgtggctgcagtgtggactggactctgttggattcttatttatcttttcttttcttttttttttttttttggagacagtctccctctgttgcccaggctggagtgcagtggcatgatctcggctcactgcagcctctgctacccgggttcaagcgattgttctgcctcagcctcctgagtggctggaattacgggtgcttaccaccacgtttggctaattttttgtatttttagtagagacagggtttcaccatgttggccaggctggtctcaaactcttgacctcaggtgatccacccacctcgacctcccaaagtgctgggattataggtgtgagccgctgcacctggccggattgttttttaattttctgatatgcctgtgcatatttcctttgcatgtatgtctctgagtcctttgatttcctcgtccttctaattgatttccatgcttagtccttaaactgtctatgtagactaaatttataatttttatgtttatctgttttctatagtaatatcataaaattttttccagagaaccctggtatgtgtgggggaaaaaacagtaatttctatttaaataagacttagaaacatccaagcttccaaaaattttagtgtattcagtaattaactccagcttttattatactttagagctttctgttagcccttctctgagtggtgagagagaggagagaatataaagaaggttaacatgtatttttataatctgaaaaatcccttgtgtgtgccataaatagtccagacttgcatacaaatataatgcagttcatgaggcttttggttaaaagtttattcaggccccgattgcagtgcgtcctctcttttaaattcatatatccaaaccctactacatttcaaggctcaaattgcatccaataataagctgtcttaaccggtcactttttatcaccaatggttaattaaatccttgagtctcctaggataatttcttcttttcttgtttgaaatggagtgtcgctctgtcgcccatgctggagtgcagtggcaccgtcttagttcactgaaacctccacctcccaggttcaagcaattctcctgccttggcctccccagtagctgagactactggcccgcgccaccacccctggctaatttttgtatttttagtagagacggggtttcaccatgttggccaggctgctcttttttttttttttttttttgagatggagtctcatcctgttgcccagccttgagtgcagtggcctggtctcggctcactgcaacctctgcctcccaggttcaagagattctcctgcctcagcctcccgagcagctgggatcacaggcacacgtcaccatgcctcgctaatttttgtatttttagtagagacagggtttcaccatgttggccaggctggtcttgaactcctgacctcgtgatcctcctacctcggcctcccaaagtgctgggattacaggcacgagctaccacgcccagcctggccaggctgttctcagactcctggcctcaagtgatctgcccaccctggctccccacaaagtgctgggattacaggcatgagcaaccgcgcaaggcctcctagaataatttctacatatctatcaggcagatactaatacacagacagacccattagacggattggacctttcattaggataattgaaaagggtcctgcggtgattaagataaaagactttgtgttttgttttctacccagtagggtgaagagggtggcacatttcttcctttaataaaggaggagaaaatgaaaagtgatttatccttactcctgcctttatccattacataatttctttgaagtttgttttatttgcctttgagaaatgaagtgcgattaacatttcatgtcttgttttagatactgaaacaagaatggcccaaacattggccaacttttatcagtgatattgttggagcaagtaggaccagcgaaagtctctgtcaaaataatatggtgattcttaaactcttgagtgaagaagtatttgatttctctagtggacagataacccaagtcaaatctaagcatttaaaagacaggcaagtaataattatgttttagaattttaaagtgatttctcaaacaatttcaagcagtttggatgtaaattgtagatattttaaggaactatgatcagtaatatgttaaattgcttgtagtggttttcaactgcagattaagaaatagtcctagacggggcctaataatttacctctgaaggttgaaaaatgaattgttcaagacacacttcaggaattgttttgtatggtaactagtttaataggttctaagcaaatgatttgtgtccaaacatacgtattagttattttattttattttgagacaagtcttgctctattgcctggggtggagtgcagcagcgcaatcttggctcaccacaacccccacctcctggattgaggtgattttcttgcctcagtttcccaaatagctgtgactgcaggtgcatgccacagagcctggcctcaaatcagttattgtctctgcttcttttcagttccccaattgttaacaatagtgttctttttaaaacaaaacagaaaactagatttgcctctaatagtaagcaactggtataaactatagttatacttccattaagttttaaacatttgttgtagtcattaggaaatctttttccccttgggttgcccaggctggtctcaaacaatccttctgccatggcctcccaaagttctgcgattacaggcatgagccactgtactgggctttaatcatttttattagtattatagataactgatacttatttctgtgtcttctaaatctgatatttttgtgtgtttttttttttagcatgtgcaatgaattctcacagatatttcaactgtgtcagtttgtaatggtaagtgtttttaatttcatttttaaaaacaataataggaaagcaattatttacaagtgtgttttgttataggaaaattctcaaaatgctccacttgtacatgcaaccttggaaacattgctcagatttctgaactggattcccctgggatatatttttgagaccaaattaatcagcacattgatttataaggtacagtgaatacatttcagttatttgtcaccggatagccacatatattcttttcacatgtaaagctctcatctctgcattctaaaccttattcaaccttgtttctaacacgaggacgctgctcaggagaaatttcccatattcacacctagtaaattatttaaagtgagtttcaaatctgattctgccacttagaccatgtaattttatgaattcattttgaacaatggatttgattatattgcttttagtttgagtaagttacagtgaggtaagtcaagtgctatttctgaaaaatgaaaagttcatcttttaactgataatttaaaattgataccatgttatggcttaagttctataatggtttagcctgggcaagttggtgaaaccggtctctactaaaaatacaaaacagccaggcgtggtggtgtatgcctgtagtcccagctactcgggaggctgtggcaggagaatctcaaactcaggaggcagaaggtgcagtgagccaagatcgtgccactgcactccagcctgggcaacagagcgagaccctgtctcaaaataagtaaagttctacagtggtttatccagagataatcactgttaccagttggttgtattatattttcagatgttttcttgactgatataatgaataaattaagtatctaattggaacattataacttgacctcttcaacttcgtagtttagtttggtaagataatatggatttatagtatttgaatgatcagtttattgcttaattatgtaaaaacctttctattgtcaacagtcctacagagaacattctcagacataagatattatgcaattgtccaaacattaatttatttaaatattttaatgtttaatcaccagattattaggtatgtttaattttaaggttttaatgccccctgatttccaaccccagacgataactgtttatcttctcaacaatagaatatataagccaattttcccatattcttattactcttagatacattgaccatttcccaaaattctaagcaatcacaagttttaggtcctgtgtaattacacagaaagtataacattcctaaaagtcatatcacagattctaggaaagttgttaaggagccttgttattttaggacacatcaaaagaaagcagtttaggccgggcgctgtggctcacgcctgtaatcccagcactttgggaggtcgaggtgagcggatcacgaggtcaggagatcgagaccagcctggcccaacgtggcaaaaccctgtctctactaaaaatacaaaaattagccgggcgtggtggcatgcatgtgtagtcccagctatttgagaggctgaggcaggagaatcgcttgaatccaagaggtgaggttgcagtgagccgagatcaagcccctgcatttcagcctgggcgagcgagactctgtctcaaaaaaacaaaaaaagtttgctcctaaagcatttactgtatactaggtaggcaataaaattccctctcagtatatctgcatgataaaatatgttcattcacttggcctgtttttgacatctacccctatatttaattgttaaagcctttttccttttaattgtgaattttaagtaaagtgtgtatcaggccaattaattttatggttccctccccccttttaaatagttcctgaatgttccaatgtttcgaaatgtctctctgaagtgcctcactgagattgctggtgtgagtgtaagccaatatgaagaacaatttgtaacactatttactctgacaatgatgcaactaaagcaggtaatataatactatcttgaaaattggctgaataattttagtgccttagaaaataccaaattccaaatgagttattttagaacgacgtatcaaagataagccataatcttttgtttattacataaaatttgtagtaagctacaaatttttatgatgtttccaaaaatttcttaaaattcaggtttggggtgtgttgtggtaatttatttctgcacactttaggagcttggtcttttgggagatacctgaccagacagtgggaaacctgggacttgttcctaacattgtgtctgaaggaattcttttcagccctagtttgattggttatctattaaatgatctagaaggttattcataatactgtgttcatggccaggcatggtggttaatactgtaatcccagaactttgggaggccagaatgggaggaccagttgatgccaggagttcgagaccagccaggacaacataaccagaccatacctacgaaagatttaaaaaatagctagctgtggtgttgcacacctgtagttccagctactctggaggctgaggcaataggatcgcttgagcctattaatacaaagttaaaatgagctatggtcacactattgcactccagcctggatgacagggtaaatccctgtctcttttaaaaaacaaggaaagatagattactatgtatgtttgtgatctgaatgaatgaattgattatttttacatttttcaatgtcagtgagaaatactagaaaaatttaaaggctgtgatagcggcctttaatttatttgagaagagtcaaaatctaagtcctagagatataagaataggtatactggacctaggagttctgtatgtggtttaatattagcaaaagggtgttgggatattagggcttaaaaataatagtgttggctgagtgcaatagctcagacctttaatcccagcactttgggaggctaaggtgggaggattgcttgagccaggagtttgagaccagcctggacaacataacaagataccgtctctacaaaaatgttaaaaataagcttagtgcgatggcacatacctgtggttccagctactcgggaggggctgaggaggactgattgggcctaggaggtggaggctgcagtgagctttggtcataccactgcactccagcctggacagagtgataccttgtctcaaaaaaataataataaaatattaagtgtctttagttgttttataaaatgcgaactgatcgtcccttttaaaatttgcagatgcttcctttaaataccaatattcgacttgcgtactcaaatggaaaagatgatgaacagaacttcattcaaaatctcagtttgtttctctgcacctttcttaaggaacatgatcaacttatagaaaaaagattaaatctcagggaaactcttatggaggtaagatatgtggagcttttgctcctaaaattctgctctgcctactaataactcttaaaagtgcctttttctaaaatgtatgtaccttttgagatttcttattacttaatatttgatcagtacattatatatattctcaattctgaattacagttataagcccagttttctgattttatgttctccataaagctaggactaaaaatttataatcaaaattaaattactaattattatatcatttctaaggttaaaatttcaaagaccttattttaaaatttcagttttaattcaaataacatgcatttgttcatttaaagatatacaattcatcgtgtaatcccagcactttgggaggcggaggtgggtggatcacttgaggcaggagttcgagaccagcctggcctacatcgtgaatctctgtctctattaaaaatacaaaaaaattagctgtgcgtggtgtcacatgactgtaatcccagctcctcaggaggctgaagcacaggaattgctttagcccagtaggctgaggttgcagtgagccaagatcacagtactgcactccagcctgagtgacagagcaagactctgtctgaaggaagaaaatgtctctctctctctctttatatatatatataaacttaagtatatatatatataaacataagtatatatatatatacacacacacacacaattcagtggcatattagtatatatacaatgttatacaaccattaatacctagatccaaaacattttcatcacccgaaggtgaccctttacccctaaaacagtcactttctcctttgttctctccccaacttctggcaaccattattttggtttctgtctctgtagatatatctattctgattataccatataaagggaatcatgcatgtgaccttttgtgtctggtttcttttatttggtgttgtgttttcaatgttcttccatgttgtaacctgtatcaatacctcactttttatcatgtctgaagaatattctcattgtatgaatattcagtattttgtttgttctctcctctgtgatggtacatttgggttgtgataccacttattggcacccaaggccttttaaataaatgtcgttccattaggagacatgataaaaatacatattgatcaactactatgtgagagatttttgaagtgctttagggcatgtcagaagaagcagagttactccagagtttgctgtctatttgataagtattgaaatctgagttgtgatgaataaaacatgaatttttattttcccttaaggtgtaacaagtgaaaagcaatttgaagttggtaatgtttaagaattattttaacagttttggtcttctgtgtaggcccttcattatatgttgttggtatctgaagtagaagaaactgaaatctttaaaatttgtcttgaatactggaatcatttggctgctgaactctatagagagagtccattctctacatctgcctctccgttgctttctggaagtcaacattttgatgttcctcccaggagacagctatatttgcccatgttattcaaggtaacagagcggttggttgagtgttcttcctgttgcatactgtggttttgaggtctgaatccaaatacttctaatctgtgtaaataaattagctataaaaagagaacccaacaacttctccatgagtgtggaaaactagaacatgaaaggagttgagtctagaaccttgattctcaagagtgtggtccttctctcagtatcaacattggttgtgatttcgttaggcaaattcattggccacctgccaatctactaaaccagagtctaggaatgagacacaggaaactcctgtaacagaagttggttaaaaaaatcacattaaaacacacttaaataattataaagccatttttgtagaattacagtgaaaaaaaattttttcttttggagacagggtcttgctctgtggctcaggttggagtgcagtggcgtggtcatagctcactacaatcttgaactcctagactaaagcaattctcttgtgtcagcctcccaagtaattggttgcaggcacacaccaccatgcctagcaaattttaaattttttagttttacttcatttatatttacatagttttttctgttgtgctttaagccccagtatttttattgttttagagattgggtgtcattttgtgttgctcaagctgctctcaaattcctggccacaacagttctttttgcctcggccctccggaatagttggaattataggcatgaatccctacacatggctggcttgtggtttttttggttttgtttgtttttaactaagcttctacactaatgatttcagtgatctaacgatttttttcttgattgatatattgttgagtataggtccgtttattaatggttagtcgaatggctaaaccagaggaagtattggttgtagagaatgatcaaggagaagttgtgagagaattcatgaaggatacagattccataaatttgtataagaatatgagggaaacattgggtaagttaataaatactgttaatctttacctttataaatctattctggggtggaaatacattttaggaaatgtacttgtagtttctaaatattttctaaatgtattgttactcatcaataaaattctgctcattatttgcatttgaaaccatgtttttctttgtagtttatcttactcatctggattatgtagatacagaaagaataatgacagagaagcttcacaatcaagtgaatggtacagagtggtcatggaaaaatttgaatacattgtgttgggcaataggctccattagtggagcaatgcatgaagaggacgaaaaacgatttcttgttactgttataaaggtatgcaagggataggtatgaattagaattgctaaataagtattatgttgttacaataaataatacaaatttgtcttatttacaggatctattaggattatgtgaacagaaaagaggcaaagataataaagctattattgcatcaaatatcatgtacatagtaggtcaatacccacgttttttgagagctcactggaaatttctgaagactgtagttaacaagctgttcgaattcatgcatggtaaatctctttctttactatattttgcttttatttttattgaagaaaataaatgaatgtttttgtcttgttagagacccatgatggagtccaggacaaaataaatgaatatttttgtcttgttagagacccatgatggagtccaggatatggcttgtgatactttcattaaaatagcccaaaaatgccgcaggcatttcgttcaggttcaggttggagaagtgatgccatttattgatgaaattttgaacaacattaacactattatttgtgatcttcagcctcaacaggtatgttaagcactgagcatatgttatttttagaaagtaacacttgtatcaatctgtatgtatcaatggaaataggagggcaactattggatccaatagaagtgtttctgattaaattttctttcttttttccttgagacagggtcttactctgttgcccaggcttgagtgcagtggcacaattacggctcactgcagccttgaactcccaggctcaggtgatcctcccaccttggcctcgtgggtagctgggactacaggcatgcactgccatcacactcagctaacctttttcccccccttggtagagatggggttttgccaagtggcccaggctggtcttgaactcctagcttcaagcgatacgcttgcctcagcctcccaaaatgattttatatgtgtgagccaccacgcccagcctggttaaattttcatagtgagacagattcttgaccagaagattgttaggctgttgtcctatgtaaaattattccgaacaaacaaaatcaggtgttttttgttttgttttgttttggggtgtgtgtgtgtgtgtgtgtgtgtgtgtgtgtgtgtgtttgttttttgagatggagtttcactctgtcgtccatgctggagtgcagtggcgcaatctcggctcactgcagccttgcctcctggggtcaaacgattctcttcctcagtggctatgattaacaggtgcttgccaccacgcccagctaatttttttatttttagtagagacggggtttctccatgttggtcaggctcatctccaactcctgacctcatgatccgcccgcctcggcctcccaaagtgctgggattacaggcgtgagccaccaccatgcctggccagtttgggttgtttgtttgtttgttttttgaggtggagtcttcctctgtcacccaggctcgagtgcagtattgcaatctcggctcactgcaacctctgcctcccaggttcaagcaattcaaacctcccaagtaactggaattataggcacctgccaccacgcttggctaatttctttgtatttgtagaagagatggggtttcaccacgttggtcaggctggtctgcaactcctgaccacaagtgattggcctgccttggcttctcaaagtattgggattacaggagtgatccactgcacctgggccaaaatcagtttcaagacgtttgtgaattgcttgtgtgtggttttccttattagggtgtataacataaacgttaaaatgtctgctttttaaaataggttcatacgttttatgaagctgtggggtacatgattggtgcacaaacagatcaaacagtacaagaacacttgatagaaaagtacatgttactccctaatcaagtgtgggatagtataatccagcaggcaaccaaagtaagtatttctaccttttcttaaaagttttcatgggatttaacaagacgtgttctttacaaatgtattgaattcaagccttttaacatgtatgtgtgatccataagtgcttttatgtgtgtctttctataatttattatctgggcgaggtgtggtggctcacgcctgtaatcctggcacattggaaggccgaggcgggcggatcacctgaggccagaagttcgagatcagcctggccaacatggcaaaaccccgtctctactaaaaatacaaaaattagctgggcgtggttgcacatgcctgtaatcccagctactgaggaggcttaggcaggagaatcacttgaacccaagaggcagaggttgcagtgagccgagattgagctactgttctctagccgagacgacagagcaagactctgtctcaaaaaaaaaaaaataaatgaaaaatctgggccgggctcggtggctcacgcctgtaatcccagcactttgggagaccgagacgggtggatcactaggtcaggagattgagaccatcctggccaacgtggtgaaaccccgtctctactaaaaatacaaaaattagccaggcatggtggtgggcgcctgtaatcccagctactcgggaggctgagccaggagaatggcttgaacccaggaggcggagcttgcagtgagtcaagagcatgccactgcactccagcctggtgacagaggaagactctgtctcaaaaaaaaaaaaaaatactgtaatttccattctcatttgatattaaaataggaataggctgggtgtggtggctcatgcctgtaatcccagcactttgggaggccgaggcaggcggatcaccaggtcaggggatcgagaccatcatggctaacgcagtgaaaccctgtctctactaaaaatacaaaaattagctgagtgtggcggcgggcgcctgtaagtcccagctactcaggaggctgaggcaggagaatggcgtgaacctgggaggcagagcttgcagtgagccgagatcacgccgctgcactctagcctgggcaacagaacgagactccgtcccaaaaaaaaaaaaatagaactatattacttcattcttaagtagatgtagacaaaaaggcgtttgtgttcgtttttaccatttgggattataaatatggtttagggtaagggaagcgtaatggcttttgctttggtaattatgtggattttttttttttttgagatggagtttcactcttggtgcccgggctggagtgcaatggcgtgatctcggctcactgcaacctctgcctcccgagctcaagcagttctcctgcctcagcctcccaagtggctgggattacaagcaagcaccattgtgcctggctaattttgtatttttagtagagacagggtttctccatgttggtcaggctggtcttgaactcccgacctcaggtgatgcacccgactcagcctcccaaagtgctgggattataggtgtgagccacctcgcctggccattatgatggataattctttttttttttttgagacggagtcttgctctttcgcccaggctggagtgcagtggtgcgatctcggctcactgcaaactccatctctagcgttcacgccgttctcctgcctcaacctcccgagtaggtgggactacaggcggctgccaccacgcctggctattttttttgtatttttagtagagacggggtttcaccgtgttatccaggatggtcccgatctcctgaactcatcatccgcccgcctcggcctctcagagtgctgggattacaggcgtgagccactgttcccagccgtggataattcttatatgataaatggaatttgctttttttcctccaagaatgtggatatactgaaagatcctgaaacagtcaagcagcttggtagcattttgaaaacaaatgtgagagcctgcaaagctgttggacacccctttgtaattcagcttggaagaatttatttagatatgcttaatgtatacaagtgcctcagtgaaaatatttctgcagctatccaagctaatggtaggtgattctgatttcttacacaatgcagtataaacaaaccacttctcttctactgccttaagtcaaacatttgatgttttttacagatttaaatcagacctcccatttcccaaatgaccctagacatatttaaaacagttaagtgtacctttcccttttaaaattagtcttaaagcttattttcccaataaattttgtgaacttttggctttaaactttttaatggtaaaatggaattgcatctaatgtacacctgagtaccactgtataagtttagtggtaaaattagattccatttgattctgttttgtaggtgaaatggttacaaagcaaccattgattagaagtatgcgaactgtaaaaagggaaactttaaagttaatatctggttgggtgagccgatccaatgatccacagatggtaagtgagagatgctttgcttttgatttctagtgttgatgctgtgttttatggaatatgctatactctattatgtgcattttgctaatttaaagcatatcaactttgtggttattttatggcattttatttattgtagtccttacgttaatatactaatagctgtattccatcttcaaaagaaactgctgttaatcagtagcgaagggtggtgatatgtaacaagatagctaagaaaattgggtcattttatgtttccatagataggttaggaggatttaattaatggagtaccggtgcagtttttgcattcctcttgatttttagaacaattgctagagctacaaagttgtcattactttacctctttagcaaagtgattgcttcccagattaaaggcctgaaagtcttttttacaccctttttcctaaatgatttgcagaaaaggaaatcattttcagtaataaaaaccagctgcgtatgcctcaacttgtaaaattgtgaattagttttaggttttaactgtatcgtttcattcttgttattcaattgagccttgggagagtccaaaaaattctaatactactattacttggaatagtgttggttttttgttttttggtttttttttttacaagtgtgctagttattttcatagttttgaaatttcagtattgtttcttgttaaggaaatacttttcagtaaacttgttctgaatataattcttgtggaatacttaagttggctaacctaaatatcgaaaggttctgaacatgcgtattatgtgaacagaactgtatttaaaatttgaaagcagaaagtaagatgtattgaaggaattgtgatgtttgtaatttacaagaagcttgagcacgtgtcgggagcacagtgggaataatacaaagggtatcatcttttgtaacattaatgttaaagtttgggatatttgttcacatgaaacattgtgtttattttccttgtcttggcttttcacggtggctcatgcctgtaatcccagcactttgggaggccgaggcgggtggatcacttgaagtcaggaggctgaggcaggagaatcacttgaaccccagaggtggaggtgacagtgagccaagattgcgccattgcaccccagtctgggccacaagtgggaaacttcgtctcaaaaaaaaaaaaagaacaagaagttactctttaagtataactcagtttacttagaatcatgaaaatcttactgggcattgtagcatgcacctgtaatcccaaccaccagggagggtaaggcaggcgaatcaccccagctcaagtccagtttaggcaacatggcaagattcagtttcaaaaaaataatagaaatccatagtctttcttattttctgagagtaattgattgatgttatttctgcttgtgaaaatactcaccagttagcattcattagattaaaacattagtctgagttgggtggatcacgaggtcaggaaatcaagaccatcctggctaacacggtgaaacaccccgtctctactaaaaatataaaaaattagctgggcgtggtggcaggtgcctgtactcccagctactcgataggctgaggcaggagaatggcgtgaacctggaggcggagcttgcagtgagccaagatggcaccactgcactccagcctgggcgacagagcaagactccgtctcaaaaataaaaagacagtattgagggctcgcttgctgccatcttacatatacagtatacgtagaatcctgattctgccacctaagttggagacacccactgaattttgagcctcacttttcttattgtgagagttttgtagctgggcatggtgctatacctatagtcccagctactcaggagactgaggcacaagaattgcttgaacctgggaggtggaggttgcagtgagcagagatttgccactgcactctggtctgagtgacagtgagactgtctcaaaaaaaaaaagtcttgaatgacagtgtgtccatgagacttcccaacccattgtgatttcctgctttcttttgctaaaaactgttttgacgtaggaaaccctaatacaaacacaagattttcctgttttcagtagatgatcatgctacatctcatagacaggaataaccttgttgtttaaaatagtcaccatgtacctaaattaaaacataacttttttttccctccccaacaggtcgctgaaaattttgttccccctctgttggatgcagttctcattgattatcagagaaatgtcccagctgctagagaaccagaagtgcttagtactatggccataattgtcaacaagttagggggacatataacagctgaaatacctcaaatatttgatgctgtttttgaatgcacattgaatatgataaataaggtgtgtaatatttcagttatgtaagggggaaattctgcaggatagccttaattcttgaaagctaaagtatgtctgtggatataacataattttaatgccatggagtttaaatatttaaacttgtatattagggaaatactttcttggttttcaagaacttacttcccaggagtttgaaaccaacctgggcaatatagtgagacttcatctctacaaaaagttcaaaaagtaaccagtcatggtggcatgtgccggtagtcccaactactcgaaaggctgaagtgggggggggggtcacttgagcctgggagttcaagatggcagtgagctgagattgcgccactgcactccaagaagaagaatttactacacagaatcttgattggtaaaaagtaaatatggaaaacagattttagcattcacatggtatgtagcatttattgaaacctcataggtcggggcatccttttatgaacgtagttgtattaattggtttgaataaatgagaaagtaagtctgcatgtttcaattataaaagtgtagtatatgcttataagaaactgaaaaatgtgttaacaagagaaaataggctggccatggtggcttacacctgtaatcccagcacttcagaaggccaaggcgggcggatgacctgaggtcgggagttcaagaccagcctgcctaacgtggcaaaaccccatctctattaaaaatacaaaaatggccaggcgtggtggctcaacacctgtaatcccaacactttgagaggccgaggccggtggatcacctgaggtcaggatttcaagaccagcctgaccaacatggtgaaaccccatctctactcaaagattaggctgggtgccgtggctcacgcttgtaatcccagcactttgggaggccgaggtgggcagatcacgaggtcaggagatggagaccatggtgaaaccctgtctctactaaaaatacaaaaaattatccgggtgtggtggtgggcgcctgtagtcccagctactcggagaggctgaggcaggagaatggcatgaacccgggaggcggagcttgcagtgagccaagatcgcgccacgcactccagcctgggtgacagagcaagactctgtctaaagaaaaaaaattagctgggcatggtgccgcatgcctgtagtcccagctactcgggaggctgaggcaggagaatctcttgaacccaggaggcggaggttgcagtcagctgagattgcgccactgcactacagcctgggtgacagagtgagactgtttaaaaagaaaaaagagataaaagatacgttaagtggacacatttacacggtaacttaaatttttttgtaatctgtagtggtgatttcaaattaaaaacaaaagtgatagtagtagtcttatggtaataatggtttagatgagttctctattaaaaaggttgtctttctccttcaatttgataactcatgtgcgtaacgggacagtttcattttccgtgagaggtggattgtattttacttgggtttacctttcaggaggcattctatcttctgtggtttattgaaaactccaaatatttatactggattaagccttgcttttcccctcctgtctagcacaacaaagacactgaaacattattttgtttccaccacttatttttaggactttgaagaatatcctgaacatagaacgaactttttcttactacttcaggctgtcaattctcattgtttcccagcattccttgctattccacctacacagtttaaacttgttttggattccatcatttgggctttcaaacatactatgaggaatgtcgcagatacgggtaaataaaagatgttcttttattcatttgcctgccaatccaaaaatacaaatatagttaattgtacataggaaggtattacttgttcagagttttgagtgtgtgaattacatatatgaacatctgagaaaatcctataagcagtttaatcaactgttccactccactccaagtgagtccataggcagaattgagttatggggagagcggcctagtaataattggtttgcgtaatacaaagttctactgggtagtgatgttgtagaagttcatatagaatcagctgagctttcagaaatggtgaaagggtggtaatagtcataacttagattgtaatttttttcccataggcttttaaaaaatattcatgaggttctttttttatttcaatagtttttggggaacaggtggtttttggttacatgaataagttcttcagtggtgatttctgagattttggtgcacctgtcatgtgagcagtatgaactctactttatgtgtagtcttatccctcatgtgtatgaactccaccttatgtgtagtcttatccctcacccactcctgcccttccccacaagtccccaaagtccattatatgatctttatgcctttacatcttcacagtttagctctcacacaacttattataatttataagtaagccagcattggatatagttgtattccattattaatttaagaaaccttatgcaagtaattattagtcatcatcccaaaaaaaagggagaacagggttagattcagaatactttgataagagctaaatactatcatgagtgctgtcagtctgtagtaactttccattggtattctatgtcttttaggcttacagatactttttacactcttacaaaatgttgcacaagaagaagctgcagctcagagtttttatcaaacttatttttgtgatattctccagcatatcttttctgttgtgacagacacttcacatactgctggtaagaatttaatacgatttaaatgttaagtgccagctgggcacagggcctcacgcctataatcccagcactttgggaggtcgaggcggggagattatgaggtcaggagttcgagaacagcctggccaccatggtgaaactgtctgtactaaaaataccataaaaaaataaaagatacaataaaaatactgggcatggtggcatgtgattgcaatcccacctattcgggaggctgaggcaggagaatggcttggaccgaggaggcagaggttgcagtgaactaagattgcgccacggcattccagcttgggtgacagagcgagactccgtctaaaaaaaaaaaacaaaacaaaaaaaaacgctaagatctatagttatattacattttggagttaataattttcttcttatcaacaggtttaacaatgcatgcatcaattcttgcatatatgtttaatttggttgaagaaggaaaaataagtacatcattaaatcctggaaatccagttaacaaccaaatctttcttcaggaatatgtggctaatctccttaagtcggccttccctcacctacaagagtaaatataccttttaataaacgtagaatgttcctggtcgggcacagtggctcacacctgtaatcccagcactttgggaagcctaaggtgggaggattgcttgggcccaaaagttggagaccaacctagacaacaaaacaagatcccgtctctacaaaaaaaaaagtagtcagaagtggtatgcatctgtaggaccagctgttggagaggctgaggcgagagggttgtttgcatcctggagtttaagactgcagtgagctatgatcgcaccactgtacaccagcctgggtgatagagtgagaccctgcctctttaaaaaagcaaaaaaaaaaaaaaaaaaaaaaaggccacgcacggtggctcatgactgtaatcccaacactttgggaggctgaggtgggtgaatcacaaggtcaggagttcaagaccagcctggccaagatggtgaaaccccgtttctactaaaaatacaaaaaattagttgggcatggtggtgggtgcctgaaatcccagctacttgggaggctgagggggagaactgcttgaacccaggaggcagaggttgcagtgagccgagattgtgccactgcactccagtgtgggtgacagagcaagactgtctcaaaaaataaaaaggctgggcacggtggcaaacgcctgtaatccaagcactttgggaggcctaggcgggcagattacctgaggtcaggagtttgagatttgcctgaccaacatggagaaaccctgtctctactaaaaatacaaattagccgggcatggtggtgcatgcctgtaatcccagctacttgggaggctgaggcaggagaatagcttcagaggttgcggtgagccgcgattgtgcgattgtactccaacctggtaaacgagcaaaactttgtctcaaaaattaaaaaaaaattcttgattaaaaaaaaaaaacattattgggacgctgaggcaggagaatgtcttgaacccgggaggcagagattacagtgagcagagatcatgccactgtactccagcctggtgacagagcaatactctgtctcgggggaaaaataaatcattatttaatcattgtgttttgatttgcagtgctcaagtaaagctctttgtgacagggcttttcagcttaaatcaagatattcctgctttcaaggaacatttaagagatttcctagttcaaataaaggtatgtatttatttgctcttgcagaaatattaggggtagatgtgaccacttttatgttacattgtagaatttttatcacttgatttgtcatgccaaataaatggggtttcaagataatacgtttacacaatctctgtaatcaaaaaacctgagactggtaatacagtgaaaaactaaagtccaataaggatagatatgtttgagatgttattcggataaacttattactaatgtaattcattttaggtagtcttaaatgtataatggaatattgggtaagaaaaacgttggtagttctttttataattttataccaattttgttagttgagggaacttgtgaaagttactagatagaatgtctttcttctgctgttatacagtgctttattcatacttttgggaagggtttttctttgaacatcttgctttaaagaaatttggaagtactgtgaaaccctaagtagttgatgaatagtttatccatgattgttgaataagaattagtctcttagctcttaaatattttctccaaaatacaaaggttttttttttttactgtaaaaatattagccaatttttaaaaaactaatgaaagttacctaggctgggcgcagttgctcatgcctgtaatcccagcactttgggaggccaaggtgggtgggtcacctgatgtcgggagtttgagactagcacggccaacatggtgaaacccccgtctctactaataatacaaaaattagccaggcgtggtggcgcacagctgtattcgcagctacttgagaggctgaggcaagagaattgcttgaacccacgaggcaaaggttgcggtgagccgagatcacgtcattgcactccaacctgggtgacaagagtgaaacttcatctcaaaaaaaaaaaaaaaaagttaactgatagctacgaagtcaatgataatataactaaacttaatttaatgacagttattaattagccttaggagaaacatctttcttggtatcttggcatatgaagaatttttagctgggcacagtggctcacacctgtaatcccagcactttgggaggccgaggcagacagatcagttgaggtcaggagttcaggatcagcccggccaacatggtgaaacctcatctctactaaaaatacaaaaattagccaggtctggtggcaggtgcctgtagtcccagctactcgggaggcagaggcaggagaatcacttgaacccaggaggcagaggtttcagtgagctgagatcataacactgcacgccagcctgggcgacagagcaagactgcctctcaaaagaaaagagaaaaaagtgtctgggtgcagtggctcatgcctgtaatcctagcactttgggaggccgagacaggtggattgtctgagcttgggagtttgagatcagcctgggcaacatggtgaaactacgtctctagtaaaaatacaaaaaatgagccagatgtggtggtgcctgtaatcccagctgctggggaggctgaggcaggagaattgcttgcatcttggaggaagaggttgagataatgtgctggggctacagaacaagactctatcacaaagagaacaaaatttgtgtgaatacatagtaggtgtatatacttaggggatgggatgcatgagatacttcggtagaagcatacaatgcataataatcacattgaagactatttactgtaaggtatcacaccattttttttgttttttttgggggggcacagtctcgcttttatcacccaggctggagagcagtggcgtgatcttggctcactgcaacctccgccatgcaggttcaagtgattctcctgcctcagcctcccaagtagctgggattacaggcgcctgtgccaccatgcatggctaattttagtaatgacagggtttcaccatgttggccagggtggtctcctgacatcaagtattcttcccgtctctgcctcccaaagttgggattacaggcgtgagccaccatgccggggcccatgattcttttgtaatcttcccccccaccagttaacaggtttgcagttcattcagctatgtagtatactgtgtcactatcctataatttaaaacccagccactttatggataatttatattccttccttctctaaaaaggaaattgctcatctatgatttctttctttgcaagttgaagtttattgcgttgacatttcaactatctgttttcacaggaatttgcaggtgaagacacttctgatttgtttttggaagagagagaaatagccctacggcaggctgatgaagagaaacataaacgtcaaatgtctgtccctggcatctttaatccacatgagattccagaagaaatgtgtgattaaaatccaaattcatgctgttttttttctctgcaactcgttagcagaggaaaacagcatgtgggtatttgtcgaccaaaatgatgccaatttgtaaattaaaatgtcacctagtggcccttt

SEQ ID NO: 15886 - DNA, 60298 bp, Homo sapiens
ggccgcggcaggagcagcgggagctacagcatcagcaagagcaacagtagctacagccccggcggcggtgcctgttccagtctttgctgctgcagtccgtgcaaccacccagagggggaggggggaaccaccagtcgctgaggaacaagagaaggggggaaagtttaggcgagccttgggggggggggggccagcgccggagccgcgtgagagagggagccgtgttttggtaggggggagtcggactgcaactggcagcagagcgtctccccggccgtgtggactctacaccccctactcctgccgcttctgctgctgcctgtggctggagggtccccctggggctgaatctttgggacttgaccccgttccctcccccttccctcactccccagccgggcgggagcatttattccccagattaattccccttttgggggggggcgggtgtgtgtgtgtgtgtgtgtgtgtgtgtgtgttgggggaagcgtccctgaaatagtaaatattattgagctctttttgcccttttcctgtccgtttttttaatttccttttttgaggtgggaaaactgaaacccaccttgattcgtcccctctcccccctccccaccttccctcgccctaatcccccaacgaggaaggaaggagcagttggttcaatctctgggtaagtcgactgtgtcttcggggccgagggtcgggcggcggcgcggccgggcgggcgggaggaggccggcgtggggcgcggcggcggcggccgcgggaagcgagcccgggaggcggcgggcgggccgggggcgcggcgggcccacagcggagcctgcgattgaatggagccgcttttgccgctgggggatggaggcggggaggcggcctcgggaggggagcgcttgctgggtcattcgcgtgtgcgggtggcggtggaggaaggcgaggagtgtgatagtgaagcggggccccgcgcggggtgggaggggttccccagcccctggggctggggagaagttggggtgatttcaggaacatctctgtaaattattaggagtggaagtttccagaaatatttagtgcagcagcattgaaacgtccgcctgcatcacgtggccccctcggtggagagcttgggatgggggagggaggggctgccgactccctgttcctccagcaaggaaactcgaaagctctccggttttgcagagtggcatgtgaagtaggaaagatcagtttttcaggggcctgcacatgggattccgtcttgtagttccttttcaggggtttgaatgtgataagttggttaaaccatttactgttggccttgtacagtggaggatgccctgattctccttcattccgatgtctgtgagtttgggttgggtgggaggaagtggtgtagtagaggaagcattcagtactggctcagcccggacctcctctgatcacgccgaggccatgctgcatagagaaaggggcggtgaacttaaggcgcctggtctaaatgcctcctccgagtaagggcggggtgagtgcgtgctcctgtgtgctatagttagaagggctgcaaatcggttcgggtgggaagcgaggggagggcgggccctaatgaggtgtgtttttcctgaatgaagcgggcgattgcccacacaacctaaggagcagtctttcgccttgtagcgacttgtttttcacctagtgtgaagttattaagcaacggttatgattttctgggttttgtttaggaattggcattgggtgtcacttgtagagtcacattatccattaagctggataatccctagtgtatgttatccagtgagtggattttaggattgaagagcccaatgggaatgagcgttcgtggttacacctctcgcactatggcttgtttgctgtctgattgtatatcttaagtgtgggacactgctgttagtggaaagaatgttttggaagcggtttgatttgggggactaaatgtgcttggcattgaccacaaagccgccatttctgtactatgtacagttcaggaataggtaggtgatttcgaagatagccgctagttctaaggatggcaaactactgtatttaaatccttctattctaaatctcgtttttcacatcagtctagttcggagaattttataagaacagtgtatttgaaaatgaaacttgtaagagtcattttcttaatccttttttgttttagcattcaactatggtagtaaataggtgaaaagtttgttcaatatttaaccgaaatatttgaaaacttttgatacatggatcttggtgctttgtggacattgcttttaagcctcaaataattaagattgttctgatcttttaaattttatggtacttgaaggtggaggagagtttacacattcatttgtggaatatatatttcctctcagtatttagatcttaaggtttttttgtggtgtgtaacaagtattctgctgtttaaaaacgtttgtttaatgcctactacgaaacgttttgaagtctcatcagttttgtcaataatggaccaattcttgaactcctaatttcttgagttttacattatttttacatcatatcaatcataggtgactcatcttttggagttctaatctgttgtaacagacgttatatttaaataagacaattgcattaaaatagaatttgctgccattattgttatggacatttttaagctgttataaaatagccaggaattaatgactttttttccgccctgccaagctagtttgtctaaatataatgtaaagaaattagctactcattttctggtccacgaaagttcctaaaatgggaagaagtggagatctgaccttgttagttctaaatacactaaactgggagtgccatggatggctttcaggatgtcctgaatcctctataattgtatacaaaatcgtgagtttttaaaaactgggttagagctattggttcctcagagtctcaggcatcttagacccccaaaaaggttaaggactactgacttaaccaattaggtttgagtggcattggctttgaagaaaagcagaggaaagatatattttataattctgggcaacaaaaaagtggatgtgtgccagcatcttagagtagaatcctcttaaaaggatagcactgcatatgaactagtaggttttaaccagtgcatatttaggcgaagtagctcatttttctgttagaattcttttttatttgggaatgggcaagcttttacagcttttaccttgccaatgaatacctggaatttaaaaaatcttgttaggcatattgcccataaagttttttttcctagatcatatattcagtaaatatgtttgtagctttatttcaatcccccaattcattgagggttgaaacaatttgaatggtttgagtgtagaagctaagttatttctgtagaggctaagggcatttataccaagatatgttagacttgtggttcctgctaaccattgctgtagacaataggaattactgtatatccacattttaatttttaacatcattctgtctttgtttgtttgtttttgagatggagtctcattctcttgcccaggctagagtgtggtggtgcatctcggcttactgcaaactccgtctcctgggttcaagcagttctcctgcctcagcttcccaagtagctgggattacaggtgcccgcctccatgcctggctgatttttgtatttttagtagagacggggttttgccatgttggccaggctggtctggaactcctgacctcaagtgattcgcccacctcggcctcccaaagtgctgggattacaggtgtgagccaccacgctcggcccattctgtctttatagcattatttttataaagttaagataatgtgaagtgagcttttactgagttattcagaagaccctacttgggaagaaaagaaaatcacattcacttgaacttaatcctacttgcttaaaaagttttgacatcaagatactgaactgtatcacgttttaggaccataaaatcctaatagtggatgcgtttaaataataggttagcatactttataaatgttagtagaataggaaagtcttcctggtgtataaactaaacactagaaaagttgaatggaccataataatttatgtaattatcaaatagctaagtaatttcagcttttgttacttgcttttactatctcagttttctgtaattaaagtctctaaagtattcattaaaatatttgtaataacatggttgaagtaaaataacttgtaggaagtttttgataataccaaaacttgataggcagcttcaattttttttctttattttcagtaatctatgccagcaattatgacaatgttagcagaccatgcagctcgtcagctgcttgatttcagccaaaaactggatatcaacttattagataatgtggtgaattgcttataccatggagaaggagcccaggtaaagtagccaaccaaaactttataacattatgacagtgtaacagagttgttgggtttagaataaaattttaaattatcacctttaaaaaagatattccatagtttgcattaatttggaattctgtattaaccataatgaaaattggtttggagaaagaaattgcatgtttgacatggttagagtgggttgttttggaatattatacttgttttgtccttaagagccaaatgttattaaatactttgtaggtattaaaggttctctgtacttttatatatacttaatatgtttggcactaatacgattcttctacttttaaaacatttacagaagtacttcacagatatgtttgtttaaataaaaacaggaataccaagtatttttatgttagttgaattttgtgcacttttcaaagtggtactgttaatgtagggaattatcttaaacataaaccaaattttgatcagtttaagatttttggtttttttgaacccaactaaaaggtgaaacagaaatgtgtgtacaattttaaattgtatatgtcacaagaaaaaaaacttgattttttacctgtggggccaaacttttttttgagacagtctcgctctgtggtccaggcaggagtgcagtggcgctatctcagctcactgcaacccctgcctcctgggttcaagcgattgtcttgcctcagcctccctggtagctgggattacaggcacacgccaccatgcctggctaatttttgtatttttagtagagatggggtttcaccgtgttggccaggctggtcttggaactcctgacctcaggtgatccacctgactcggcctcccaaagtgctgggattacaggcatgagccaccgcgtgctggcccaaacatgtttttgaatgagtaaaaagttttgcagttgggtcagaaatcttttttttttttcagatggagtcttgctctgtcaccaggcctgagtgcagtggcacagtctcggctcactgcaacctctgcctcccaggttttcaagcaattcacctgccttagcctcccgagtagctgggactacagacgcgccaccatgcccagctaattttttgtattttagtagagatgggtttcatcatattggccaggatggtctccatctcctgacctcgtgatccgcctgccttggcctcccaaagtgtggagatgacaggcatgagccaccgcgcctggccagaaatcttttatggtagttttgttgccagaacagtagatttctggttagataaatgttcagctagtagatgggaggttacttatattgtcaagatatttatatttgcataattaagaaactgagtgccggccgggcgcggtggctcacgcctgtaatcccagcactttgagaggccgacgccggcggatgacgaggtcaggagatcgagaccatcctggctaacacggtgaaaccccgtctctactaaaaacacaaaaaattagccaggcgtggtggcgggcgcctgtagtcccagctactcgggaggctgaggcaggagaatggcgtgaacccgggaggcggagcttgcagtgagccgaggttgcgccactgcactccagcctgggcaacggcatgagacttcgtctcaaaaataaaaataaataaataaaataaaataaaaaaacctaaacctgagtgccattacactttctgaaaatatataaggtggatacagtactatcttttatagtagtccaaaaagcatcatgtataaatgtttccattcccttatgaaatgcaacagtactgcttttactatagtagaaacttgaaaaaggtccatggaaacgctaaaagtagaaaaaattactcttgcagtgattctgtaagcttgttagcccaggtttatacttttagggcgttttgatcagtatattatctcctaaagcattcttgaaaaaattaaccatccgtatttattatccctgtcatttagttgttactcatgctatacattcaacatgaagctttaagcttcatttcttctagcatggatgcatagaaagcagctgcttttggaggaagctatgaaagtaaggttgggttcaactctgaatgtaatattggaagcacaggtctgtagccattgggaaaaagggcatttaattttttccgcatagattcagctactaatactgtttaatcttcacactaaactagttcactacatctaaaggtatgataaataaaccaacatagagcagtgttcttcatggcttgtaacagaattagtggcaatttttgtaattgagaatatattacagcaatactgcttttaataatgtttcatagtattaagaaatttaatggtttgttttaaaattgacttgttaataaaaagtagattaagaaaagtgtttctaaatttttttgtttgtaaggacaataggttaactttcccaaagtaaaaggattttgtctgcagtagttaatagatcatgtgacaaaatcagttgcgtagaaataactagcaaacttattttgtattataaatgaagaaacaagatttagagcttaaagctggttaaggagtccttttggtctctaaaagtcctatgtcgttagttcagtctacttttcgtttaccacctccttgggggtcttatttcaaaggaaaaggagtagtagtagcagcgagctgctatagtggaaaacatgatttttagtgttagacgtcttaatttgattcttggaagctctctctagtcattgcttaagtcccatgtacaaatatgacctgtcctacaagagattggagggttagttatgaggtttaaaagcacctattacagtgcttgataggtagaaggcactcagcttaaagggtacatttagcagtataatgaaaatgatttagcatatgtgatactcattgcttaaaattaaaaaaattttttttttgctactcataaaatatgcactaatgacaagaaaaatttattatgctaattaagcttttaaagtcaactgggaaaaaaagctgtaggtaggtttttttttttttaaaggaatgtgtaacttgggggaggggaagaaattatttacaagggtgacttttaatctgtagacagaacttctgcatacatggttagtatagtaggatatttagcagtgtaacattaggactaccctctaccctctgttatcagcatttttctatttttagccaagtagacagctagaaaaaagatgcgggaagagttggatgttttctccaatattgtgttctgttaaagatcttgaactctattgcttagcaactaaaatgctttcaccattcagttagtagtacaagggagatgctaggttttctctctttagtttgcttttgtgtcttttttttttaaacccctgctggggttttaagtttataaagaacattatgtaagaatggtgggattagaataaatcagaatgcaaatactagaagtagcatcagagagtaaaattacaactaacaggaaagaatattatttatgtagcgattgatgtgagtggtgatagtgtgggaagtatttgattctgtgtagaatgcttatcacttcaaagcatctgacaaaatggtaacttgaccaagtaacttttactgtgtgaggatctttgatacaacttttcctctagttagataaggttatctagctagatattctcagggagaagaccaaaacactgctaaaatgtgctttggccctagataagccacatcattattctttcggccttctgtcatttctcatatgacacattatgcccatcagtcctttaatgaaatcaaatagaaatgtgtatgattgtattttaaagtatacacattaactcttgtaaccacagactcacaatggaagcaggcgtctgatcttttcaggcaaccacagtggttctggtgggtttctgggtagagaacaaccatataagttattgagtgtgtagcagtgtgttttcctgattgatgtatgggatagtcatgaatgtggtattgtatttcctacctgaggaaaaggtcatgattaaaataaagcatcaaagccaggataagcatataatttctttctttttttttttttttgtaatgagacagagtctcactctgtagcccaggctggagtgcagtggtgtgatctcaaatcactgcaacctccgccttccgggtcctggttcaagcaattctcctgcctcagcctcctgagtaactgggattacaagtacgccccaccatgcccagctaatttttgaatttttagtagagacggggtttcaccatgttggccaggctggtcttgaacttctgacctcgtgatccacccaccttggccacccaaagtgttgggattacaggcgtgagccacggtgcccacccgagcatacgattgttttaaaaaagactagaataaaagccaagctaaagattataaggtatctttgtcagaaatggttgtgagagtgcttcctaccctgtttttgatgctttattgtttataaccatagaattaaacccatgataaagtaaagtataagagaaagataactgacagattttaaagtcatcaaacttttttcttgctctgtcacacaggctggagcacaatggcttgatcacagctcactgcagccttgacttcccaggctcaatcttcccacctcagcctcctgagtagctgggaccataagtgcgtgtcccaccacacctggctcattattaatttttctttgttgcccaggctggtcttgaactcctgggattacagacatgagccaccacacctggtccaaactttttgcttacaacttttaatagaaataggtaaaagaaataggaaggatctaattgagttataaaacaacctttaaagatacaaaagtgaaaaagattaagccattgctttttgtcaatagaattaaaagctgttggtaaaaatattaatgtatgaaaaacttattgaaatgaaaaaactatatatatatatatatatatatatatatatatatatatatatatataaataaaatgtcgacatggctggatcttaaaaactgtcaaatgaaaaaaactaattgcaggaaagattttttttttttttttgagagggagtctcacgcagtcaacccaggttggagtgcactggggcaatcttcctgattcttggggaatcttggctcactgcaacctccgctcctggattcaagcgattctcctgcctcagcctcccgagtagctgggactataggcgcacgccaccattcccggctagtttttgtatttttagtagagatggggtttcgccatattggtcaggatggtcttgaactcctgaccttgtgatctgctcacctcggcctcccatagtgccaggattacaggcgtaagccaccgtgcccagcctaaaagatttttaagtatactattaacataaaatttggtagccgtacaaccctattcatgaaatttacacacatgccgtgaaaatgtggacaggaaaagacacactaagttcatgatgaaagccattactttttaaagaaggaacaaaggtgtaatcccagcactttggggaggctgaggcaggcgggtcacgaggtcaggagttcaagaccagcctggccaatacagtgaaaccctgtctctactgaaaatacaaaaattagccaggcgtggtggcaggtgcctgtagtcccagctacttgggaggctgaggcaggagaattgcttgaacccgggaggtgaaggttgcagtgagtcgagatcctgccattgcactccagcctgggtgacagagcaagactccaactttaaaaaaaaaaaagagagaaaaaaggaataaaggaaggaaatggcactagggaaaggcacaaagatgacttccataaactttagttattttatgctaaaagaaaatctgatacaagcacaagatgatgactacgtagattagtatttctgggttgcatgttaaaaatatgaaaataaaaacggaaatagtttccaaaacaaagattttatatatgaaattagtgaaatttcagaatggagaaaggatggttacaataaatgttaggagccctctttaaagagctcaaatggtatgtaagtatttgggatttgtggtttaattagacctagttttcagcagtctttccatgaaatgtatttttgtatttagagagatcttggtaactcttgtaaagcagagtgtcctgctacattacataacttacctaagtaggtgtgcttttttttgtttttctagagacagggtctctgctctttcacccaggctgaagtgtagtggcaccatcatagctcggtgcaaccttgatttccagggctcaagtgatcctcccatctcggtctcctgagtagttaggactataggtgcaagccaccatgtgcagctttcttttttttttttttttggagagtcatggcctcgttacattgcctgtcacctagactggccagctggtcttgaacccctggcctcaagtggtcctcctgcctcagtctcccaaagtattgggattacaggcatgaaacactgctactggcctagataagaatttttatattgtttttggttgatttaagtgctgagaacttatttgcttcagaatagatctttggttgaaatgcagttcagttttgagactaaaaaataaaccagatttactcccaaaaatgttactgtttcaaataagtaaaatatttgcacctttaaagattaggagttggctgggcatggtggctcactcctataatctcagcactttgggaggccaaggcaggcagatcacctgaggtcaggagttcaagaccagcctggccaacatggtgaaaccccatctctactaaaaatacaaaaattagctggctgtggtggcacctgcctataatcccagctactcaggaggctgaggcgggagaatcgcttgaacccaggaggcagaggttgcagggtgctgagatcgcaccactgcagtccagcctgggtgatagagccaagactctgtctcaaaaaaaaaaaaaaaaaattgggagtcatatttatataattttatttctatttctgtaaggtctaatttttgagtatttctgaacatcaataatagaatctctgtccaattagaatttgtgccttgctcagtagttttcattttaatgaatgattcaaaagaatacattagcttaagttttgttttttttaataatattttagcaaagaatggctcaagaagtactgacacatttaaaggagcatcctgatgcttggacaagagtcgacacaattttggaattttctcagaatatgaatacgaaagtaagcaagtggtggttttaaaatctgttatttcttttcttccagtcataaactttgaggaaggtatctcatttttagtattagcatttgttatctcaaattattttatattgttaatttgtttcaaaatttagtcttaagcatataattaattcttgcaaatagtcctaagaattatgaatgaagttttgtaatgggactagtatgcaaggtggcttttttggttgtctgattttgtttttttctttttagtatatgtatacaggtctaagtagcataaattctgaatgttattcagagattaaacataacattaaggaattattttgggcaagtaatcaatataatacaggccaggcacctctgacaccaagttgtgtggacagcttaaaaccctactccatggcattgggcttctaatgggacagcactcagtttttatttacaatggaaaatgttataattctggtccttttttaagtttgaacagaagggttgatcaaaatgtgttttgtctgttttaggcttgatgattcacgcttctctttaaactgccttaaagtaataaatactatggcattctgtttaatacacgaaaggtttccacttgatatacattgtgttaaaacagaagatagccatattcacatctgtttctgaaaccagactttgttaattaacagttttaaaatattaattagttttgacatcttgtaaattttaggtcaaaaatacagtccagaacttcctcaaagtgctaaccttaagtaacataacagtgtttgcctgtttgcttgcctggtaaattttgctttttatactgacagacattactaatgtttaagttgatttatcaacagtatttttaaaaactcaaatttgtcttgtgaaaaatgagatgattagaggaacagaaagaaagcaacaggtaaagaattcttcaatttacataaattacaaatgatttggtgctaaatttatgcactatgacatttggcttttatgcaatcatttttttttctttaaagatgttaacactacctgatattaatcataatgttccattatgttgattgcttgtaataggaagaaaaggggtgtcttcctgtgcaactgacacagctaggctttgacggcaggcctccacaaggtctacccttttgattccctttaactgaattctgttcatcaattgtttttgtttcatgggcggtgggaggggaaaggggaattcaatgcataaaataagtatttctaagggctcagtagaaatttctaccatagggatcatttcatgcatttattttttcatttagtctttgctgttatctgtccctcatcttcataactcagcagtggatttctcaagtttggagatgtaaggcaaaagtataattcttcagaatgtttggattgtagtgatttatcattggctttcagatttgactgtcacttcagatttttgagcaaaaatactaaaaaaaaaaagaaaaaaaattctttgaagagacaggacctctgttgcccaggctggagtgcagtggtgtgattatagctcactgtaacctcaaactcctgggcttaagtgacatttctgcctcaactttctgagtagctagggctacaggtgcgtgtcaccatgcctcgctaacttaccaatttttttatagaagtggggtctccctgtgttgctcaggctgatcttgaactcctggccctcccgccttggcctccccaaaatgttgggattacaggcgagggccactttgcctggccccaaataacattttttcaaaggaatgtaaattttttttgttttagtttcataggcaaagtctttatgtctgggagagattggattttaggatattatagtaacagatgtattcctttgacctaacctgggcaaagcatttattgggctccctgcttcaacccccttggcagaaagatgaaatatgaattgtatcttcatcaagcttatgctacctttatacagttgtagaaaatacaggttagtaaatagtaattttaggtaacagtatcaaataggaagaagtaaataaaaaagaaaggacagtgtctttccattaaaaatgtaaaaaagtttggttaaataagatgaagttatctttaagatttttatttgtaactatatttatggtgggttttgtttcttagtgttttaaaggctttttaattgatttttggcaagaggatatattgtaagcagtgcattgctttgacttactgagtcttgacaatctgattttgtgcctataaaattaaagaaaatgcttagggtagtatgtttttaaaagctaattaagaacttcaggcatttggacaactctcttttttttacatatttctcagacctagacataataaatagatatgtttttaaaagtgaacaggttagaaagcatcactatttactgctgattatgaaacattttaatagcatcaaatttgtaattttagaattttgctttggccttgtttttattttgaaagtttttaaggaatgttctgcaaatgtagtactttagttgaaatggcaaaattttcttgaagagtgtgaaatgttaaaatgaaagaaaacagcaaaaacattcactgtttgagcacaatgtagtttgggacagtctatattgtgctttggataaaatgagcattcacatgatccctttggttgaaatactaatgctcctattttattgtgtaatgactaaccattttaaagatgaactcttattctcagccaaaacttgcaatctgaggttatatgtctatatatgaatgagcttacctttcagatattatagctgattcttccctaattctctcagttgaaatgtaccacaacggttttgtcccttttcttcctcctgcctatccacactaattggtcatagtaattcaggtagtaactcctggggctttataaattattataaatattgttgactatttagagtgagtaatcagcaggagggacaaaatggcttgaaagtggtatctctgttttttaattttttatacttttagttataactttcagtatttaggaagaaatacctgaaaggtagatacagattgcaacatgcgtttgtgattattttgactgtgcacaaaagtttatctttaaattagtagaaatagcaactataagggtggggttaaaatataaaataaacccatgggttgtcttgctgctccttaagtaacacaccagtgatgcttgtaaacactttctatagaaagtatctgtgacaatactttaatatttggccaaaagcttataactcctagaggatggtaggaagcttgatagcatccaagctgctaaattcttaggagcctgttcgtgttaaagtacgtgagcctatgagcagtcatttatgctgtgaattcatatctggctgctacttttccttcgacagataagcctatttggctgctaaagggctttttatttggttcttcctcctggtgtgagcatgtataaacagcaggacgttatatagagtagcaaacaataaaatgaggaaaatgcatgaaaactcagtatatgggtgaatagatacttgtttaatatgtgtaattaaacttggtagcataatgtttttgaaactttagatgtaaatgtgtgaatgtctgtccatttgtgaatcctgagagttgccagtcctataagcaatatattcacatgcttctattctccaattttcagtactatggactacaaattttggaaaatgtgataaaaacaaggtggaagattcttccaaggaaccagtgcgaaggtaggaaaataaagaattataaattcagagttttgtttttcctggcatttttattgtagttgactgtttgagggggcatgtaatgaatctttagtatattttgctctaatggagcttattgcttttatcatgaagcaaacaggtctgtttgtattggtgggtacaggaaggccacttacaggttatcttttgggagaaagaggagactggactgttgaaaactctgacaataaatattctagttaaaaatatgggctatggcacagtggcccacgcctgtaatcctaacacttcaggaggccgaggcaagtagatcgcttgagtctgggagttctataccagcctaggcagtatagcaagacctcatctggacaaaaatttaaaaaattagctgggtatggtggttcatgtctgtggtcccagctatgtgggagcattgcttgagctcaaaaggtcgagactgcagtgagccatgatcctgccactgcacttcagcctgggtgacaagagtgagaccccatctccaaaaaaacatatatataaataaaatatgggccgggcacagtggctcaagcctgtaatcccaggacttcgtgaggctgaagtgggagggtcatttaaggccagaagtttgagaccatcctgggtaacatagcgagaccctgtgtttacaaaaaatttaaaaattagccaggtattttggtgcaggtggcggcggggacaggggtatcagtggggtgaggtaggaggatcccttgagccaagaggttgagactgcagtgagccatcattgtgccactgtactctagcctgggcaacgagcgaaactccgtctcaaaaaacaagaacaacaacaacaaaaaaaaccatatgtaaggttaactcgggaatggaaaagccaagtactaaagatcacaaagctgttttgccttttgtggttctgggaatgccttggaagaggttggcttctgaaatgaagaaagatcagaaaatgaaggtgtagtgatacctgttaatgagtaatttaacttttctgtctgtgctaccttgaggaatgtagtcatattttgagaaacctgaggcaacattagtttcttgggattctttgatttagctaatttcagttatgatacactgcctttttacctactatatttcatttatctctgaaaaatagaaatttttttcttgactttattatggggcacatgatacttctagtagtattttcatttaaaatatgtctaatttctttgattatttgtcttttaagtattgtccttcacctgcattctcttatcatcattatggtagaatagtgacatggatttacttagctaatctgacttaaaccttgacaaagtttgagcacatttagagttgaatgtgatgagattttaatgccagtgtctttttttaagaatattaagtatattcagtggcaatatctttaatacatcataaatcatagattaagagtgatagtgcaggagcaaataatgtgccctaaaagaggttctcatttctttaaatgttttattatggtttgaaactattttagatcacgttctgtgatggactgagaaattaataagcacaatttgactatgtggtccaagtaggtccttcatactttattcttcagggatctttagtgtagtcattccttgtttctttactactattgttttactcatgtgttatgagccccagatttaattttggccatggtctgccgtaccaagaaaaggtgatttacttctgtcccattttactgttgtataattttaaatcctccttttgttcttaaatctgcatctctgttttttatcacatttgatggttctggaagatgttttccaggttgaaaatagatatgattatactagtttatcaacactgtagttacatttgttacagacaaaattaatttaaaaaatttttgtttctttctttcttctttgttgagacagattctcactctgttcctcaggctggagtgcattggcaccatcactgcagcttcaaatagctgcggtcaagcaatcctcccacctcagcctcccgagtagctgggaacataggcatgccccaccatgccctactaaattttttttttttttaatgttttgtagggatggtgtctcgctgtgttgcccatgctgctggctgctgggcttgagcaatcctcccaccttggcctgccagagtgctgggattgtaagcatgagccaccatacttagtcaacatgattacctttttaattttaactgggaggcttctctaacctaaagatttatttcacaaaatacactagaacttctgaacattaattttccttcatctttaagtaactttggtattggaaattacataaattaatttaaaacattttatttcctttttctgtaagtgtcctgtcttttaaaggtattcgctttgctttttgctgtagctataccctttgtccaactaccatagcatatatatttgttcacctggggtgcatattgtgcgtttcctttgtaccgattactactaaatattaaggttataaaaatatacatgtacatcaaagtgctgtatgtcacagtgttatagttgggaagacaaaacacatgtaaaagaggaatcataaatcagcaaattaggtgtatataatgagtgcttcacaagctaaaagaacagaatgatgtctaagtccggccctttagctaagtttcattcacataattggaaagaaatgcctggtatattttaaaggaaggaaaggtttcactgcataagagtatgccaaaattagattcctgcattttttttctgatgtagaatttgttttatctgcttttaggttcttgtccacagcatgttaatttttacgtggtgtttttttttttttttttttttttttgagacggagtcttgctctgttgcccaggctggagtgcagtggcgcagtcttggctcactgcaagctccacctcctgggttcatgccattctcctgtctcagcctcctgagtagctgggactacaggcacccgccaccacacccagctaattttttttttttttttttagtagagatggtttcactatgttagccaggaaggtctcgatttcctgaccttttggtcctcccgcctcggcctccatgcctgttgagattacaggcatgagccactgcctggctaacatgttcttttaaattaatgacattttcaatttaggcctcttgtataaatactgtcaggaaaatctcatgattcttgagtgggttagatgtctcttgctgtgttatacgttactgtatcctgtaccagtgggtcacaggagaataaaattttaaagagcaaaagataggctcagcacggtggctcacgcctgtaatcccagcactttgggaggccaaggcaggcagataacgaggtcaggagtttgagaccagtcttaccaacatggagaaaccctatctctactaaaaatacaaaaattagccgggcgtggtggcacatgcctgtaatcccagctactcaggaggctgaggcaagagaattgcttgaacccgggaggcggaggttgcagtgagctgagatcacgccattgcactccaacagagcgagacttcatctcaaaaaaaaagagcaaaagatagacataattagaaagtaaggatgtttaaaagaacatttaattttccaaaagatatttttatagcaagagaaatggcgagataataaaacatttaaataagttgagatttgttatataaaatttattacatttctctggattttcatttagctttaggccgtaagtgtgtgtctatttgtttgtgttttatgtgttttgtccctcacaccccacattacacttggctgttttagtcactttattccccatccttcaaactataagctccttgatattggggctcagagtgtctttttttctttggtttttttttggtctgtttttgtgtttgtttttgtttaagacagagtctcgctctgttgcccaggctggagtgcagtggcgtgatctcggctcagtgcaagctctgcctcccggtttcacaccattctcctgcctcagcctcctgagtatctgggactgcaggcgcctgccaccacgcccggctaactttgtgtgtgtgtgtgtgtgtgtgtgtgtgtgtgtgtgtgtgtgtgtgttttgttttttgttttttgtttttttttttagtagagacggggtttcaccgtgttagccaggatggtctcgatctcctgacctcgtcatccgcctgcctcggcctcccaaagtgctgggattacaggtgcgaaccaccgcgcctggctttttctttgttttttaaagatgtagggtttcactctgttgctcaggctggagtacagtggtgcaatcatggttcactgcagcctggaactcctgggctccagtgatcctcttgcctcaggctttttttcttttttttttgtgagacagagtccctctctgtcacccaggctggagtgcagtggcgcagtcttggctcactgcaccctctgcctcctgggctcaagtgattctcatgtgtcagtctcccaagtagctgggattacagatgcacaccaccatgcctggctaatttttgtatttgttttagtaaggacagggtttcgccatgttgaccaggctggtctcgaactcctgacttcaggtgatcctcaccctcccagagtgctgggattataggcgtgagccattgcatcctgccctcttgcctcagccttgagagtagctagcactgtaggtccgcaccaccatgcccagctaattaaaaaaaatttttttttttagagatagagtctcactgtgaagcccaggctggttttaaactcctgggtttaaagcagtcttcctactttgccgtcccaaattgctaccaagcctggctgggaaattttaatatgtcaaatggaagaattccctaataaagagtggttgctattcatggtagtcttttatttattcatttgttttgagacaagatctcactgtatcacccatgctggagtacagtggcacaatcatagcacactgcagccttaaactcctgagctcaggcagttaccacgccttagcctgccaaaatagctaggactacaggcatgtgccaccacacccagctaagtttttctaattttgatagagacacagtttgcctatgttgtccaggcttgtcttgaactcctggcctcaagtgatgctccaacctcagcatcccaaagtgctggggttacaggtatatcaccactcctagccatcactgaagtcttaaaggtcctctaggactgccagtggtgttgattctttatcagagtcatgattcagataattccccatccctttttaaaaatggcatttaggctgggtgtggtggcttacacctgtaatcccagcactttgggaggctgaggtgggcagatcacctgaggtcagttcgagactagcctggccagtgtggtgaaacccggtctctactaaaaataccaaaattagctgagtgtggtggcagatgcctttaatcccagctaattgagaggctgaggcaagagaatcggttgaacctgggaggtggagcttacagtgagccaagacagcacgactgcactccagcctgggcaacaagagtgaaactctgaaattaaaaaataattaattaattaattaaaaatggcatttagataattcaaataaaaaaaaagaggaagcctcctttgttcctgttggggggaaagatgatgctatataaaggtatttctgtactttttatttaaaccaagggattgttttaatcagttaatgtgtatggcttatagatcatttcattgattgataaaaacttactcacaggcggggcatggtggctcatgcctgtaatcccagcactttgggaggctgaggcgggcagatcacctgaggtccggagttcgagaccagcctgaccaacatggagaaaccccatctctactacaaatacaaaattagccaggcgtggtggcgcatgcctgtaatcccagctattggggaggctgaggcaggagaatcgcttgaacccgggaggcagaggtcgcggtgagctgagatcgcgccattgcactacggcctgggcaccaagagcgaaactcagtctcaaaaaaaaacccacacttggctcacattgaatagagaagaagcgaatttatgaaaaaagtaatccaaagtggaaagatcgtaattacaaggtttgattttttttttttgtttggtttggttttttcgaggcggagtttcgctgttgttgcccaggctggagtgcagtggctcaatctccactcactgcagcctccgcctcctgggttcaagctattctcctgcctcagcctcccgagtagctgggattacaggcatgtgccaccatgcaaggttggttttgttttgttttgtttttttttaattttgcgacggagtttcgctctgtcgcccaggctggagtgtagtggcgagatcttgggtcactggatgctcagcctcctgggttcacaccattcttctgcctcagcctcctgagtagctgggactacaggtgcctgctaccacgtctggctaattttgtgtgtgtgtgtgtgtgtgtgtgtgtgtgtgtgtggtttttttttttttttttagtagagatggggtttcaccgtgttagccaggatggtctcgatctcctgacctcgtgatccaccctcctcggcctcccaaagtgctgggattacaggcgtgagccaccgtgcccggccaggttggattttataagtagttgggccactaaaatttctgagttgtacagtttcatgtctttagttggcagaccaaagctgatccactcataaaattttatttagtgctctcctttgacgtgagacacgtggtatatttattggcaccgtaatactggctacattatttgacctcatatttcagtttgtgttgcaaggttttgggcattagagctaatgtataggaagccctgtgcttacatatgctgagtatgagtaagtagtgggttaccaactgtttttgatgaaatatctgcatttcaccaaattgccatataccagtctcaaaatatcctgaaccttctgaaataccttcctaagtgagctcactaacacctacttttctgtgtcctttacaattttttcaccacaaagtctcaaagtttcagaaacggaactaatagggtcacttctgctgaagatctcctgtagtattgaagatatttaacatgtttcctttaattgatattggcctttgagaatttttgtatttgccttatttattaggtttaaagtgtacagttggataagttttatcttgtgcatgctcctgtgaaactacctctgtataatcaagatctgcctctatccgattactttcaccttcactgcccctcttcacatgtgcttgttgtcacttgcttggtaagagtggaatggctggattgtgtggatttttttttttttttttttaagacagtcacactactctgtcgcccaggctggagtgcagtgtcatgatcttggctcattgcaacctctggctctcgggttcaagcgattcttgtgcctcagcctcccaagtaggtgggattacaagcatgcaccaccacaccagcataatttttgtttttgtaatagagtttcgccatattggcctggctggtctcaaactcccgacctcaggtgatctgtccacttcggcctctcacagtgctgagattatactcataagccactgcgcccagcccatatggatgttttggtgtatgtttaagcatccaactgtattccaaagtggtcatgtcagtctcaccagcagtgtataagtatgtttcacatctcggctgacatttggtatagacaatgtttttagtttggctattgtagtgcatatacaatagcatctcatggtggttttaatttctttcttttttttttttttttttaaagacagagtcttgctctgtcgcccaggctggagtgcagtggcctgatctcggctgactgcaacctctgtttcccgggttcaagcgattctcctgcctcagcctcctgagtagctgagactacaggcatgtgccaccacacccagctaattattttgtatttttagtagagacgagctttcaccatgttggccaggatggtctcgaactcctgacctggtaatcagcccacctcagcctcccaaagtgctgggattacaggcatgagccaccacgcccagccttaatttccatgtggagtagtgttgttctgtgttccatcacatatccttacatgttctttgccatgccagtatgtttttggtgaaatgtctgttcaaaaattttgctcagttttttttttttttgagacggagcctggctctattgccccagctggagtgtggtggcacaatctcagctcactgcaacctctgcctcctgggttcaagcgattctcctgtctcagtctcctgagtagctgggattacaggtatgcaccaccacgccctgctactttttcgtatttttagtagtagagatggggtttcaccatgttagccacgctggtctctatctcctgacctcgtgatccacctgcctcagcctcccaaagcgctaggattacaggcgtgtaagcccaccatgccccgccaattttgcccagtttttattgggctattcccttattgagatctaagggctctttgtattctagtcaggagtattttgttaactgtatattttgcaagtgttttgtctgtggcttcctgtttaatttttgtaatggtgtcttttgcagagcaaaaatttcagattttgattaaaatcagtgttgatttttttttctttatatagttgatgttttttgtgttgtattcaagaaatctttgtcatgcaaaggtcacttaagattttctgtaagtttttggctgggcacagtggctcacgcctgtaattccagcaatttgggaggccgaggcaggcagatctcttgaggtcagcagttcgagacgagcctggtcaacagggtgaaaccgcatgtctactaaagatacaaaaattagctgggtgtgttggtgaattgcttgaactggggaggcagagactgcagtaagcctagatcacaccactgccctccagcctgggtgacagagcaagactctctctcaaaaaaaaaaaaaaaaaaaagatattctgtacgttttcttatagaacctttatagttttagcttttgcattaagatctgtgatttggctgggcacagtagctcacaattgtaatcccagcactgggaggccaaggcaggcggaaacaatacaaacaaattagccaggcgtggtggcatgcacctgtaatcccgactgccaggaagctgaggtgggaggaatgcttgagttgagttcgggaggtggaggttgcagtgagccgagatcatgccactgcactccagcctgggcgacaaagaccctgtctgaaaaaagcatcatgtgattcattttactcaatttttgtatatgaggtgaggtaagggtcaaggtttatatatttatttgagacagagtcatgctctgtctcctggccagagtacagtggcgcgatcttggctcactgcaaactccacctgccagattacaggtgcacaccaccacacccggctaatttttgtatttttagtagagatggggttgccccatgttggccaggctggtctggaactccagacctcaagtgatccgccagtctcagcctcccaaagtgctgggattatgtgtgagctaccgcacccagctccccaactttgtttctaaaaggtttggctattgttggttttttgctgttccataaaaattttagagtgaaatctggcaaatttcaacaaaagctgtcctgaaatttttattgagattgccttggatctgtggatgcatttggagagaatgaacatctttaatgtcaattcctgattatttcttgctaatatagagaattgccattgttcacttatctcttgaacgtgtagtttaatccagctagtcaaagcccagttcaaactcactttcccttcctgttgtgagaaaacacctcaattttgcaaaagctcttggaatttaacatttctgctgcttttccctgtatgtgtggtgtttagtcttttcatagttcgttgactatggaattcagagcagaaaccctatttcctaatttccttgggaagttttcagaactagatgataatgtaagtttctaataagttgatagtgttactcagaggtgattgtttcatttatgattttgaaaagaaaatgtaaatattagacttaagtccttgcatctaaaacaaattcatgagaaatcccacagaatacaatgttagagatgggagcaaaaattatcagtctaatctcagagagttgacaggcattccaaatcgttttttgtcagtatttaaaccatggtaggataatgtaagaaatatacttaatgcctggtgcgatgtctcacgcctgtaatcccagcactttgggaggcctaggcaggcaattgtctgaggtcaggagttcgagaccagtctggccaacatggtgaaaccccgtctctactaaaaatacaaaaaaaattagccgggcatggtggcgtgtgcctgtaatcccagaatcccagctactcggtaggttgcagcaggggagttgcttggaccagggaggtggaggctgcagtgagctgtgatcatgccactgcattccagcctgggcgacagagcaaggctccgtctcaaaaagaaaaaaaagaaaagaaaaagaaatatctgtaagctataaattatgtttttcatttctaaaaaaaacaaggcaggccaggcacagtgattgaggcctgcaatcccagcagtttgggaggctctcttgagcccagaaatttgagatcagccaggacaagatagttagacttctctctactaaaaatacagaaaactagcagtgtatggtcgagtgcccctgtagtttcagccactcaggaggctgaggcgggagaatcatttgagtccaggcaggaggtcgagccctgattgattgcaccactgcactccagcctgggcaacagagtgataatatctgaaaagataggctgggcacagtggctcttgcctgtaatcccaggactttgggaggctgaggcaggcagatcacctgaggttgggagttcgagatcagcctgaccaacatggtgaaaccccatctctactaaaaataacaaaaaaattagctgggcgtggtggcgcattcctgtaatccctgctactctgaaggctgaggccggagaattgcttaaacctgggaggtggaggttgcagtgagccgagattgcgccattgcattccagcctgggcaacaagaacgaaactctgtctaaaaaataaagaaaagaaagcagtattttcaggcacattgtatatgattgataggaatagtatttccatttctggttaatgtaacaatttgccccattccaagtattttgattacaggcctccatgaaaggcctatacttgatacctaacagtgtttgatccctagcttacatccatgtaacttttttttttttttttttttttgagataaggtctcacgctgtcgcccaagctggagtgcagtggcgggatcatggcttaactctagcctcaacttccggggctctagcaatcctcctgcgtcagtctcctgcataactgggactacgtgcgcatgaatcatacctggctcactgtttctattttttgtagagatggggtctcgctatgttgcctaggctggtcctgaactcctgggctcaagcgatcctctgcctcagcctcccaaagtgtttagattacagtcaagagctactgtgctcgacctgctttcaccttttggctatcatgagtgatgctcctgtcaattttaataaaattttaatcttttagattttttgtccagtgtgtttgaggccataaacatccatttaagaatggcggatgtgcatatagatccatttctcttaacattatcaaagcaggttaaattatagattatctgtgggaaccctaacttaactcctgctttagaattattgttagctgtttgtcttccatgtggcattgttcttattaatatttcattgagagaacagtagtaacaatatcctgtatacccttgtgtaagtaaagagagcagatcactattttattgaccatctttcaaaagatcgattttgtgtgtttttttgttttgttttgagatagtctcacattgtcgcccaggctgcttggattgcagtagtacaatcttggctcactgcaacctctgccttccgggttgaagcgattcttgtgcctcagcctccagagtagctggtactacaggtgtgcaccaccatgcctggctatttttttgtattttaatagacaggtttcaccatgttggcctggctggtctcaaactcctggcctcaagtgatccacccacctcggcctcccacagcgctaggattacaggcttgagccaccacatccagccaattttgatgttttcatggactgatacttgtaataaacatttcaattatatatagcattgatgtagaaatgtaccaaatttacatttttttagcttatggaataaataaatgtttaaactgaaattgattcgaaactagattgaacttgcctttttcctatttgtaatttacatttttaatagtgtatcaaaagccttaaaccattttctgtggtgcaggttgactgcctcttgctggaaatgcttgggatgagaagtgttccagactttgggctttttcagattttggaatatttgcattatgctcacgagttaagcattccaaaactgaaatagcccaatgagcatttcctttttttttccttttttttgagacagagtttcgctcttgttgcccaggctggagtgcgacggcatgatctcgactcactgcaacctctgcctcctgggttgaagtgattctcctgcctcatcctcctgtgtagttgggattacagtcatgcggcaccatgcctggctaattttgtagttttagtagagacagggtttcttcatgttggtcaggctggtctcaaactccaaacctcaggtgagccgcccgccttgtgttgggattacaggcgtgagctatctcacccaacctgagcatttccttttagtgccatgttggtgctttaaaacttgcagatttggggttgggcgtggtggctcatgcctgtaatcccagcactttgggaggctgaggcaggtgggttgcctgaggtcaggagttggagaacagcctggccaacatagtgaaaccttgtctttacctaaaaaaaaaaaaaaatcagctgggcgtggtgacgggcacctgtaatcccagctactctgggaggctgaggcaggagaatcgcttgaactcgggaggtggaggttgcagtgagcggagatagcaccattgcactccagcctgggccacaagaatgaaactccatctcaatcagtcagtcaatcttgcagatattggagtgtttcagatttcagatttggggtacttaaactgtacgtgaaaattagctgctggggaggagaggaattggaatatgtaacatggactcccacattttaaggatttttctaggactgcatctttctcttaataagtcagatccttatttggttgaaaatgtttactgcatgactatcactgactatgtaagatgctgatgtacaactctatgacttgaagattgagttgcttctatgggaatatgacaccatttgaattaatttgttctcaatattttaaagagttttagtgaattctgttcatataaaaatcaggttcaataatgcgtgctttttacgctatcattgagtatccagtgtttacaaggtgtttctgagggataagattattattgctgtgtaaagaatttggcagatggtgtgtaccttctaagttagcttgaggtttatttaaatctcatctttttagcttgctgaagttgatactatgcagttgcaagtttatattgactatttgatattgctgtgtttttatttgaaatgggactgttagacacatttttctttatattgagcaatagagctggaatattaaagatgtatgcattaacccttgcatttggaacatttacatgtcataagctgcctttcagtaagtggttaggcatttctacgggtgtgtattatattttgaataaattttatatggctttccaagaaacaattagagcatttgacccaccgactttgttgtttatttttatttttttgagatggagcctcccgcagtagagatagagtttcactatgttggccaggctggtcttgaattccgcctcaggtgatccacgtgccttggcctcccaaagtgctgggattacaggtgtgagccaccatgcccaacctgacctaccaactttggatgtgaatttttttcatttatattgagaagaatagggtcttgggccactagattgtaccagtgctaagtcagtatctgaatccattgaagatcctgttggcaacgtcaggacttatcaaagacacacaacttcaatgagaacctttctttggaattaattaattaatgatatggagccttgatctgtcactcaggctggagtgcagtggcactatttcagctcactaggaatgcatctttctcttctctttctccacctcccaggtttaagcacttctcctgcctcagcctcccgagtagctgggactgcaggcacaagccaccatgctgagctaatttttgtatttttagcagagacaaggttttgccatgttggccaggctggtctcgaactcctggcctcacgtgatctgcccacctcagcctcccaaagtactgggattacaggcttgagccactgtgcccggctgccttgtttgatttttttttttaaagagacagagatcccctctgttgcccaggctgaagtgcagtgacacaatcatagctcgttgtaacttcagtctcctgggtgatgggtagaattctgccacagcccaagtagctaggagtataggcacgaacgactgtgcctagctaatttttttattttttgtggaaatggggccttgctgtgttgcccaagctggtctcaagctcgtttcctcaaaccctcctcccatgtcagccttccaaagctccaggattacaggtgtgagccatcgtgcgtgacttgtttttgatttttgtatcgttttcttcactcttttttttttttttttgagatggagtctcccgctgtcacccaagctggagtgcagtggcacaatcttggctcactgcaactgcatcttgggttcaagtgattctcctgcctcagtctccccaagtagctgggactacaggcgcatgccaccacgcccagctaaatttttttgtttttattttttgcatttttagtagagacgaggtttcaccacgttggccaggctggtcttgaactcttgacctcagatgatctgcccgtctcggcctcccaaagtgctgggattacaggtgtgagccaccgcgcccggccttcttcaccttttgtatcaagctttttaaggaagagcttagaaagccagtttaaaggaattgaaatgtgttatgtaaatgtctgttttgcaactgagacccactaatttatttagaacaaaaagtcagagaccagtaatgggtccttttctgtcaaatttcaagctgagctgtttctgctacttagaaacatttcgattttctacctagatatgtattatatcattgctaattatttatttatttatttatttatttatttgaggtggagtctcactctgtcgcccaggcttgagtgtactaatttatttttaagtgcagtttaacattggatttttttttttttttttgagacggaatcttgctctgtcgcccagactggagtgcagtggcacgatcttggctcagagcaacctctggctcctgggttcaagcgtttctcctgcctcagcttcccaggtagctgggattacaggcatgagccactgctcctggcctacagttggaattttttgttgttgtttttgagacggagtcttgctctgtcacccaggcttgagtgcagtggcgcgatctcagctcactgcattgtccatttcctgggttcaaatgattctcatgcctcagcctcctgagtagctgggattataggcgcgtgccaccatgcctggctaattttgttgtatttttattagagacagggtttcaccatgttggccaggctggtctggaactcctgacctcaagtgatctgcctgcctcggccttccagagtgttgggattacaggcgtgagccatccgtccggctggaatgctattcttaattgacctgcatttatttatttatttatttatttggcaagccttgaggaagggatttggggaatgaacaatggtacttgatcaaataatccttgtactaggcaatcacagtttctagggccactgtacctggccatgggggttttattgataataatctgtaaggaacaaaagggttagtactatcggaatttttgattagatgtagtgagcattaaggacatatggaaagtagtttgaagtaaaatatatacagtataagagtcagaatcagccaggcgcggtggctcatgtaatcccagcacttcgggaggccgaggtgggcggatcacctgaagtcaggagttcgagatggcctggccaaaatggtgaaaccccatctctagtgaaaatacaaaaaaaagccaggtgcggtggctcacgtctgtaatctcagcactttgggatgctgaggcaggataatcgcttaaacctggaaggcagaggttgcagtgagctgagatcacgccactgcacaccaatctggggtacagtgaggctctgtctcaaaaaaaaaatacaaaaaaagtagccagacatagtggcatctacttgtagtccagggtactcaggaggctgaggcaggagaatcacttgaacccaggaggcggccgtgtcagtgagcctagatcacaccactgcactccagcctggaagacagaggaagactccatctcaaaaaaaaaaaaaaaaagtgagaatgttgcatagattacccaagttaattcttataatttagtgttcatttaaaaggaaaattgatttcctactttttgtttttaaaaatagtattaggctgggtatggtgggtcaggcctgtaatcccaacataaaatgtggccaaggcaggaggattgcttgaggtttggagttcaaggccagccccagcaacaatgagaccaggaaaaatcagccaggcacggtgctaagcacctgtggtcccagctagtcagctagctgaggcaggaggatcgcttgagtccagaagttcaaggctgcagtgagctgtgatggcaccactgcattctagtgtgggcaacagaccaagaccctgcctctaaaacaaaatgtaaaaaatatattttccatttccctattcattttatgtatttgtagcataaatgttactatgcatattgacacttaacaccattagatttctcttacatgtattacgttgctttactgcattagtaatatttttttcgtaattaggaaagtccataattactgttacagaaattttttatttgggatattgtgggaaatggctagtgttgtcatagttaataaaaattatataattaagtgccattgaagaaccatagtttgaaagtgaatttaatacattagctcatagttatacaatctcacaagcattttgctgccttcaggttgtcagtttcctgctaatgctaatgactaaattttttatttttcttttcaacgaaaatttcactcagttctatatatgccagatgaggcttggaacatacagctctacaacctttaactgcttttccaaaaatctgaacgctatgaaaatgaaaaatcttcataatttaactgatttggtgacaaagcgtaaagtgaacagatgtgagagtatttgtaattgttaattttacgtagtaggaaatagtaatttgttcaattagggttgctacttcatatccttttagtgtttcaatataggtgtaccacactacttttcctttaaaaatgttctcagaatttaacattctgcaacactcttgaaccctgtgattttggagaatggaacctatagtagatgctcagcaaattctacatgatgcaaattaaaatcaaggatatgagtatcatgtcttaactgtttaaagagtaggttttactatgaagagatccataagtaaagagcatttgaaatgaaaactttttcctaaacttccctcttttttttaacattgtgtgtgtgaagttaatgttgtatttctaatatgagcttaatgttgcaattaatgtatagtggaaaataataacacgtatattaattcatttttgagacaagagttcgctctgttgcccaggctggagtgcagtggcatgatctccgttcactgcagcctccgcctctaggcctcaagcgatccaccggcttcatccttccaaagtgctgggattacaggagtaagccactgtgcccaagccatcaataaatttttatgggttagaagtttgggccaggcctggtggctcatgcctataatcccagcagtctgggaggccaaggcaggtggattacttgaggtcaggagtttcagaccagcctagccaacatggtgaaaacatgtctctataaaaatacaaaaagtagctgggtgtgctgggcgcagtggctcacgcctgtaatcccagcactttgggaggccgaggcaggcagatcacgaggtcaggagatcgagaccatcctggctaacacggtgaaaccccatctctactaaaaatacaaaaaaatagccgagcatggtggcgggcgcctgtagtcccagctacttgggaggctgaggcatgagaatggcgtgaacccaggaggtggagcttgcagtgaggcgagatcgcgccactgcactccagcctgggcgacagagcgagattctgtctcaaaaaaaaaaaaatagtagctggatgtggtggtgcgtgcctgtaatcccagctgctcaggatgctgaggcaggacaattgcttgaacccaggaggtggaggcggaggttgcagtgaaccaagattgcacctctgcactccagcctgggcaacagagcaagactgtctccaaaaaaaagaaagaaaaggccgggtgcagtagctcacacctataatcccagcactttgggaggccgaggagggcggatcacttgaggtcaggagttcaagatcagcctggccaacatggtgaaaccttgtctcttattgaaaatacaaaaattagccaggcatggtggttgatgcctgtactcgggagcctgaggcaggagaatcacttgaacctgggaggcagaggttgcagggagccaagattgtgccactgcactccagtgtgtgtgacataacaggactccgtctcaaaaaaaaaaaaaaaaaagaaaagaaacacatggaaccaaatcaggatgaaagaaactggaatagcagtttgttataggctgggcttgttggcttgttcctgtaattccagcactttgggaggcccaggcaggaggatcacttgagtctatgagtttaagaccaacctgggcaacaatgccagatcccatctttaaaaatatgaatagcacattaaattcattgattttttttttttaagtcttgctctgttgcccaggctggagtgcaatgacgtgatgtctgctcactgcaacctccacctcccggattcaagtgattcccctgcctcagcctcccgagtagctgggattacaggcacccgccaccacgcccagttaatttttgtatttttagtagagacagggtttcaccatgttggtcatgctggtctcgaattcctggcctcaggtgatccacccacctcagcctcccaaagaattgctgggattacaagcgtgagccaccgcaccgggccggaatttttttaaaatgccaatactggtgacaggattagagtatattaactgattttacttagtctttccattcccacattaattagttctcaaaatttatttgcatgctacaaaagagctcaacaatttttttattacgtgcaatttttttaataggaataaaaaaatacgttgttggcctcattatcaagacgtcatctgacccaacttgtgtagaggtaagagtttattttggagcttattgggagagcataaaatcatttagatattgagtctgactacaacctaattctgtcaagacacatagtcacacatatgcacagtcagtcatttacagtagagctgtaatcatttgttaggattgtctggttatattcttatttatacttacctcaggctctcatttaatcttttacttttccttagaaagaaaaggtgtatatcggaaaattaaatatgatccttgttcaggtaagctttaacttaactgttttccttagaagaattatgcttattatttgaacaaaatgttcgacctacttaggaaataaagtatactaatattttgcagaagtagtgatagtattcttataataataggtaacctactgtctagtacttgaatgttaatttgctgtggcagtaatcatcaaataacgttaaagccatcatttatgtggctgcagtgtggactggactctgttggattcttatttatcttttcttttcttttttttttttttttggagacagtctccctctgttgcccaggctggagtgcagtggcatgatctcggctcactgcagcctctgctacccgggttcaagcgattgttctgcctcagcctcctgagtggctggaattacgggtgcttaccaccacgtttggctaattttttgtatttttagtagagacagggtttcaccatgttggccaggctggtctcaaactcttgacctcaggtgatccacccacctcgacctcccaaagtgctgggattataggtgtgagccgctgcacctggccggattgttttttaattttctgatatgcctgtgcatatttcctttgcatgtatgtctctgagtcctttgatttcctcgtccttctaattgatttccatgcttagtccttaaactgtctatgtagactaaatttataatttttatgtttatctgttttctatagtaatatcataaaattttttccagagaaccctggtatgtgtgggggaaaaaacagtaatttctatttaaataagacttagaaacatccaagcttccaaaaattttagtgtattcagtaattaactccagcttttattatactttagagctttctgttagcccttctctgagtggtgagagagaggagagaatataaagaaggttaacatgtatttttataatctgaaaaatcccttgtgtgtgccataaatagtccagacttgcatacaaatataatgcagttcatgaggcttttggttaaaagtttattcaggccccgattgcagtgcgtcctctcttttaaattcatatatccaaaccctactacatttcaaggctcaaattgcatccaataataagctgtcttaaccggtcactttttatcaccaatggttaattaaatccttgagtctcctaggataatttcttcttttcttgtttgaaatggagtgtcgctctgtcgcccatgctggagtgcagtggcaccgtcttagttcactgaaacctccacctcccaggttcaagcaattctcctgccttggcctccccagtagctgagactactggcccgcgccaccacccctggctaatttttgtatttttagtagagacggggtttcaccatgttggccaggctgctcttttttttttttttttttttgagatggagtctcatcctgttgcccagccttgagtgcagtggcctggtctcggctcactgcaacctctgcctcccaggttcaagagattctcctgcctcagcctcccgagcagctgggatcacaggcacacgtcaccatgcctcgctaatttttgtatttttagtagagacagggtttcaccatgttggccaggctggtcttgaactcctgacctcgtgatcctcctacctcggcctcccaaagtgctgggattacaggcacgagctaccacgcccagcctggccaggctgttctcagactcctggcctcaagtgatctgcccaccctggctccccacaaagtgctgggattacaggcatgagcaaccgcgcaaggcctcctagaataatttctacatatctatcaggcagatactaatacacagacagacccattagacggattggacctttcattaggataattgaaaagggtcctgcggtgattaagataaaagactttgtgttttgttttctacccagtagggtgaagagggtggcacatttcttcctttaataaaggaggagaaaatgaaaagtgatttatccttactcctgcctttatccattacataatttctttgaagtttgttttatttgcctttgagaaatgaagtgcgattaacatttcatgtcttgttttagatactgaaacaagaatggcccaaacattggccaacttttatcagtgatattgttggagcaagtaggaccagcgaaagtctctgtcaaaataatatggtgattcttaaactcttgagtgaagaagtatttgatttctctagtggacagataacccaagtcaaatctaagcatttaaaagacaggcaagtaataattatgttttagaattttaaagtgatttctcaaacaatttcaagcagtttggatgtaaattgtagatattttaaggaactatgatcagtaatatgttaaattgcttgtagtggttttcaactgcagattaagaaatagtcctagacggggcctaataatttacctctgaaggttgaaaaatgaattgttcaagacacacttcaggaattgttttgtatggtaactagtttaataggttctaagcaaatgatttgtgtccaaacatacgtattagttattttattttattttgagacaagtcttgctctattgcctggggtggagtgcagcagcgcaatcttggctcaccacaacccccacctcctggattgaggtgattttcttgcctcagtttcccaaatagctgtgactgcaggtgcatgccacagagcctggcctcaaatcagttattgtctctgcttcttttcagttccccaattgttaacaatagtgttctttttaaaacaaaacagaaaactagatttgcctctaatagtaagcaactggtataaactatagttatacttccattaagttttaaacatttgttgtagtcattaggaaatctttttccccttgggttgcccaggctggtctcaaacaatccttctgccatggcctcccaaagttctgcgattacaggcatgagccactgtactgggctttaatcatttttattagtattatagataactgatacttatttctgtgtcttctaaatctgatatttttgtgtgtttttttttttagcatgtgcaatgaattctcacagatatttcaactgtgtcagtttgtaatggtaagtgtttttaatttcatttttaaaaacaataataggaaagcaattatttacaagtgtgttttgttataggaaaattctcaaaatgctccacttgtacatgcaaccttggaaacattgctcagatttctgaactggattcccctgggatatatttttgagaccaaattaatcagcacattgatttataaggtacagtgaatacatttcagttatttgtcaccggatagccacatatattcttttcacatgtaaagctctcatctctgcattctaaaccttattcaaccttgtttctaacacgaggacgctgctcaggagaaatttcccatattcacacctagtaaattatttaaagtgagtttcaaatctgattctgccacttagaccatgtaattttatgaattcattttgaacaatggatttgattatattgcttttagtttgagtaagttacagtgaggtaagtcaagtgctatttctgaaaaatgaaaagttcatcttttaactgataatttaaaattgataccatgttatggcttaagttctataatggtttagcctgggcaagttggtgaaaccggtctctactaaaaatacaaaacagccaggcgtggtggtgtatgcctgtagtcccagctactcgggaggctgtggcaggagaatctcaaactcaggaggcagaaggtgcagtgagccaagatcgtgccactgcactccagcctgggcaacagagcgagaccctgtctcaaaataagtaaagttctacagtggtttatccagagataatcactgttaccagttggttgtattatattttcagatgttttcttgactgatataatgaataaattaagtatctaattggaacattataacttgacctcttcaacttcgtagtttagtttggtaagataatatggatttatagtatttgaatgatcagtttattgcttaattatgtaaaaacctttctattgtcaacagtcctacagagaacattctcagacataagatattatgcaattgtccaaacattaatttatttaaatattttaatgtttaatcaccagattattaggtatgtttaattttaaggttttaatgccccctgatttccaaccccagacgataactgtttatcttctcaacaatagaatatataagccaattttcccatattcttattactcttagatacattgaccatttcccaaaattctaagcaatcacaagttttaggtcctgtgtaattacacagaaagtataacattcctaaaagtcatatcacagattctaggaaagttgttaaggagccttgttattttaggacacatcaaaagaaagcagtttaggccgggcgctgtggctcacgcctgtaatcccagcactttgggaggtcgaggtgagcggatcacgaggtcaggagatcgagaccagcctggcccaacgtggcaaaaccctgtctctactaaaaatacaaaaattagccgggcgtggtggcatgcatgtgtagtcccagctatttgagaggctgaggcaggagaatcgcttgaatccaagaggtgaggttgcagtgagccgagatcaagcccctgcatttcagcctgggcgagcgagactctgtctcaaaaaaacaaaaaaagtttgctcctaaagcatttactgtatactaggtaggcaataaaattccctctcagtatatctgcatgataaaatatgttcattcacttggcctgtttttgacatctacccctatatttaattgttaaagcctttttccttttaattgtgaattttaagtaaagtgtgtatcaggccaattaattttatggttccctccccccttttaaatagttcctgaatgttccaatgtttcgaaatgtctctctgaagtgcctcactgagattgctggtgtgagtgtaagccaatatgaagaacaatttgtaacactatttactctgacaatgatgcaactaaagcaggtaatataatactatcttgaaaattggctgaataattttagtgccttagaaaataccaaattccaaatgagttattttagaacgacgtatcaaagataagccataatcttttgtttattacataaaatttgtagtaagctacaaatttttatgatgtttccaaaaatttcttaaaattcaggtttggggtgtgttgtggtaatttatttctgcacactttaggagcttggtcttttgggagatacctgaccagacagtgggaaacctgggacttgttcctaacattgtgtctgaaggaattcttttcagccctagtttgattggttatctattaaatgatctagaaggttattcataatactgtgttcatggccaggcatggtggttaatactgtaatcccagaactttgggaggccagaatgggaggaccagttgatgccaggagttcgagaccagccaggacaacataaccagaccatacctacgaaagatttaaaaaatagctagctgtggtgttgcacacctgtagttccagctactctggaggctgaggcaataggatcgcttgagcctattaatacaaagttaaaatgagctatggtcacactattgcactccagcctggatgacagggtaaatccctgtctcttttaaaaaacaaggaaagatagattactatgtatgtttgtgatctgaatgaatgaattgattatttttacatttttcaatgtcagtgagaaatactagaaaaatttaaaggctgtgatagcggcctttaatttatttgagaagagtcaaaatctaagtcctagagatataagaataggtatactggacctaggagttctgtatgtggtttaatattagcaaaagggtgttgggatattagggcttaaaaataatagtgttggctgagtgcaatagctcagacctttaatcccagcactttgggaggctaaggtgggaggattgcttgagccaggagtttgagaccagcctggacaacataacaagataccgtctctacaaaaatgttaaaaataagcttagtgcgatggcacatacctgtggttccagctactcgggaggggctgaggaggactgattgggcctaggaggtggaggctgcagtgagctttggtcataccactgcactccagcctggacagagtgataccttgtctcaaaaaaataataataaaatattaagtgtctttagttgttttataaaatgcgaactgatcgtcccttttaaaatttgcagatgcttcctttaaataccaatattcgacttgcgtactcaaatggaaaagatgatgaacagaacttcattcaaaatctcagtttgtttctctgcacctttcttaaggaacatgatcaacttatagaaaaaagattaaatctcagggaaactcttatggaggtaagatatgtggagcttttgctcctaaaattctgctctgcctactaataactcttaaaagtgcctttttctaaaatgtatgtaccttttgagatttcttattacttaatatttgatcagtacattatatatattctcaattctgaattacagttataagcccagttttctgattttatgttctccataaagctaggactaaaaatttataatcaaaattaaattactaattattatatcatttctaaggttaaaatttcaaagaccttattttaaaatttcagttttaattcaaataacatgcatttgttcatttaaagatatacaattcatcgtgtaatcccagcactttgggaggcggaggtgggtggatcacttgaggcaggagttcgagaccagcctggcctacatcgtgaatctctgtctctattaaaaatacaaaaaaattagctgtgcgtggtgtcacatgactgtaatcccagctcctcaggaggctgaagcacaggaattgctttagcccagtaggctgaggttgcagtgagccaagatcacagtactgcactccagcctgagtgacagagcaagactctgtctgaaggaagaaaatgtctctctctctctctttatatatatatataaacttaagtatatatatatataaacataagtatatatatatatacacacacacacacaattcagtggcatattagtatatatacaatgttatacaaccattaatacctagatccaaaacattttcatcacccgaaggtgaccctttacccctaaaacagtcactttctcctttgttctctccccaacttctggcaaccattattttggtttctgtctctgtagatatatctattctgattataccatataaagggaatcatgcatgtgaccttttgtgtctggtttcttttatttggtgttgtgttttcaatgttcttccatgttgtaacctgtatcaatacctcactttttatcatgtctgaagaatattctcattgtatgaatattcagtattttgtttgttctctcctctgtgatggtacatttgggttgtgataccacttattggcacccaaggccttttaaataaatgtcgttccattaggagacatgataaaaatacatattgatcaactactatgtgagagatttttgaagtgctttagggcatgtcagaagaagcagagttactccagagtttgctgtctatttgataagtattgaaatctgagttgtgatgaataaaacatgaatttttattttcccttaaggtgtaacaagtgaaaagcaatttgaagttggtaatgtttaagaattattttaacagttttggtcttctgtgtaggcccttcattatatgttgttggtatctgaagtagaagaaactgaaatctttaaaatttgtcttgaatactggaatcatttggctgctgaactctatagagagagtccattctctacatctgcctctccgttgctttctggaagtcaacattttgatgttcctcccaggagacagctatatttgcccatgttattcaaggtaacagagcggttggttgagtgttcttcctgttgcatactgtggttttgaggtctgaatccaaatacttctaatctgtgtaaataaattagctataaaaagagaacccaacaacttctccatgagtgtggaaaactagaacatgaaaggagttgagtctagaaccttgattctcaagagtgtggtccttctctcagtatcaacattggttgtgatttcgttaggcaaattcattggccacctgccaatctactaaaccagagtctaggaatgagacacaggaaactcctgtaacagaagttggttaaaaaaatcacattaaaacacacttaaataattataaagccatttttgtagaattacagtgaaaaaaaattttttcttttggagacagggtcttgctctgtggctcaggttggagtgcagtggcgtggtcatagctcactacaatcttgaactcctagactaaagcaattctcttgtgtcagcctcccaagtaattggttgcaggcacacaccaccatgcctagcaaattttaaattttttagttttacttcatttatatttacatagttttttctgttgtgctttaagccccagtatttttattgttttagagattgggtgtcattttgtgttgctcaagctgctctcaaattcctggccacaacagttctttttgcctcggccctccggaatagttggaattataggcatgaatccctacacatggctggcttgtggtttttttggttttgtttgtttttaactaagcttctacactaatgatttcagtgatctaacgatttttttcttgattgatatattgttgagtataggtccgtttattaatggttagtcgaatggctaaaccagaggaagtattggttgtagagaatgatcaaggagaagttgtgagagaattcatgaaggatacagattccataaatttgtataagaatatgagggaaacattgggtaagttaataaatactgttaatctttacctttataaatctattctggggtggaaatacattttaggaaatgtacttgtagtttctaaatattttctaaatgtattgttactcatcaataaaattctgctcattatttgcatttgaaaccatgtttttctttgtagtttatcttactcatctggattatgtagatacagaaagaataatgacagagaagcttcacaatcaagtgaatggtacagagtggtcatggaaaaatttgaatacattgtgttgggcaataggctccattagtggagcaatgcatgaagaggacgaaaaacgatttcttgttactgttataaaggtatgcaagggataggtatgaattagaattgctaaataagtattatgttgttacaataaataatacaaatttgtcttatttacaggatctattaggattatgtgaacagaaaagaggcaaagataataaagctattattgcatcaaatatcatgtacatagtaggtcaatacccacgttttttgagagctcactggaaatttctgaagactgtagttaacaagctgttcgaattcatgcatggtaaatctctttctttactatattttgcttttatttttattgaagaaaataaatgaatgtttttgtcttgttagagacccatgatggagtccaggacaaaataaatgaatatttttgtcttgttagagacccatgatggagtccaggatatggcttgtgatactttcattaaaatagcccaaaaatgccgcaggcatttcgttcaggttcaggttggagaagtgatgccatttattgatgaaattttgaacaacattaacactattatttgtgatcttcagcctcaacaggtatgttaagcactgagcatatgttatttttagaaagtaacacttgtatcaatctgtatgtatcaatggaaataggagggcaactattggatccaatagaagtgtttctgattaaattttctttcttttttccttgagacagggtcttactctgttgcccaggcttgagtgcagtggcacaattacggctcactgcagccttgaactcccaggctcaggtgatcctcccaccttggcctcgtgggtagctgggactacaggcatgcactgccatcacactcagctaacctttttcccccccttggtagagatggggttttgccaagtggcccaggctggtcttgaactcctagcttcaagcgatacgcttgcctcagcctcccaaaatgattttatatgtgtgagccaccacgcccagcctggttaaattttcatagtgagacagattcttgaccagaagattgttaggctgttgtcctatgtaaaattattccgaacaaacaaaatcaggtgttttttgttttgttttgttttggggtgtgtgtgtgtgtgtgtgtgtgtgtgtgtgtgtgtgtttgttttttgagatggagtttcactctgtcgtccatgctggagtgcagtggcgcaatctcggctcactgcagccttgcctcctggggtcaaacgattctcttcctcagtggctatgattaacaggtgcttgccaccacgcccagctaatttttttatttttagtagagacggggtttctccatgttggtcaggctcatctccaactcctgacctcatgatccgcccgcctcggcctcccaaagtgctgggattacaggcgtgagccaccaccatgcctggccagtttgggttgtttgtttgtttgttttttgaggtggagtcttcctctgtcacccaggctcgagtgcagtattgcaatctcggctcactgcaacctctgcctcccaggttcaagcaattcaaacctcccaagtaactggaattataggcacctgccaccacgcttggctaatttctttgtatttgtagaagagatggggtttcaccacgttggtcaggctggtctgcaactcctgaccacaagtgattggcctgccttggcttctcaaagtattgggattacaggagtgatccactgcacctgggccaaaatcagtttcaagacgtttgtgaattgcttgtgtgtggttttccttattagggtgtataacataaacgttaaaatgtctgctttttaaaataggttcatacgttttatgaagctgtggggtacatgattggtgcacaaacagatcaaacagtacaagaacacttgatagaaaagtacatgttactccctaatcaagtgtgggatagtataatccagcaggcaaccaaagtaagtatttctaccttttcttaaaagttttcatgggatttaacaagacgtgttctttacaaatgtattgaattcaagccttttaacatgtatgtgtgatccataagtgcttttatgtgtgtctttctataatttattatctgggcgaggtgtggtggctcacgcctgtaatcctggcacattggaaggccgaggcgggcggatcacctgaggccagaagttcgagatcagcctggccaacatggcaaaaccccgtctctactaaaaatacaaaaattagctgggcgtggttgcacatgcctgtaatcccagctactgaggaggcttaggcaggagaatcacttgaacccaagaggcagaggttgcagtgagccgagattgagctactgttctctagccgagacgacagagcaagactctgtctcaaaaaaaaaaaaataaatgaaaaatctgggccgggctcggtggctcacgcctgtaatcccagcactttgggagaccgagacgggtggatcactaggtcaggagattgagaccatcctggccaacgtggtgaaaccccgtctctactaaaaatacaaaaattagccaggcatggtggtgggcgcctgtaatcccagctactcgggaggctgagccaggagaatggcttgaacccaggaggcggagcttgcagtgagtcaagagcatgccactgcactccagcctggtgacagaggaagactctgtctcaaaaaaaaaaaaaaatactgtaatttccattctcatttgatattaaaataggaataggctgggtgtggtggctcatgcctgtaatcccagcactttgggaggccgaggcaggcggatcaccaggtcaggggatcgagaccatcatggctaacgcagtgaaaccctgtctctactaaaaatacaaaaattagctgagtgtggcggcgggcgcctgtaagtcccagctactcaggaggctgaggcaggagaatggcgtgaacctgggaggcagagcttgcagtgagccgagatcacgccgctgcactctagcctgggcaacagaacgagactccgtcccaaaaaaaaaaaaatagaactatattacttcattcttaagtagatgtagacaaaaaggcgtttgtgttcgtttttaccatttgggattataaatatggtttagggtaagggaagcgtaatggcttttgctttggtaattatgtggattttttttttttttgagatggagtttcactcttggtgcccgggctggagtgcaatggcgtgatctcggctcactgcaacctctgcctcccgagctcaagcagttctcctgcctcagcctcccaagtggctgggattacaagcaagcaccattgtgcctggctaattttgtatttttagtagagacagggtttctccatgttggtcaggctggtcttgaactcccgacctcaggtgatgcacccgactcagcctcccaaagtgctgggattataggtgtgagccacctcgcctggccattatgatggataattctttttttttttttgagacggagtcttgctctttcgcccaggctggagtgcagtggtgcgatctcggctcactgcaaactccatctctagcgttcacgccgttctcctgcctcaacctcccgagtaggtgggactacaggcggctgccaccacgcctggctattttttttgtatttttagtagagacggggtttcaccgtgttatccaggatggtcccgatctcctgaactcatcatccgcccgcctcggcctctcagagtgctgggattacaggcgtgagccactgttcccagccgtggataattcttatatgataaatggaatttgctttttttcctccaagaatgtggatatactgaaagatcctgaaacagtcaagcagcttggtagcattttgaaaacaaatgtgagagcctgcaaagctgttggacacccctttgtaattcagcttggaagaatttatttagatatgcttaatgtatacaagtgcctcagtgaaaatatttctgcagctatccaagctaatggtaggtgattctgatttcttacacaatgcagtataaacaaaccacttctcttctactgccttaagtcaaacatttgatgttttttacagatttaaatcagacctcccatttcccaaatgaccctagacatatttaaaacagttaagtgtacctttcccttttaaaattagtcttaaagcttattttcccaataaattttgtgaacttttggctttaaactttttaatggtaaaatggaattgcatctaatgtacacctgagtaccactgtataagtttagtggtaaaattagattccatttgattctgttttgtaggtgaaatggttacaaagcaaccattgattagaagtatgcgaactgtaaaaagggaaactttaaagttaatatctggttgggtgagccgatccaatgatccacagatggtaagtgagagatgctttgcttttgatttctagtgttgatgctgtgttttatggaatatgctatactctattatgtgcattttgctaatttaaagcatatcaactttgtggttattttatggcattttatttattgtagtccttacgttaatatactaatagctgtattccatcttcaaaagaaactgctgttaatcagtagcgaagggtggtgatatgtaacaagatagctaagaaaattgggtcattttatgtttccatagataggttaggaggatttaattaatggagtaccggtgcagtttttgcattcctcttgatttttagaacaattgctagagctacaaagttgtcattactttacctctttagcaaagtgattgcttcccagattaaaggcctgaaagtcttttttacaccctttttcctaaatgatttgcagaaaaggaaatcattttcagtaataaaaaccagctgcgtatgcctcaacttgtaaaattgtgaattagttttaggttttaactgtatcgtttcattcttgttattcaattgagccttgggagagtccaaaaaattctaatactactattacttggaatagtgttggttttttgttttttggtttttttttttacaagtgtgctagttattttcatagttttgaaatttcagtattgtttcttgttaaggaaatacttttcagtaaacttgttctgaatataattcttgtggaatacttaagttggctaacctaaatatcgaaaggttctgaacatgcgtattatgtgaacagaactgtatttaaaatttgaaagcagaaagtaagatgtattgaaggaattgtgatgtttgtaatttacaagaagcttgagcacgtgtcgggagcacagtgggaataatacaaagggtatcatcttttgtaacattaatgttaaagtttgggatatttgttcacatgaaacattgtgtttattttccttgtcttggcttttcacggtggctcatgcctgtaatcccagcactttgggaggccgaggcgggtggatcacttgaagtcaggaggctgaggcaggagaatcacttgaaccccagaggtggaggtgacagtgagccaagattgcgccattgcaccccagtctgggccacaagtgggaaacttcgtctcaaaaaaaaaaaaagaacaagaagttactctttaagtataactcagtttacttagaatcatgaaaatcttactgggcattgtagcatgcacctgtaatcccaaccaccagggagggtaaggcaggcgaatcaccccagctcaagtccagtttaggcaacatggcaagattcagtttcaaaaaaataatagaaatccatagtctttcttattttctgagagtaattgattgatgttatttctgcttgtgaaaatactcaccagttagcattcattagattaaaacattagtctgagttgggtggatcacgaggtcaggaaatcaagaccatcctggctaacacggtgaaacaccccgtctctactaaaaatataaaaaattagctgggcgtggtggcaggtgcctgtactcccagctactcgataggctgaggcaggagaatggcgtgaacctggaggcggagcttgcagtgagccaagatggcaccactgcactccagcctgggcgacagagcaagactccgtctcaaaaataaaaagacagtattgagggctcgcttgctgccatcttacatatacagtatacgtagaatcctgattctgccacctaagttggagacacccactgaattttgagcctcacttttcttattgtgagagttttgtagctgggcatggtgctatacctatagtcccagctactcaggagactgaggcacaagaattgcttgaacctgggaggtggaggttgcagtgagcagagatttgccactgcactctggtctgagtgacagtgagactgtctcaaaaaaaaaaagtcttgaatgacagtgtgtccatgagacttcccaacccattgtgatttcctgctttcttttgctaaaaactgttttgacgtaggaaaccctaatacaaacacaagattttcctgttttcagtagatgatcatgctacatctcatagacaggaataaccttgttgtttaaaatagtcaccatgtacctaaattaaaacataacttttttttccctccccaacaggtcgctgaaaattttgttccccctctgttggatgcagttctcattgattatcagagaaatgtcccagctgctagagaaccagaagtgcttagtactatggccataattgtcaacaagttagggggacatataacagctgaaatacctcaaatatttgatgctgtttttgaatgcacattgaatatgataaataaggtgtgtaatatttcagttatgtaagggggaaattctgcaggatagccttaattcttgaaagctaaagtatgtctgtggatataacataattttaatgccatggagtttaaatatttaaacttgtatattagggaaatactttcttggttttcaagaacttacttcccaggagtttgaaaccaacctgggcaatatagtgagacttcatctctacaaaaagttcaaaaagtaaccagtcatggtggcatgtgccggtagtcccaactactcgaaaggctgaagtgggggggggggtcacttgagcctgggagttcaagatggcagtgagctgagattgcgccactgcactccaagaagaagaatttactacacagaatcttgattggtaaaaagtaaatatggaaaacagattttagcattcacatggtatgtagcatttattgaaacctcataggtcggggcatccttttatgaacgtagttgtattaattggtttgaataaatgagaaagtaagtctgcatgtttcaattataaaagtgtagtatatgcttataagaaactgaaaaatgtgttaacaagagaaaataggctggccatggtggcttacacctgtaatcccagcacttcagaaggccaaggcgggcggatgacctgaggtcgggagttcaagaccagcctgcctaacgtggcaaaaccccatctctattaaaaatacaaaaatggccaggcgtggtggctcaacacctgtaatcccaacactttgagaggccgaggccggtggatcacctgaggtcaggatttcaagaccagcctgaccaacatggtgaaaccccatctctactcaaagattaggctgggtgccgtggctcacgcttgtaatcccagcactttgggaggccgaggtgggcagatcacgaggtcaggagatggagaccatggtgaaaccctgtctctactaaaaatacaaaaaattatccgggtgtggtggtgggcgcctgtagtcccagctactcggagaggctgaggcaggagaatggcatgaacccgggaggcggagcttgcagtgagccaagatcgcgccacgcactccagcctgggtgacagagcaagactctgtctaaagaaaaaaaattagctgggcatggtgccgcatgcctgtagtcccagctactcgggaggctgaggcaggagaatctcttgaacccaggaggcggaggttgcagtcagctgagattgcgccactgcactacagcctgggtgacagagtgagactgtttaaaaagaaaaaagagataaaagatacgttaagtggacacatttacacggtaacttaaatttttttgtaatctgtagtggtgatttcaaattaaaaacaaaagtgatagtagtagtcttatggtaataatggtttagatgagttctctattaaaaaggttgtctttctccttcaatttgataactcatgtgcgtaacgggacagtttcattttccgtgagaggtggattgtattttacttgggtttacctttcaggaggcattctatcttctgtggtttattgaaaactccaaatatttatactggattaagccttgcttttcccctcctgtctagcacaacaaagacactgaaacattattttgtttccaccacttatttttaggactttgaagaatatcctgaacatagaacgaactttttcttactacttcaggctgtcaattctcattgtttcccagcattccttgctattccacctacacagtttaaacttgttttggattccatcatttgggctttcaaacatactatgaggaatgtcgcagatacgggtaaataaaagatgttcttttattcatttgcctgccaatccaaaaatacaaatatagttaattgtacataggaaggtattacttgttcagagttttgagtgtgtgaattacatatatgaacatctgagaaaatcctataagcagtttaatcaactgttccactccactccaagtgagtccataggcagaattgagttatggggagagcggcctagtaataattggtttgcgtaatacaaagttctactgggtagtgatgttgtagaagttcatatagaatcagctgagctttcagaaatggtgaaagggtggtaatagtcataacttagattgtaatttttttcccataggcttttaaaaaatattcatgaggttctttttttatttcaatagtttttggggaacaggtggtttttggttacatgaataagttcttcagtggtgatttctgagattttggtgcacctgtcatgtgagcagtatgaactctactttatgtgtagtcttatccctcatgtgtatgaactccaccttatgtgtagtcttatccctcacccactcctgcccttccccacaagtccccaaagtccattatatgatctttatgcctttacatcttcacagtttagctctcacacaacttattataatttataagtaagccagcattggatatagttgtattccattattaatttaagaaaccttatgcaagtaattattagtcatcatcccaaaaaaaagggagaacagggttagattcagaatactttgataagagctaaatactatcatgagtgctgtcagtctgtagtaactttccattggtattctatgtcttttaggcttacagatactttttacactcttacaaaatgttgcacaagaagaagctgcagctcagagtttttatcaaacttatttttgtgatattctccagcatatcttttctgttgtgacagacacttcacatactgctggtaagaatttaatacgatttaaatgttaagtgccagctgggcacagggcctcacgcctataatcccagcactttgggaggtcgaggcggggagattatgaggtcaggagttcgagaacagcctggccaccatggtgaaactgtctgtactaaaaataccataaaaaaataaaagatacaataaaaatactgggcatggtggcatgtgattgcaatcccacctattcgggaggctgaggcaggagaatggcttggaccgaggaggcagaggttgcagtgaactaagattgcgccacggcattccagcttgggtgacagagcgagactccgtctaaaaaaaaaaaacaaaacaaaaaaaaacgctaagatctatagttatattacattttggagttaataattttcttcttatcaacaggtttaacaatgcatgcatcaattcttgcatatatgtttaatttggttgaagaaggaaaaataagtacatcattaaatcctggaaatccagttaacaaccaaatctttcttcaggaatatgtggctaatctccttaagtcggccttccctcacctacaagagtaaatataccttttaataaacgtagaatgttcctggtcgggcacagtggctcacacctgtaatcccagcactttgggaagcctaaggtgggaggattgcttgggcccaaaagttggagaccaacctagacaacaaaacaagatcccgtctctacaaaaaaaaaagtagtcagaagtggtatgcatctgtaggaccagctgttggagaggctgaggcgagagggttgtttgcatcctggagtttaagactgcagtgagctatgatcgcaccactgtacaccagcctgggtgatagagtgagaccctgcctctttaaaaaagcaaaaaaaaaaaaaaaaaaaaaaaggccacgcacggtggctcatgactgtaatcccaacactttgggaggctgaggtgggtgaatcacaaggtcaggagttcaagaccagcctggccaagatggtgaaaccccgtttctactaaaaatacaaaaaattagttgggcatggtggtgggtgcctgaaatcccagctacttgggaggctgagggggagaactgcttgaacccaggaggcagaggttgcagtgagccgagattgtgccactgcactccagtgtgggtgacagagcaagactgtctcaaaaaataaaaaggctgggcacggtggcaaacgcctgtaatccaagcactttgggaggcctaggcgggcagattacctgaggtcaggagtttgagatttgcctgaccaacatggagaaaccctgtctctactaaaaatacaaattagccgggcatggtggtgcatgcctgtaatcccagctacttgggaggctgaggcaggagaatagcttcagaggttgcggtgagccgcgattgtgcgattgtactccaacctggtaaacgagcaaaactttgtctcaaaaattaaaaaaaaattcttgattaaaaaaaaaaaacattattgggacgctgaggcaggagaatgtcttgaacccgggaggcagagattacagtgagcagagatcatgccactgtactccagcctggtgacagagcaatactctgtctcgggggaaaaataaatcattatttaatcattgtgttttgatttgcagtgctcaagtaaagctctttgtgacagggcttttcagcttaaatcaagatattcctgctttcaaggaacatttaagagatttcctagttcaaataaaggtatgtatttatttgctcttgcagaaatattaggggtagatgtgaccacttttatgttacattgtagaatttttatcacttgatttgtcatgccaaataaatggggtttcaagataatacgtttacacaatctctgtaatcaaaaaacctgagactggtaatacagtgaaaaactaaagtccaataaggatagatatgtttgagatgttattcggataaacttattactaatgtaattcattttaggtagtcttaaatgtataatggaatattgggtaagaaaaacgttggtagttctttttataattttataccaattttgttagttgagggaacttgtgaaagttactagatagaatgtctttcttctgctgttatacagtgctttattcatacttttgggaagggtttttctttgaacatcttgctttaaagaaatttggaagtactgtgaaaccctaagtagttgatgaatagtttatccatgattgttgaataagaattagtctcttagctcttaaatattttctccaaaatacaaaggttttttttttttactgtaaaaatattagccaatttttaaaaaactaatgaaagttacctaggctgggcgcagttgctcatgcctgtaatcccagcactttgggaggccaaggtgggtgggtcacctgatgtcgggagtttgagactagcacggccaacatggtgaaacccccgtctctactaataatacaaaaattagccaggcgtggtggcgcacagctgtattcgcagctacttgagaggctgaggcaagagaattgcttgaacccacgaggcaaaggttgcggtgagccgagatcacgtcattgcactccaacctgggtgacaagagtgaaacttcatctcaaaaaaaaaaaaaaaaagttaactgatagctacgaagtcaatgataatataactaaacttaatttaatgacagttattaattagccttaggagaaacatctttcttggtatcttggcatatgaagaatttttagctgggcacagtggctcacacctgtaatcccagcactttgggaggccgaggcagacagatcagttgaggtcaggagttcaggatcagcccggccaacatggtgaaacctcatctctactaaaaatacaaaaattagccaggtctggtggcaggtgcctgtagtcccagctactcgggaggcagaggcaggagaatcacttgaacccaggaggcagaggtttcagtgagctgagatcataacactgcacgccagcctgggcgacagagcaagactgcctctcaaaagaaaagagaaaaaagtgtctgggtgcagtggctcatgcctgtaatcctagcactttgggaggccgagacaggtggattgtctgagcttgggagtttgagatcagcctgggcaacatggtgaaactacgtctctagtaaaaatacaaaaaatgagccagatgtggtggtgcctgtaatcccagctgctggggaggctgaggcaggagaattgcttgcatcttggaggaagaggttgagataatgtgctggggctacagaacaagactctatcacaaagagaacaaaatttgtgtgaatacatagtaggtgtatatacttaggggatgggatgcatgagatacttcggtagaagcatacaatgcataataatcacattgaagactatttactgtaaggtatcacaccattttttttgttttttttgggggggcacagtctcgcttttatcacccaggctggagagcagtggcgtgatcttggctcactgcaacctccgccatgcaggttcaagtgattctcctgcctcagcctcccaagtagctgggattacaggcgcctgtgccaccatgcatggctaattttagtaatgacagggtttcaccatgttggccagggtggtctcctgacatcaagtattcttcccgtctctgcctcccaaagttgggattacaggcgtgagccaccatgccggggcccatgattcttttgtaatcttcccccccaccagttaacaggtttgcagttcattcagctatgtagtatactgtgtcactatcctataatttaaaacccagccactttatggataatttatattccttccttctctaaaaaggaaattgctcatctatgatttctttctttgcaagttgaagtttattgcgttgacatttcaactatctgttttcacaggaatttgcaggtgaagacacttctgatttgtttttggaagagagagaaatagccctacggcaggctgatgaagagaaacataaacgtcaaatgtctgtccctggcatctttaatccacatgagattccagaagaaatgtgtgattaaaatccaaattcatgctgttttttttctctgcaactcgttagcagaggaaaacagcatgtgggtatttgtcgaccaaaatgatgccaatttgtaaattaaaatgtcacctagtggccctttttcttatgtgtttttttgtataagaaattttctgtgaaatatccttccattgtttaagcttttgttttggtcatctttatttagtttgcatgaagttgaaaattaaggcatttttaaaaattttacttcatgcccatttttgtggctgggctggggggaggaggcaaattcgatttgaacatatacttgtaattctaatgcaaaattatacaatttttcctgtaaacaataccaatttttaattagggagcattttccttctagtctatttcagcctagaagaaaagataatgagtaaaacaaattgcgttgtttaaaggattatagtgctgcattgtctgaagttagcacctcttggactgaatcgtttgtctagactacatgtattacaaagtctctttggcaagattgcagcaagatcatgtgcatatcatcccattgtaaagcgacttcaaaaatatgggaacacagttagttatttttacacagttctttttgtttttgtgtgtgtgtgctgtcgcttgtcgacaacagctttttgttttcctcaatgaggagtgttgctcatttgtgagccttcattaactcgaagtgaaatggttaaaaatatttatcctgttagaataggctgcatctttttaacaactcattaaaaaacaaaacaactctggcttttgagatgacttatactaatttacattgtttaccaagctgtagtgctttaagaacactacttaaaaagcaaaataaacttggtttacattta

SEQ ID NO: 15887 - DNA, 36621 bp, Homo sapiens
ggctttccttcgctctcttttctactcatccctgctcttcgtcccacctcctcctcctccacccctctcctcttgcctttcgaccctccccacttcccctcccccactctgcgggcaaatcgctgctgaaaagaggtaggggccgaagcggcgggctcgtgtggagccgtgaggcgggattgactggcgctcgggccaatgagagataggctcatggcgcggctgtagctggaactgaccaataggagggcgggctgggggcggaggcccaggttccaaacgctccgcggcgccatgggctgaaaactcaaccgagatggaatctcccagtctgaaccggtttcaaccggttccgagtttgaggcactaggaggagggggagaagcggctgcagcggccgcggcaggagcagcgggagctacagcatcagcaagagcaacagtagctacagccccggcggcggtgcctgttccagtctttgctgctgcagtccgtgcaaccacccagagggggaggggggaaccaccagtcgctgaggaacaagagaaggggggaaagtttaggcgagccttgggggggggggggccagcgccggagccgcgtgagagagggagccgtgttttggtaggggggagtcggactgcaactggcagcagagcgtctccccggccgtgtggactctacaccccctactcctgccgcttctgctgctgcctgtggctggagggtccccctggggctgaatctttgggacttgaccccgttccctcccccttccctcactccccagccgggcgggagcatttattccccagattaattccccttttgggggggggcgggtgtgtgtgtgtgtgtgtgtgtgtgtgtgtgttgggggaagcgtccctgaaatagtaaatattattgagctctttttgcccttttcctgtccgtttttttaatttccttttttgaggtgggaaaactgaaacccaccttgattcgtcccctctcccccctccccaccttccctcgccctaatcccccaacgaggaaggaaggagcagttggttcaatctctgggtaagtcgactgtgtcttcggggccgagggtcgggcggcggcgcggccgggcgggcgggaggaggccggcgtggggcgcggcggcggcggccgcgggaagcgagcccgggaggcggcgggcgggccgggggcgcggcgggcccacagcggagcctgcgattgaatggagccgcttttgccgctgggggatggaggcggggaggcggcctcgggaggggagcgcttgctgggtcattcgcgtgtgcgggtggcggtggaggaaggcgaggagtgtgatagtgaagcggggccccgcgcggggtgggaggggttccccagcccctggggctggggagaagttggggtgatttcaggaacatctctgtaaattattaggagtggaagtttccagaaatatttagtgcagcagcattgaaacgtccgcctgcatcacgtggccccctcggtggagagcttgggatgggggagggaggggctgccgactccctgttcctccagcaaggaaactcgaaagctctccggttttgcagagtggcatgtgaagtaggaaagatcagtttttcaggggcctgcacatgggattccgtcttgtagttccttttcaggggtttgaatgtgataagttggttaaaccatttactgttggccttgtacagtggaggatgccctgattctccttcattccgatgtctgtgagtttgggttgggtgggaggaagtggtgtagtagaggaagcattcagtactggctcagcccggacctcctctgatcacgccgaggccatgctgcatagagaaaggggcggtgaacttaaggcgcctggtctaaatgcctcctccgagtaagggcggggtgagtgcgtgctcctgtgtgctatagttagaagggctgcaaatcggttcgggtgggaagcgaggggagggcgggccctaatgaggtgtgtttttcctgaatgaagcgggcgattgcccacacaacctaaggagcagtctttcgccttgtagcgacttgtttttcacctagtgtgaagttattaagcaacggttatgattttctgggttttgtttaggaattggcattgggtgtcacttgtagagtcacattatccattaagctggataatccctagtgtatgttatccagtgagtggattttaggattgaagagcccaatgggaatgagcgttcgtggttacacctctcgcactatggcttgtttgctgtctgattgtatatcttaagtgtgggacactgctgttagtggaaagaatgttttggaagcggtttgatttgggggactaaatgtgcttggcattgaccacaaagccgccatttctgtactatgtacagttcaggaataggtaggtgatttcgaagatagccgctagttctaaggatggcaaactactgtatttaaatccttctattctaaatctcgtttttcacatcagtctagttcggagaattttataagaacagtgtatttgaaaatgaaacttgtaagagtcattttcttaatccttttttgttttagcattcaactatggtagtaaataggtgaaaagtttgttcaatatttaaccgaaatatttgaaaacttttgatacatggatcttggtgctttgtggacattgcttttaagcctcaaataattaagattgttctgatcttttaaattttatggtacttgaaggtggaggagagtttacacattcatttgtggaatatatatttcctctcagtatttagatcttaaggtttttttgtggtgtgtaacaagtattctgctgtttaaaaacgtttgtttaatgcctactacgaaacgttttgaagtctcatcagttttgtcaataatggaccaattcttgaactcctaatttcttgagttttacattatttttacatcatatcaatcataggtgactcatcttttggagttctaatctgttgtaacagacgttatatttaaataagacaattgcattaaaatagaatttgctgccattattgttatggacatttttaagctgttataaaatagccaggaattaatgactttttttccgccctgccaagctagtttgtctaaatataatgtaaagaaattagctactcattttctggtccacgaaagttcctaaaatgggaagaagtggagatctgaccttgttagttctaaatacactaaactgggagtgccatggatggctttcaggatgtcctgaatcctctataattgtatacaaaatcgtgagtttttaaaaactgggttagagctattggttcctcagagtctcaggcatcttagacccccaaaaaggttaaggactactgacttaaccaattaggtttgagtggcattggctttgaagaaaagcagaggaaagatatattttataattctgggcaacaaaaaagtggatgtgtgccagcatcttagagtagaatcctcttaaaaggatagcactgcatatgaactagtaggttttaaccagtgcatatttaggcgaagtagctcatttttctgttagaattcttttttatttgggaatgggcaagcttttacagcttttaccttgccaatgaatacctggaatttaaaaaatcttgttaggcatattgcccataaagttttttttcctagatcatatattcagtaaatatgtttgtagctttatttcaatcccccaattcattgagggttgaaacaatttgaatggtttgagtgtagaagctaagttatttctgtagaggctaagggcatttataccaagatatgttagacttgtggttcctgctaaccattgctgtagacaataggaattactgtatatccacattttaatttttaacatcattctgtctttgtttgtttgtttttgagatggagtctcattctcttgcccaggctagagtgtggtggtgcatctcggcttactgcaaactccgtctcctgggttcaagcagttctcctgcctcagcttcccaagtagctgggattacaggtgcccgcctccatgcctggctgatttttgtatttttagtagagacggggttttgccatgttggccaggctggtctggaactcctgacctcaagtgattcgcccacctcggcctcccaaagtgctgggattacaggtgtgagccaccacgctcggcccattctgtctttatagcattatttttataaagttaagataatgtgaagtgagcttttactgagttattcagaagaccctacttgggaagaaaagaaaatcacattcacttgaacttaatcctacttgcttaaaaagttttgacatcaagatactgaactgtatcacgttttaggaccataaaatcctaatagtggatgcgtttaaataataggttagcatactttataaatgttagtagaataggaaagtcttcctggtgtataaactaaacactagaaaagttgaatggaccataataatttatgtaattatcaaatagctaagtaatttcagcttttgttacttgcttttactatctcagttttctgtaattaaagtctctaaagtattcattaaaatatttgtaataacatggttgaagtaaaataacttgtaggaagtttttgataataccaaaacttgataggcagcttcaattttttttctttattttcagtaatctatgccagcaattatgacaatgttagcagaccatgcagctcgtcagctgcttgatttcagccaaaaactggatatcaacttattagataatgtggtgaattgcttataccatggagaaggagcccaggtaaagtagccaaccaaaactttataacattatgacagtgtaacagagttgttgggtttagaataaaattttaaattatcacctttaaaaaagatattccatagtttgcattaatttggaattctgtattaaccataatgaaaattggtttggagaaagaaattgcatgtttgacatggttagagtgggttgttttggaatattatacttgttttgtccttaagagccaaatgttattaaatactttgtaggtattaaaggttctctgtacttttatatatacttaatatgtttggcactaatacgattcttctacttttaaaacatttacagaagtacttcacagatatgtttgtttaaataaaaacaggaataccaagtatttttatgttagttgaattttgtgcacttttcaaagtggtactgttaatgtagggaattatcttaaacataaaccaaattttgatcagtttaagatttttggtttttttgaacccaactaaaaggtgaaacagaaatgtgtgtacaattttaaattgtatatgtcacaagaaaaaaaacttgattttttacctgtggggccaaacttttttttgagacagtctcgctctgtggtccaggcaggagtgcagtggcgctatctcagctcactgcaacccctgcctcctgggttcaagcgattgtcttgcctcagcctccctggtagctgggattacaggcacacgccaccatgcctggctaatttttgtatttttagtagagatggggtttcaccgtgttggccaggctggtcttggaactcctgacctcaggtgatccacctgactcggcctcccaaagtgctgggattacaggcatgagccaccgcgtgctggcccaaacatgtttttgaatgagtaaaaagttttgcagttgggtcagaaatcttttttttttttcagatggagtcttgctctgtcaccaggcctgagtgcagtggcacagtctcggctcactgcaacctctgcctcccaggttttcaagcaattcacctgccttagcctcccgagtagctgggactacagacgcgccaccatgcccagctaattttttgtattttagtagagatgggtttcatcatattggccaggatggtctccatctcctgacctcgtgatccgcctgccttggcctcccaaagtgtggagatgacaggcatgagccaccgcgcctggccagaaatcttttatggtagttttgttgccagaacagtagatttctggttagataaatgttcagctagtagatgggaggttacttatattgtcaagatatttatatttgcataattaagaaactgagtgccggccgggcgcggtggctcacgcctgtaatcccagcactttgagaggccgacgccggcggatgacgaggtcaggagatcgagaccatcctggctaacacggtgaaaccccgtctctactaaaaacacaaaaaattagccaggcgtggtggcgggcgcctgtagtcccagctactcgggaggctgaggcaggagaatggcgtgaacccgggaggcggagcttgcagtgagccgaggttgcgccactgcactccagcctgggcaacggcatgagacttcgtctcaaaaataaaaataaataaataaaataaaataaaaaaacctaaacctgagtgccattacactttctgaaaatatataaggtggatacagtactatcttttatagtagtccaaaaagcatcatgtataaatgtttccattcccttatgaaatgcaacagtactgcttttactatagtagaaacttgaaaaaggtccatggaaacgctaaaagtagaaaaaattactcttgcagtgattctgtaagcttgttagcccaggtttatacttttagggcgttttgatcagtatattatctcctaaagcattcttgaaaaaattaaccatccgtatttattatccctgtcatttagttgttactcatgctatacattcaacatgaagctttaagcttcatttcttctagcatggatgcatagaaagcagctgcttttggaggaagctatgaaagtaaggttgggttcaactctgaatgtaatattggaagcacaggtctgtagccattgggaaaaagggcatttaattttttccgcatagattcagctactaatactgtttaatcttcacactaaactagttcactacatctaaaggtatgataaataaaccaacatagagcagtgttcttcatggcttgtaacagaattagtggcaatttttgtaattgagaatatattacagcaatactgcttttaataatgtttcatagtattaagaaatttaatggtttgttttaaaattgacttgttaataaaaagtagattaagaaaagtgtttctaaatttttttgtttgtaaggacaataggttaactttcccaaagtaaaaggattttgtctgcagtagttaatagatcatgtgacaaaatcagttgcgtagaaataactagcaaacttattttgtattataaatgaagaaacaagatttagagcttaaagctggttaaggagtccttttggtctctaaaagtcctatgtcgttagttcagtctacttttcgtttaccacctccttgggggtcttatttcaaaggaaaaggagtagtagtagcagcgagctgctatagtggaaaacatgatttttagtgttagacgtcttaatttgattcttggaagctctctctagtcattgcttaagtcccatgtacaaatatgacctgtcctacaagagattggagggttagttatgaggtttaaaagcacctattacagtgcttgataggtagaaggcactcagcttaaagggtacatttagcagtataatgaaaatgatttagcatatgtgatactcattgcttaaaattaaaaaaattttttttttgctactcataaaatatgcactaatgacaagaaaaatttattatgctaattaagcttttaaagtcaactgggaaaaaaagctgtaggtaggtttttttttttttaaaggaatgtgtaacttgggggaggggaagaaattatttacaagggtgacttttaatctgtagacagaacttctgcatacatggttagtatagtaggatatttagcagtgtaacattaggactaccctctaccctctgttatcagcatttttctatttttagccaagtagacagctagaaaaaagatgcgggaagagttggatgttttctccaatattgtgttctgttaaagatcttgaactctattgcttagcaactaaaatgctttcaccattcagttagtagtacaagggagatgctaggttttctctctttagtttgcttttgtgtcttttttttttaaacccctgctggggttttaagtttataaagaacattatgtaagaatggtgggattagaataaatcagaatgcaaatactagaagtagcatcagagagtaaaattacaactaacaggaaagaatattatttatgtagcgattgatgtgagtggtgatagtgtgggaagtatttgattctgtgtagaatgcttatcacttcaaagcatctgacaaaatggtaacttgaccaagtaacttttactgtgtgaggatctttgatacaacttttcctctagttagataaggttatctagctagatattctcagggagaagaccaaaacactgctaaaatgtgctttggccctagataagccacatcattattctttcggccttctgtcatttctcatatgacacattatgcccatcagtcctttaatgaaatcaaatagaaatgtgtatgattgtattttaaagtatacacattaactcttgtaaccacagactcacaatggaagcaggcgtctgatcttttcaggcaaccacagtggttctggtgggtttctgggtagagaacaaccatataagttattgagtgtgtagcagtgtgttttcctgattgatgtatgggatagtcatgaatgtggtattgtatttcctacctgaggaaaaggtcatgattaaaataaagcatcaaagccaggataagcatataatttctttctttttttttttttttgtaatgagacagagtctcactctgtagcccaggctggagtgcagtggtgtgatctcaaatcactgcaacctccgccttccgggtcctggttcaagcaattctcctgcctcagcctcctgagtaactgggattacaagtacgccccaccatgcccagctaatttttgaatttttagtagagacggggtttcaccatgttggccaggctggtcttgaacttctgacctcgtgatccacccaccttggccacccaaagtgttgggattacaggcgtgagccacggtgcccacccgagcatacgattgttttaaaaaagactagaataaaagccaagctaaagattataaggtatctttgtcagaaatggttgtgagagtgcttcctaccctgtttttgatgctttattgtttataaccatagaattaaacccatgataaagtaaagtataagagaaagataactgacagattttaaagtcatcaaacttttttcttgctctgtcacacaggctggagcacaatggcttgatcacagctcactgcagccttgacttcccaggctcaatcttcccacctcagcctcctgagtagctgggaccataagtgcgtgtcccaccacacctggctcattattaatttttctttgttgcccaggctggtcttgaactcctgggattacagacatgagccaccacacctggtccaaactttttgcttacaacttttaatagaaataggtaaaagaaataggaaggatctaattgagttataaaacaacctttaaagatacaaaagtgaaaaagattaagccattgctttttgtcaatagaattaaaagctgttggtaaaaatattaatgtatgaaaaacttattgaaatgaaaaaactatatatatatatatatatatatatatatatatatatatatatatataaataaaatgtcgacatggctggatcttaaaaactgtcaaatgaaaaaaactaattgcaggaaagattttttttttttttttgagagggagtctcacgcagtcaacccaggttggagtgcactggggcaatcttcctgattcttggggaatcttggctcactgcaacctccgctcctggattcaagcgattctcctgcctcagcctcccgagtagctgggactataggcgcacgccaccattcccggctagtttttgtatttttagtagagatggggtttcgccatattggtcaggatggtcttgaactcctgaccttgtgatctgctcacctcggcctcccatagtgccaggattacaggcgtaagccaccgtgcccagcctaaaagatttttaagtatactattaacataaaatttggtagccgtacaaccctattcatgaaatttacacacatgccgtgaaaatgtggacaggaaaagacacactaagttcatgatgaaagccattactttttaaagaaggaacaaaggtgtaatcccagcactttggggaggctgaggcaggcgggtcacgaggtcaggagttcaagaccagcctggccaatacagtgaaaccctgtctctactgaaaatacaaaaattagccaggcgtggtggcaggtgcctgtagtcccagctacttgggaggctgaggcaggagaattgcttgaacccgggaggtgaaggttgcagtgagtcgagatcctgccattgcactccagcctgggtgacagagcaagactccaactttaaaaaaaaaaaagagagaaaaaaggaataaaggaaggaaatggcactagggaaaggcacaaagatgacttccataaactttagttattttatgctaaaagaaaatctgatacaagcacaagatgatgactacgtagattagtatttctgggttgcatgttaaaaatatgaaaataaaaacggaaatagtttccaaaacaaagattttatatatgaaattagtgaaatttcagaatggagaaaggatggttacaataaatgttaggagccctctttaaagagctcaaatggtatgtaagtatttgggatttgtggtttaattagacctagttttcagcagtctttccatgaaatgtatttttgtatttagagagatcttggtaactcttgtaaagcagagtgtcctgctacattacataacttacctaagtaggtgtgcttttttttgtttttctagagacagggtctctgctctttcacccaggctgaagtgtagtggcaccatcatagctcggtgcaaccttgatttccagggctcaagtgatcctcccatctcggtctcctgagtagttaggactataggtgcaagccaccatgtgcagctttcttttttttttttttttggagagtcatggcctcgttacattgcctgtcacctagactggccagctggtcttgaacccctggcctcaagtggtcctcctgcctcagtctcccaaagtattgggattacaggcatgaaacactgctactggcctagataagaatttttatattgtttttggttgatttaagtgctgagaacttatttgcttcagaatagatctttggttgaaatgcagttcagttttgagactaaaaaataaaccagatttactcccaaaaatgttactgtttcaaataagtaaaatatttgcacctttaaagattaggagttggctgggcatggtggctcactcctataatctcagcactttgggaggccaaggcaggcagatcacctgaggtcaggagttcaagaccagcctggccaacatggtgaaaccccatctctactaaaaatacaaaaattagctggctgtggtggcacctgcctataatcccagctactcaggaggctgaggcgggagaatcgcttgaacccaggaggcagaggttgcagggtgctgagatcgcaccactgcagtccagcctgggtgatagagccaagactctgtctcaaaaaaaaaaaaaaaaaattgggagtcatatttatataattttatttctatttctgtaaggtctaatttttgagtatttctgaacatcaataatagaatctctgtccaattagaatttgtgccttgctcagtagttttcattttaatgaatgattcaaaagaatacattagcttaagttttgttttttttaataatattttagcaaagaatggctcaagaagtactgacacatttaaaggagcatcctgatgcttggacaagagtcgacacaattttggaattttctcagaatatgaatacgaaagtaagcaagtggtggttttaaaatctgttatttcttttcttccagtcataaactttgaggaaggtatctcatttttagtattagcatttgttatctcaaattattttatattgttaatttgtttcaaaatttagtcttaagcatataattaattcttgcaaatagtcctaagaattatgaatgaagttttgtaatgggactagtatgcaaggtggcttttttggttgtctgattttgtttttttctttttagtatatgtatacaggtctaagtagcataaattctgaatgttattcagagattaaacataacattaaggaattattttgggcaagtaatcaatataatacaggccaggcacctctgacaccaagttgtgtggacagcttaaaaccctactccatggcattgggcttctaatgggacagcactcagtttttatttacaatggaaaatgttataattctggtccttttttaagtttgaacagaagggttgatcaaaatgtgttttgtctgttttaggcttgatgattcacgcttctctttaaactgccttaaagtaataaatactatggcattctgtttaatacacgaaaggtttccacttgatatacattgtgttaaaacagaagatagccatattcacatctgtttctgaaaccagactttgttaattaacagttttaaaatattaattagttttgacatcttgtaaattttaggtcaaaaatacagtccagaacttcctcaaagtgctaaccttaagtaacataacagtgtttgcctgtttgcttgcctggtaaattttgctttttatactgacagacattactaatgtttaagttgatttatcaacagtatttttaaaaactcaaatttgtcttgtgaaaaatgagatgattagaggaacagaaagaaagcaacaggtaaagaattcttcaatttacataaattacaaatgatttggtgctaaatttatgcactatgacatttggcttttatgcaatcatttttttttctttaaagatgttaacactacctgatattaatcataatgttccattatgttgattgcttgtaataggaagaaaaggggtgtcttcctgtgcaactgacacagctaggctttgacggcaggcctccacaaggtctacccttttgattccctttaactgaattctgttcatcaattgtttttgtttcatgggcggtgggaggggaaaggggaattcaatgcataaaataagtatttctaagggctcagtagaaatttctaccatagggatcatttcatgcatttattttttcatttagtctttgctgttatctgtccctcatcttcataactcagcagtggatttctcaagtttggagatgtaaggcaaaagtataattcttcagaatgtttggattgtagtgatttatcattggctttcagatttgactgtcacttcagatttttgagcaaaaatactaaaaaaaaaaagaaaaaaaattctttgaagagacaggacctctgttgcccaggctggagtgcagtggtgtgattatagctcactgtaacctcaaactcctgggcttaagtgacatttctgcctcaactttctgagtagctagggctacaggtgcgtgtcaccatgcctcgctaacttaccaatttttttatagaagtggggtctccctgtgttgctcaggctgatcttgaactcctggccctcccgccttggcctccccaaaatgttgggattacaggcgagggccactttgcctggccccaaataacattttttcaaaggaatgtaaattttttttgttttagtttcataggcaaagtctttatgtctgggagagattggattttaggatattatagtaacagatgtattcctttgacctaacctgggcaaagcatttattgggctccctgcttcaacccccttggcagaaagatgaaatatgaattgtatcttcatcaagcttatgctacctttatacagttgtagaaaatacaggttagtaaatagtaattttaggtaacagtatcaaataggaagaagtaaataaaaaagaaaggacagtgtctttccattaaaaatgtaaaaaagtttggttaaataagatgaagttatctttaagatttttatttgtaactatatttatggtgggttttgtttcttagtgttttaaaggctttttaattgatttttggcaagaggatatattgtaagcagtgcattgctttgacttactgagtcttgacaatctgattttgtgcctataaaattaaagaaaatgcttagggtagtatgtttttaaaagctaattaagaacttcaggcatttggacaactctcttttttttacatatttctcagacctagacataataaatagatatgtttttaaaagtgaacaggttagaaagcatcactatttactgctgattatgaaacattttaatagcatcaaatttgtaattttagaattttgctttggccttgtttttattttgaaagtttttaaggaatgttctgcaaatgtagtactttagttgaaatggcaaaattttcttgaagagtgtgaaatgttaaaatgaaagaaaacagcaaaaacattcactgtttgagcacaatgtagtttgggacagtctatattgtgctttggataaaatgagcattcacatgatccctttggttgaaatactaatgctcctattttattgtgtaatgactaaccattttaaagatgaactcttattctcagccaaaacttgcaatctgaggttatatgtctatatatgaatgagcttacctttcagatattatagctgattcttccctaattctctcagttgaaatgtaccacaacggttttgtcccttttcttcctcctgcctatccacactaattggtcatagtaattcaggtagtaactcctggggctttataaattattataaatattgttgactatttagagtgagtaatcagcaggagggacaaaatggcttgaaagtggtatctctgttttttaattttttatacttttagttataactttcagtatttaggaagaaatacctgaaaggtagatacagattgcaacatgcgtttgtgattattttgactgtgcacaaaagtttatctttaaattagtagaaatagcaactataagggtggggttaaaatataaaataaacccatgggttgtcttgctgctccttaagtaacacaccagtgatgcttgtaaacactttctatagaaagtatctgtgacaatactttaatatttggccaaaagcttataactcctagaggatggtaggaagcttgatagcatccaagctgctaaattcttaggagcctgttcgtgttaaagtacgtgagcctatgagcagtcatttatgctgtgaattcatatctggctgctacttttccttcgacagataagcctatttggctgctaaagggctttttatttggttcttcctcctggtgtgagcatgtataaacagcaggacgttatatagagtagcaaacaataaaatgaggaaaatgcatgaaaactcagtatatgggtgaatagatacttgtttaatatgtgtaattaaacttggtagcataatgtttttgaaactttagatgtaaatgtgtgaatgtctgtccatttgtgaatcctgagagttgccagtcctataagcaatatattcacatgcttctattctccaattttcagtactatggactacaaattttggaaaatgtgataaaaacaaggtggaagattcttccaaggaaccagtgcgaaggtaggaaaataaagaattataaattcagagttttgtttttcctggcatttttattgtagttgactgtttgagggggcatgtaatgaatctttagtatattttgctctaatggagcttattgcttttatcatgaagcaaacaggtctgtttgtattggtgggtacaggaaggccacttacaggttatcttttgggagaaagaggagactggactgttgaaaactctgacaataaatattctagttaaaaatatgggctatggcacagtggcccacgcctgtaatcctaacacttcaggaggccgaggcaagtagatcgcttgagtctgggagttctataccagcctaggcagtatagcaagacctcatctggacaaaaatttaaaaaattagctgggtatggtggttcatgtctgtggtcccagctatgtgggagcattgcttgagctcaaaaggtcgagactgcagtgagccatgatcctgccactgcacttcagcctgggtgacaagagtgagaccccatctccaaaaaaacatatatataaataaaatatgggccgggcacagtggctcaagcctgtaatcccaggacttcgtgaggctgaagtgggagggtcatttaaggccagaagtttgagaccatcctgggtaacatagcgagaccctgtgtttacaaaaaatttaaaaattagccaggtattttggtgcaggtggcggcggggacaggggtatcagtggggtgaggtaggaggatcccttgagccaagaggttgagactgcagtgagccatcattgtgccactgtactctagcctgggcaacgagcgaaactccgtctcaaaaaacaagaacaacaacaacaaaaaaaaccatatgtaaggttaactcgggaatggaaaagccaagtactaaagatcacaaagctgttttgccttttgtggttctgggaatgccttggaagaggttggcttctgaaatgaagaaagatcagaaaatgaaggtgtagtgatacctgttaatgagtaatttaacttttctgtctgtgctaccttgaggaatgtagtcatattttgagaaacctgaggcaacattagtttcttgggattctttgatttagctaatttcagttatgatacactgcctttttacctactatatttcatttatctctgaaaaatagaaatttttttcttgactttattatggggcacatgatacttctagtagtattttcatttaaaatatgtctaatttctttgattatttgtcttttaagtattgtccttcacctgcattctcttatcatcattatggtagaatagtgacatggatttacttagctaatctgacttaaaccttgacaaagtttgagcacatttagagttgaatgtgatgagattttaatgccagtgtctttttttaagaatattaagtatattcagtggcaatatctttaatacatcataaatcatagattaagagtgatagtgcaggagcaaataatgtgccctaaaagaggttctcatttctttaaatgttttattatggtttgaaactattttagatcacgttctgtgatggactgagaaattaataagcacaatttgactatgtggtccaagtaggtccttcatactttattcttcagggatctttagtgtagtcattccttgtttctttactactattgttttactcatgtgttatgagccccagatttaattttggccatggtctgccgtaccaagaaaaggtgatttacttctgtcccattttactgttgtataattttaaatcctccttttgttcttaaatctgcatctctgttttttatcacatttgatggttctggaagatgttttccaggttgaaaatagatatgattatactagtttatcaacactgtagttacatttgttacagacaaaattaatttaaaaaatttttgtttctttctttcttctttgttgagacagattctcactctgttcctcaggctggagtgcattggcaccatcactgcagcttcaaatagctgcggtcaagcaatcctcccacctcagcctcccgagtagctgggaacataggcatgccccaccatgccctactaaattttttttttttttaatgttttgtagggatggtgtctcgctgtgttgcccatgctgctggctgctgggcttgagcaatcctcccaccttggcctgccagagtgctgggattgtaagcatgagccaccatacttagtcaacatgattacctttttaattttaactgggaggcttctctaacctaaagatttatttcacaaaatacactagaacttctgaacattaattttccttcatctttaagtaactttggtattggaaattacataaattaatttaaaacattttatttcctttttctgtaagtgtcctgtcttttaaaggtattcgctttgctttttgctgtagctataccctttgtccaactaccatagcatatatatttgttcacctggggtgcatattgtgcgtttcctttgtaccgattactactaaatattaaggttataaaaatatacatgtacatcaaagtgctgtatgtcacagtgttatagttgggaagacaaaacacatgtaaaagaggaatcataaatcagcaaattaggtgtatataatgagtgcttcacaagctaaaagaacagaatgatgtctaagtccggccctttagctaagtttcattcacataattggaaagaaatgcctggtatattttaaaggaaggaaaggtttcactgcataagagtatgccaaaattagattcctgcattttttttctgatgtagaatttgttttatctgcttttaggttcttgtccacagcatgttaatttttacgtggtgtttttttttttttttttttttttttgagacggagtcttgctctgttgcccaggctggagtgcagtggcgcagtcttggctcactgcaagctccacctcctgggttcatgccattctcctgtctcagcctcctgagtagctgggactacaggcacccgccaccacacccagctaattttttttttttttttttagtagagatggtttcactatgttagccaggaaggtctcgatttcctgaccttttggtcctcccgcctcggcctccatgcctgttgagattacaggcatgagccactgcctggctaacatgttcttttaaattaatgacattttcaatttaggcctcttgtataaatactgtcaggaaaatctcatgattcttgagtgggttagatgtctcttgctgtgttatacgttactgtatcctgtaccagtgggtcacaggagaataaaattttaaagagcaaaagataggctcagcacggtggctcacgcctgtaatcccagcactttgggaggccaaggcaggcagataacgaggtcaggagtttgagaccagtcttaccaacatggagaaaccctatctctactaaaaatacaaaaattagccgggcgtggtggcacatgcctgtaatcccagctactcaggaggctgaggcaagagaattgcttgaacccgggaggcggaggttgcagtgagctgagatcacgccattgcactccaacagagcgagacttcatctcaaaaaaaaagagcaaaagatagacataattagaaagtaaggatgtttaaaagaacatttaattttccaaaagatatttttatagcaagagaaatggcgagataataaaacatttaaataagttgagatttgttatataaaatttattacatttctctggattttcatttagctttaggccgtaagtgtgtgtctatttgtttgtgttttatgtgttttgtccctcacaccccacattacacttggctgttttagtcactttattccccatccttcaaactataagctccttgatattggggctcagagtgtctttttttctttggtttttttttggtctgtttttgtgtttgtttttgtttaagacagagtctcgctctgttgcccaggctggagtgcagtggcgtgatctcggctcagtgcaagctctgcctcccggtttcacaccattctcctgcctcagcctcctgagtatctgggactgcaggcgcctgccaccacgcccggctaactttgtgtgtgtgtgtgtgtgtgtgtgtgtgtgtgtgtgtgtgtgtgtgttttgttttttgttttttgtttttttttttagtagagacggggtttcaccgtgttagccaggatggtctcgatctcctgacctcgtcatccgcctgcctcggcctcccaaagtgctgggattacaggtgcgaaccaccgcgcctggctttttctttgttttttaaagatgtagggtttcactctgttgctcaggctggagtacagtggtgcaatcatggttcactgcagcctggaactcctgggctccagtgatcctcttgcctcaggctttttttcttttttttttgtgagacagagtccctctctgtcacccaggctggagtgcagtggcgcagtcttggctcactgcaccctctgcctcctgggctcaagtgattctcatgtgtcagtctcccaagtagctgggattacagatgcacaccaccatgcctggctaatttttgtatttgttttagtaaggacagggtttcgccatgttgaccaggctggtctcgaactcctgacttcaggtgatcctcaccctcccagagtgctgggattataggcgtgagccattgcatcctgccctcttgcctcagccttgagagtagctagcactgtaggtccgcaccaccatgcccagctaattaaaaaaaatttttttttttagagatagagtctcactgtgaagcccaggctggttttaaactcctgggtttaaagcagtcttcctactttgccgtcccaaattgctaccaagcctggctgggaaattttaatatgtcaaatggaagaattccctaataaagagtggttgctattcatggtagtcttttatttattcatttgttttgagacaagatctcactgtatcacccatgctggagtacagtggcacaatcatagcacactgcagccttaaactcctgagctcaggcagttaccacgccttagcctgccaaaatagctaggactacaggcatgtgccaccacacccagctaagtttttctaattttgatagagacacagtttgcctatgttgtccaggcttgtcttgaactcctggcctcaagtgatgctccaacctcagcatcccaaagtgctggggttacaggtatatcaccactcctagccatcactgaagtcttaaaggtcctctaggactgccagtggtgttgattctttatcagagtcatgattcagataattccccatccctttttaaaaatggcatttaggctgggtgtggtggcttacacctgtaatcccagcactttgggaggctgaggtgggcagatcacctgaggtcagttcgagactagcctggccagtgtggtgaaacccggtctctactaaaaataccaaaattagctgagtgtggtggcagatgcctttaatcccagctaattgagaggctgaggcaagagaatcggttgaacctgggaggtggagcttacagtgagccaagacagcacgactgcactccagcctgggcaacaagagtgaaactctgaaattaaaaaataattaattaattaattaaaaatggcatttagataattcaaataaaaaaaaagaggaagcctcctttgttcctgttggggggaaagatgatgctatataaaggtatttctgtactttttatttaaaccaagggattgttttaatcagttaatgtgtatggcttatagatcatttcattgattgataaaaacttactcacaggcggggcatggtggctcatgcctgtaatcccagcactttgggaggctgaggcgggcagatcacctgaggtccggagttcgagaccagcctgaccaacatggagaaaccccatctctactacaaatacaaaattagccaggcgtggtggcgcatgcctgtaatcccagctattggggaggctgaggcaggagaatcgcttgaacccgggaggcagaggtcgcggtgagctgagatcgcgccattgcactacggcctgggcaccaagagcgaaactcagtctcaaaaaaaaacccacacttggctcacattgaatagagaagaagcgaatttatgaaaaaagtaatccaaagtggaaagatcgtaattacaaggtttgattttttttttttgtttggtttggttttttcgaggcggagtttcgctgttgttgcccaggctggagtgcagtggctcaatctccactcactgcagcctccgcctcctgggttcaagctattctcctgcctcagcctcccgagtagctgggattacaggcatgtgccaccatgcaaggttggttttgttttgttttgtttttttttaattttgcgacggagtttcgctctgtcgcccaggctggagtgtagtggcgagatcttgggtcactggatgctcagcctcctgggttcacaccattcttctgcctcagcctcctgagtagctgggactacaggtgcctgctaccacgtctggctaattttgtgtgtgtgtgtgtgtgtgtgtgtgtgtgtgtgtggtttttttttttttttttagtagagatggggtttcaccgtgttagccaggatggtctcgatctcctgacctcgtgatccaccctcctcggcctcccaaagtgctgggattacaggcgtgagccaccgtgcccggccaggttggattttataagtagttgggccactaaaatttctgagttgtacagtttcatgtctttagttggcagaccaaagctgatccactcataaaattttatttagtgctctcctttgacgtgagacacgtggtatatttattggcaccgtaatactggctacattatttgacctcatatttcagtttgtgttgcaaggttttgggcattagagctaatgtataggaagccctgtgcttacatatgctgagtatgagtaagtagtgggttaccaactgtttttgatgaaatatctgcatttcaccaaattgccatataccagtctcaaaatatcctgaaccttctgaaataccttcctaagtgagctcactaacacctacttttctgtgtcctttacaattttttcaccacaaagtctcaaagtttcagaaacggaactaatagggtcacttctgctgaagatctcctgtagtattgaagatatttaacatgtttcctttaattgatattggcctttgagaatttttgtatttgccttatttattaggtttaaagtgtacagttggataagttttatcttgtgcatgctcctgtgaaactacctctgtataatcaagatctgcctctatccgattactttcaccttcactgcccctcttcacatgtgcttgttgtcacttgcttggtaagagtggaatggctggattgtgtggatttttttttttttttttttaagacagtcacactactctgtcgcccaggctggagtgcagtgtcatgatcttggctcattgcaacctctggctctcgggttcaagcgattcttgtgcctcagcctcccaagtaggtgggattacaagcatgcaccaccacaccagcataatttttgtttttgtaatagagtttcgccatattggcctggctggtctcaaactcccgacctcaggtgatctgtccacttcggcctctcacagtgctgagattatactcataagccactgcgcccagcccatatggatgttttggtgtatgtttaagcatccaactgtattccaaagtggtcatgtcagtctcaccagcagtgtataagtatgtttcacatctcggctgacatttggtatagacaatgtttttagtttggctattgtagtgcatatacaatagcatctcatggtggttttaatttctttcttttttttttttttttttaaagacagagtcttgctctgtcgcccaggctggagtgcagtggcctgatctcggctgactgcaacctctgtttcccgggttcaagcgattctcctgcctcagcctcctgagtagctgagactacaggcatgtgccaccacacccagctaattattttgtatttttagtagagacgagctttcaccatgttggccaggatggtctcgaactcctgacctggtaatcagcccacctcagcctcccaaagtgctgggattacaggcatgagccaccacgcccagccttaatttccatgtggagtagtgttgttctgtgttccatcacatatccttacatgttctttgccatgccagtatgtttttggtgaaatgtctgttcaaaaattttgctcagttttttttttttttgagacggagcctggctctattgccccagctggagtgtggtggcacaatctcagctcactgcaacctctgcctcctgggttcaagcgattctcctgtctcagtctcctgagtagctgggattacaggtatgcaccaccacgccctgctactttttcgtatttttagtagtagagatggggtttcaccatgttagccacgctggtctctatctcctgacctcgtgatccacctgcctcagcctcccaaagcgctaggattacaggcgtgtaagcccaccatgccccgccaattttgcccagtttttattgggctattcccttattgagatctaagggctctttgtattctagtcaggagtattttgttaactgtatattttgcaagtgttttgtctgtggcttcctgtttaatttttgtaatggtgtcttttgcagagcaaaaatttcagattttgattaaaatcagtgttgatttttttttctttatatagttgatgttttttgtgttgtattcaagaaatctttgtcatgcaaaggtcacttaagattttctgtaagtttttggctgggcacagtggctcacgcctgtaattccagcaatttgggaggccgaggcaggcagatctcttgaggtcagcagttcgagacgagcctggtcaacagggtgaaaccgcatgtctactaaagatacaaaaattagctgggtgtgttggtgaattgcttgaactggggaggcagagactgcagtaagcctagatcacaccactgccctccagcctgggtgacagagcaagactctctctcaaaaaaaaaaaaaaaaaaaagatattctgtacgttttcttatagaacctttatagttttagcttttgcattaagatctgtgatttggctgggcacagtagctcacaattgtaatcccagcactgggaggccaaggcaggcggaaacaatacaaacaaattagccaggcgtggtggcatgcacctgtaatcccgactgccaggaagctgaggtgggaggaatgcttgagttgagttcgggaggtggaggttgcagtgagccgagatcatgccactgcactccagcctgggcgacaaagaccctgtctgaaaaaagcatcatgtgattcattttactcaatttttgtatatgaggtgaggtaagggtcaaggtttatatatttatttgagacagagtcatgctctgtctcctggccagagtacagtggcgcgatcttggctcactgcaaactccacctgccagattacaggtgcacaccaccacacccggctaatttttgtatttttagtagagatggggttgccccatgttggccaggctggtctggaactccagacctcaagtgatccgccagtctcagcctcccaaagtgctgggattatgtgtgagctaccgcacccagctccccaactttgtttctaaaaggtttggctattgttggttttttgctgttccataaaaattttagagtgaaatctggcaaatttcaacaaaagctgtcctgaaatttttattgagattgccttggatctgtggatgcatttggagagaatgaacatctttaatgtcaattcctgattatttcttgctaatatagagaattgccattgttcacttatctcttgaacgtgtagtttaatccagctagtcaaagcccagttcaaactcactttcccttcctgttgtgagaaaacacctcaattttgcaaaagctcttggaatttaacatttctgctgcttttccctgtatgtgtggtgtttagtcttttcatagttcgttgactatggaattcagagcagaaaccctatttcctaatttccttgggaagttttcagaactagatgataatgtaagtttctaataagttgatagtgttactcagaggtgattgtttcatttatgattttgaaaagaaaatgtaaatattagacttaagtccttgcatctaaaacaaattcatgagaaatcccacagaatacaatgttagagatgggagcaaaaattatcagtctaatctcagagagttgacaggcattccaaatcgttttttgtcagtatttaaaccatggtaggataatgtaagaaatatacttaatgcctggtgcgatgtctcacgcctgtaatcccagcactttgggaggcctaggcaggcaattgtctgaggtcaggagttcgagaccagtctggccaacatggtgaaaccccgtctctactaaaaatacaaaaaaaattagccgggcatggtggcgtgtgcctgtaatcccagaatcccagctactcggtaggttgcagcaggggagttgcttggaccagggaggtggaggctgcagtgagctgtgatcatgccactgcattccagcctgggcgacagagcaaggctccgtctcaaaaagaaaaaaaagaaaagaaaaagaaatatctgtaagctataaattatgtttttcatttctaaaaaaaacaaggcaggccaggcacagtgattgaggcctgcaatcccagcagtttgggaggctctcttgagcccagaaatttgagatcagccaggacaagatagttagacttctctctactaaaaatacagaaaactagcagtgtatggtcgagtgcccctgtagtttcagccactcaggaggctgaggcgggagaatcatttgagtccaggcaggaggtcgagccctgattgattgcaccactgcactccagcctgggcaacagagtgataatatctgaaaagataggctgggcacagtggctcttgcctgtaatcccaggactttgggaggctgaggcaggcagatcacctgaggttgggagttcgagatcagcctgaccaacatggtgaaaccccatctctactaaaaataacaaaaaaattagctgggcgtggtggcgcattcctgtaatccctgctactctgaaggctgaggccggagaattgcttaaacctgggaggtggaggttgcagtgagccgagattgcgccattgcattccagcctgggcaacaagaacgaaactctgtctaaaaaataaagaaaagaaagcagtattttcaggcacattgtatatgattgataggaatagtatttccatttctggttaatgtaacaatttgccccattccaagtattttgattacaggcctccatgaaaggcctatacttgatacctaacagtgtttgatccctagcttacatccatgtaacttttttttttttttttttttttgagataaggtctcacgctgtcgcccaagctggagtgcagtggcgggatcatggcttaactctagcctcaacttccggggctctagcaatcctcctgcgtcagtctcctgcataactgggactacgtgcgcatgaatcatacctggctcactgtttctattttttgtagagatggggtctcgctatgttgcctaggctggtcctgaactcctgggctcaagcgatcctctgcctcagcctcccaaagtgtttagattacagtcaagagctactgtgctcgacctgctttcaccttttggctatcatgagtgatgctcctgtcaattttaataaaattttaatcttttagattttttgtccagtgtgtttgaggccataaacatccatttaagaatggcggatgtgcatatagatccatttctcttaacattatcaaagcaggttaaattatagattatctgtgggaaccctaacttaactcctgctttagaattattgttagctgtttgtcttccatgtggcattgttcttattaatatttcattgagagaacagtagtaacaatatcctgtatacccttgtgtaagtaaagagagcagatcactattttattgaccatctttcaaaagatcgattttgtgtgtttttttgttttgttttgagatagtctcacattgtcgcccaggctgcttggattgcagtagtacaatcttggctcactgcaacctctgccttccgggttgaagcgattcttgtgcctcagcctccagagtagctggtactacaggtgtgcaccaccatgcctggctatttttttgtattttaatagacaggtttcaccatgttggcctggctggtctcaaactcctggcctcaagtgatccacccacctcggcctcccacagcgctaggattacaggcttgagccaccacatccagccaattttgatgttttcatggactgatacttgtaataaacatttcaattatatatagcattgatgtagaaatgtaccaaatttacatttttttagcttatggaataaataaatgtttaaactgaaattgattcgaaactagattgaacttgcctttttcctatttgtaatttacatttttaatagtgtatcaaaagccttaaaccattttctgtggtgcaggttgactgcctcttgctggaaatgcttgggatgagaagtgttccagactttgggctttttcagattttggaatatttgcattatgctcacgagttaagcattccaaaactgaaatagcccaatgagcatttcctttttttttccttttttttgagacagagtttcgctcttgttgcccaggctggagtgcgacggcatgatctcgactcactgcaacctctgcctcctgggttgaagtgattctcctgcctcatcctcctgtgtagttgggattacagtcatgcggcaccatgcctggctaattttgtagttttagtagagacagggtttcttcatgttggtcaggctggtctcaaactccaaacctcaggtgagccgcccgccttgtgttgggattacaggcgtgagctatctcacccaacctgagcatttccttttagtgccatgttggtgctttaaaacttgcagatttggggttgggcgtggtggctcatgcctgtaatcccagcactttgggaggctgaggcaggtgggttgcctgaggtcaggagttggagaacagcctggccaacatagtgaaaccttgtctttacctaaaaaaaaaaaaaaatcagctgggcgtggtgacgggcacctgtaatcccagctactctgggaggctgaggcaggagaatcgcttgaactcgggaggtggaggttgcagtgagcggagatagcaccattgcactccagcctgggccacaagaatgaaactccatctcaatcagtcagtcaatcttgcagatattggagtgtttcagatttcagatttggggtacttaaactgtacgtgaaaattagctgctggggaggagaggaattggaatatgtaacatggactcccacattttaaggatttttctaggactgcatctttctcttaataagtcagatccttatttggttgaaaatgtttactgcatgactatcactgactatgtaagatgctgatgtacaactctatgacttgaagattgagttgcttctatgggaatatgacaccatttgaattaatttgttctcaatattttaaagagttttagtgaattctgttcatataaaaatcaggttcaataatgcgtgctttttacgctatcattgagtatccagtgtttacaaggtgtttctgagggataagattattattgctgtgtaaagaatttggcagatggtgtgtaccttctaagttagcttgaggtttatttaaatctcatctttttagcttgctgaagttgatactatgcagttgcaagtttatattgactatttgatattgctgtgtttttatttgaaatgggactgttagacacatttttctttatattgagcaatagagctggaatattaaagatgtatgcattaacccttgcatttggaacatttacatgtcataagctgcctttcagtaagtggttaggcatttctacgggtgtgtattatattttgaataaattttatatggctttccaagaaacaattagagcatttgacccaccgactttgttgtttatttttatttttttgagatggagcctcccgcagtagagatagagtttcactatgttggccaggctggtcttgaattccgcctcaggtgatccacgtgccttggcctcccaaagtgctgggattacaggtgtgagccaccatgcccaacctgacctaccaactttggatgtgaatttttttcatttatattgagaagaatagggtcttgggccactagattgtaccagtgctaagtcagtatctgaatccattgaagatcctgttggcaacgtcaggacttatcaaagacacacaacttcaatgagaacctttctttggaattaattaattaatgatatggagccttgatctgtcactcaggctggagtgcagtggcactatttcagctcactaggaatgcatctttctcttctctttctccacctcccaggtttaagcacttctcctgcctcagcctcccgagtagctgggactgcaggcacaagccaccatgctgagctaatttttgtatttttagcagagacaaggttttgccatgttggccaggctggtctcgaactcctggcctcacgtgatctgcccacctcagcctcccaaagtactgggattacaggcttgagccactgtgcccggctgccttgtttgatttttttttttaaagagacagagatcccctctgttgcccaggctgaagtgcagtgacacaatcatagctcgttgtaacttcagtctcctgggtgatgggtagaattctgccacagcccaagtagctaggagtataggcacgaacgactgtgcctagctaatttttttattttttgtggaaatggggccttgctgtgttgcccaagctggtctcaagctcgtttcctcaaaccctcctcccatgtcagccttccaaagctccaggattacaggtgtgagccatcgtgcgtgacttgtttttgatttttgtatcgttttcttcactcttttttttttttttttgagatggagtctcccgctgtcacccaagctggagtgcagtggcacaatcttggctcactgcaactgcatcttgggttcaagtgattctcctgcctcagtctccccaagtagctgggactacaggcgcatgccaccacgcccagctaaatttttttgtttttattttttgcatttttagtagagacgaggtttcaccacgttggccaggctggtcttgaactcttgacctcagatgatctgcccgtctcggcctcccaaagtgctgggattacaggtgtgagccaccgcgcccggccttcttcaccttttgtatcaagctttttaaggaagagcttagaaagccagtttaaaggaattgaaatgtgttatgtaaatgtctgttttgcaactgagacccactaatttatttagaacaaaaagtcagagaccagtaatgggtccttttctgtcaaatttcaagctgagctgtttctgctacttagaaacatttcgattttctacctagatatgtattatatcattgctaattatttatttatttatttatttatttatttgaggtggagtctcactctgtcgcccaggcttgagtgtactaatttatttttaagtgcagtttaacattggatttttttttttttttttgagacggaatcttgctctgtcgcccagactggagtgcagtggcacgatcttggctcagagcaacctctggctcctgggttcaagcgtttctcctgcctcagcttcccaggtagctgggattacaggcatgagccactgctcctggcctacagttggaattttttgttgttgtttttgagacggagtcttgctctgtcacccaggcttgagtgcagtggcgcgatctcagctcactgcattgtccatttcctgggttcaaatgattctcatgcctcagcctcctgagtagctgggattataggcgcgtgccaccatgcctggctaattttgttgtatttttattagagacagggtttcaccatgttggccaggctggtctggaactcctgacctcaagtgatctgcctgcctcggccttccagagtgttgggattacaggcgtgagccatccgtccggctggaatgctattcttaattgacctgcatttatttatttatttatttatttggcaagccttgaggaagggatttggggaatgaacaatggtacttgatcaaataatccttgtactaggcaatcacagtttctagggccactgtacctggccatgggggttttattgataataatctgtaaggaacaaaagggttagtactatcggaatttttgattagatgtagtgagcattaaggacatatggaaagtagtttgaagtaaaatatatacagtataagagtcagaatcagccaggcgcggtggctcatgtaatcccagcacttcgggaggccgaggtgggcggatcacctgaagtcaggagttcgagatggcctggccaaaatggtgaaaccccatctctagtgaaaatacaaaaaaaagccaggtgcggtggctcacgtctgtaatctcagcactttgggatgctgaggcaggataatcgcttaaacctggaaggcagaggttgcagtgagctgagatcacgccactgcacaccaatctggggtacagtgaggctctgtctcaaaaaaaaaatacaaaaaaagtagccagacatagtggcatctacttgtagtccagggtactcaggaggctgaggcaggagaatcacttgaacccaggaggcggccgtgtcagtgagcctagatcacaccactgcactccagcctggaagacagaggaagactccatctcaaaaaaaaaaaaaaaaagtgagaatgttgcatagattacccaagttaattcttataatttagtgttcatttaaaaggaaaattgatttcctactttttgtttttaaaaatagtattaggctgggtatggtgggtcaggcctgtaatcccaacataaaatgtggccaaggcaggaggattgcttgaggtttggagttcaaggccagccccagcaacaatgagaccaggaaaaatcagccaggcacggtgctaagcacctgtggtcccagctagtcagctagctgaggcaggaggatcgcttgagtccagaagttcaaggctgcagtgagctgtgatggcaccactgcattctagtgtgggcaacagaccaagaccctgcctctaaaacaaaatgtaaaaaatatattttccatttccctattcattttatgtatttgtagcataaatgttactatgcatattgacacttaacaccattagatttctcttacatgtattacgttgctttactgcattagtaatatttttttcgtaattaggaaagtccataattactgttacagaaattttttatttgggatattgtgggaaatggctagtgttgtcatagttaataaaaattatataattaagtgccattgaagaaccatagtttgaaagtgaatttaatacattagctcatagttatacaatctcacaagcattttgctgccttcaggttgtcagtttcctgctaatgctaatgactaaattttttatttttcttttcaacgaaaatttcactcagttctatatatgccagatgaggcttggaacatacagctctacaacctttaactgcttttccaaaaatctgaacgctatgaaaatgaaaaatcttcataatttaactgatttggtgacaaagcgtaaagtgaacagatgtgagagtatttgtaattgttaattttacgtagtaggaaatagtaatttgttcaattagggttgctacttcatatccttttagtgtttcaatataggtgtaccacactacttttcctttaaaaatgttctcagaatttaacattctgcaacactcttgaaccctgtgattttggagaatggaacctatagtagatgctcagcaaattctacatgatgcaaattaaaatcaaggatatgagtatcatgtcttaactgtttaaagagtaggttttactatgaagagatccataagtaaagagcatttgaaatgaaaactttttcctaaacttccctcttttttttaacattgtgtgtgtgaagttaatgttgtatttctaatatgagcttaatgttgcaattaatgtatagtggaaaataataacacgtatattaattcatttttgagacaagagttcgctctgttgcccaggctggagtgcagtggcatgatctccgttcactgcagcctccgcctctaggcctcaagcgatccaccggcttcatccttccaaagtgctgggattacaggagtaagccactgtgcccaagccatcaataaatttttatgggttagaagtttgggccaggcctggtggctcatgcctataatcccagcagtctgggaggccaaggcaggtggattacttgaggtcaggagtttcagaccagcctagccaacatggtgaaaacatgtctctataaaaatacaaaaagtagctgggtgtgctgggcgcagtggctcacgcctgtaatcccagcactttgggaggccgaggcaggcagatcacgaggtcaggagatcgagaccatcctggctaacacggtgaaaccccatctctactaaaaatacaaaaaaatagccgagcatggtggcgggcgcctgtagtcccagctacttgggaggctgaggcatgagaatggcgtgaacccaggaggtggagcttgcagtgaggcgagatcgcgccactgcactccagcctgggcgacagagcgagattctgtctcaaaaaaaaaaaaatagtagctggatgtggtggtgcgtgcctgtaatcccagctgctcaggatgctgaggcaggacaattgcttgaacccaggaggtggaggcggaggttgcagtgaaccaagattgcacctctgcactccagcctgggcaacagagcaagactgtctccaaaaaaaagaaagaaaaggccgggtgcagtagctcacacctataatcccagcactttgggaggccgaggagggcggatcacttgaggtcaggagttcaagatcagcctggccaacatggtgaaaccttgtctcttattgaaaatacaaaaattagccaggcatggtggttgatgcctgtactcgggagcctgaggcaggagaatcacttgaacctgggaggcagaggttgcagggagccaagattgtgccactgcactccagtgtgtgtgacataacaggactccgtctcaaaaaaaaaaaaaaaaaagaaaagaaacacatggaaccaaatcaggatgaaagaaactggaatagcagtttgttataggctgggcttgttggcttgttcctgtaattccagcactttgggaggcccaggcaggaggatcacttgagtctatgagtttaagaccaacctgggcaacaatgccagatcccatctttaaaaatatgaatagcacattaaattcattgattttttttttttaagtcttgctctgttgcccaggctggagtgcaatgacgtgatgtctgctcactgcaacctccacctcccggattcaagtgattcccctgcctcagcctcccgagtagctgggattacaggcacccgccaccacgcccagttaatttttgtatttttagtagagacagggtttcaccatgttggtcatgctggtctcgaattcctggcctcaggtgatccacccacctcagcctcccaaagaattgctgggattacaagcgtgagccaccgcaccgggccggaatttttttaaaatgccaatactggtgacaggattagagtatattaactgattttacttagtctttccattcccacattaattagttctcaaaatttatttgcatgctacaaaagagctcaacaatttttttattacgtgcaatttttttaataggaataaaaaaatacgttgttggcctcattatcaagacgtcatctgacccaacttgtgtagaggtaagagtttattttggagcttattgggagagcataaaatcatttagatattgagtctgactacaacctaattctgtcaagacacatagtcacacatatgcacagtcagtcatttacagtagagctgtaatcatttgttaggattgtctggttatattcttatttatacttacctcaggctctcatttaatcttttacttttccttagaaagaaaaggtgtatatcggaaaattaaatatgat

SEQ ID NO: 15888 - DNA, 37353 bp, Homo sapiens
ggtggagagcttgggatgggggagggaggggctgccgactccctgttcctccagcaaggaaactcgaaagctctccggttttgcagagtggcatgtgaagtaggaaagatcagtttttcaggggcctgcacatgggattccgtcttgtagttccttttcaggggtttgaatgtgataagttggttaaaccatttactgttggccttgtacagtggaggatgccctgattctccttcattccgatgtctgtgagtttgggttgggtgggaggaagtggtgtagtagaggaagcattcagtactggctcagcccggacctcctctgatcacgccgaggccatgctgcatagagaaaggggcggtgaacttaaggcgcctggtctaaatgcctcctccgagtaagggcggggtgagtgcgtgctcctgtgtgctatagttagaagggctgcaaatcggttcgggtgggaagcgaggggagggcgggccctaatgaggtgtgtttttcctgaatgaagcgggcgattgcccacacaacctaaggagcagtctttcgccttgtagcgacttgtttttcacctagtgtgaagttattaagcaacggttatgattttctgggttttgtttaggaattggcattgggtgtcacttgtagagtcacattatccattaagctggataatccctagtgtatgttatccagtgagtggattttaggattgaagagcccaatgggaatgagcgttcgtggttacacctctcgcactatggcttgtttgctgtctgattgtatatcttaagtgtgggacactgctgttagtggaaagaatgttttggaagcggtttgatttgggggactaaatgtgcttggcattgaccacaaagccgccatttctgtactatgtacagttcaggaataggtaggtgatttcgaagatagccgctagttctaaggatggcaaactactgtatttaaatccttctattctaaatctcgtttttcacatcagtctagttcggagaattttataagaacagtgtatttgaaaatgaaacttgtaagagtcattttcttaatccttttttgttttagcattcaactatggtagtaaataggtgaaaagtttgttcaatatttaaccgaaatatttgaaaacttttgatacatggatcttggtgctttgtggacattgcttttaagcctcaaataattaagattgttctgatcttttaaattttatggtacttgaaggtggaggagagtttacacattcatttgtggaatatatatttcctctcagtatttagatcttaaggtttttttgtggtgtgtaacaagtattctgctgtttaaaaacgtttgtttaatgcctactacgaaacgttttgaagtctcatcagttttgtcaataatggaccaattcttgaactcctaatttcttgagttttacattatttttacatcatatcaatcataggtgactcatcttttggagttctaatctgttgtaacagacgttatatttaaataagacaattgcattaaaatagaatttgctgccattattgttatggacatttttaagctgttataaaatagccaggaattaatgactttttttccgccctgccaagctagtttgtctaaatataatgtaaagaaattagctactcattttctggtccacgaaagttcctaaaatgggaagaagtggagatctgaccttgttagttctaaatacactaaactgggagtgccatggatggctttcaggatgtcctgaatcctctataattgtatacaaaatcgtgagtttttaaaaactgggttagagctattggttcctcagagtctcaggcatcttagacccccaaaaaggttaaggactactgacttaaccaattaggtttgagtggcattggctttgaagaaaagcagaggaaagatatattttataattctgggcaacaaaaaagtggatgtgtgccagcatcttagagtagaatcctcttaaaaggatagcactgcatatgaactagtaggttttaaccagtgcatatttaggcgaagtagctcatttttctgttagaattcttttttatttgggaatgggcaagcttttacagcttttaccttgccaatgaatacctggaatttaaaaaatcttgttaggcatattgcccataaagttttttttcctagatcatatattcagtaaatatgtttgtagctttatttcaatcccccaattcattgagggttgaaacaatttgaatggtttgagtgtagaagctaagttatttctgtagaggctaagggcatttataccaagatatgttagacttgtggttcctgctaaccattgctgtagacaataggaattactgtatatccacattttaatttttaacatcattctgtctttgtttgtttgtttttgagatggagtctcattctcttgcccaggctagagtgtggtggtgcatctcggcttactgcaaactccgtctcctgggttcaagcagttctcctgcctcagcttcccaagtagctgggattacaggtgcccgcctccatgcctggctgatttttgtatttttagtagagacggggttttgccatgttggccaggctggtctggaactcctgacctcaagtgattcgcccacctcggcctcccaaagtgctgggattacaggtgtgagccaccacgctcggcccattctgtctttatagcattatttttataaagttaagataatgtgaagtgagcttttactgagttattcagaagaccctacttgggaagaaaagaaaatcacattcacttgaacttaatcctacttgcttaaaaagttttgacatcaagatactgaactgtatcacgttttaggaccataaaatcctaatagtggatgcgtttaaataataggttagcatactttataaatgttagtagaataggaaagtcttcctggtgtataaactaaacactagaaaagttgaatggaccataataatttatgtaattatcaaatagctaagtaatttcagcttttgttacttgcttttactatctcagttttctgtaattaaagtctctaaagtattcattaaaatatttgtaataacatggttgaagtaaaataacttgtaggaagtttttgataataccaaaacttgataggcagcttcaattttttttctttattttcagtaatctatgccagcaattatgacaatgttagcagaccatgcagctcgtcagctgcttgatttcagccaaaaactggatatcaacttattagataatgtggtgaattgcttataccatggagaaggagcccaggtaaagtagccaaccaaaactttataacattatgacagtgtaacagagttgttgggtttagaataaaattttaaattatcacctttaaaaaagatattccatagtttgcattaatttggaattctgtattaaccataatgaaaattggtttggagaaagaaattgcatgtttgacatggttagagtgggttgttttggaatattatacttgttttgtccttaagagccaaatgttattaaatactttgtaggtattaaaggttctctgtacttttatatatacttaatatgtttggcactaatacgattcttctacttttaaaacatttacagaagtacttcacagatatgtttgtttaaataaaaacaggaataccaagtatttttatgttagttgaattttgtgcacttttcaaagtggtactgttaatgtagggaattatcttaaacataaaccaaattttgatcagtttaagatttttggtttttttgaacccaactaaaaggtgaaacagaaatgtgtgtacaattttaaattgtatatgtcacaagaaaaaaaacttgattttttacctgtggggccaaacttttttttgagacagtctcgctctgtggtccaggcaggagtgcagtggcgctatctcagctcactgcaacccctgcctcctgggttcaagcgattgtcttgcctcagcctccctggtagctgggattacaggcacacgccaccatgcctggctaatttttgtatttttagtagagatggggtttcaccgtgttggccaggctggtcttggaactcctgacctcaggtgatccacctgactcggcctcccaaagtgctgggattacaggcatgagccaccgcgtgctggcccaaacatgtttttgaatgagtaaaaagttttgcagttgggtcagaaatcttttttttttttcagatggagtcttgctctgtcaccaggcctgagtgcagtggcacagtctcggctcactgcaacctctgcctcccaggttttcaagcaattcacctgccttagcctcccgagtagctgggactacagacgcgccaccatgcccagctaattttttgtattttagtagagatgggtttcatcatattggccaggatggtctccatctcctgacctcgtgatccgcctgccttggcctcccaaagtgtggagatgacaggcatgagccaccgcgcctggccagaaatcttttatggtagttttgttgccagaacagtagatttctggttagataaatgttcagctagtagatgggaggttacttatattgtcaagatatttatatttgcataattaagaaactgagtgccggccgggcgcggtggctcacgcctgtaatcccagcactttgagaggccgacgccggcggatgacgaggtcaggagatcgagaccatcctggctaacacggtgaaaccccgtctctactaaaaacacaaaaaattagccaggcgtggtggcgggcgcctgtagtcccagctactcgggaggctgaggcaggagaatggcgtgaacccgggaggcggagcttgcagtgagccgaggttgcgccactgcactccagcctgggcaacggcatgagacttcgtctcaaaaataaaaataaataaataaaataaaataaaaaaacctaaacctgagtgccattacactttctgaaaatatataaggtggatacagtactatcttttatagtagtccaaaaagcatcatgtataaatgtttccattcccttatgaaatgcaacagtactgcttttactatagtagaaacttgaaaaaggtccatggaaacgctaaaagtagaaaaaattactcttgcagtgattctgtaagcttgttagcccaggtttatacttttagggcgttttgatcagtatattatctcctaaagcattcttgaaaaaattaaccatccgtatttattatccctgtcatttagttgttactcatgctatacattcaacatgaagctttaagcttcatttcttctagcatggatgcatagaaagcagctgcttttggaggaagctatgaaagtaaggttgggttcaactctgaatgtaatattggaagcacaggtctgtagccattgggaaaaagggcatttaattttttccgcatagattcagctactaatactgtttaatcttcacactaaactagttcactacatctaaaggtatgataaataaaccaacatagagcagtgttcttcatggcttgtaacagaattagtggcaatttttgtaattgagaatatattacagcaatactgcttttaataatgtttcatagtattaagaaatttaatggtttgttttaaaattgacttgttaataaaaagtagattaagaaaagtgtttctaaatttttttgtttgtaaggacaataggttaactttcccaaagtaaaaggattttgtctgcagtagttaatagatcatgtgacaaaatcagttgcgtagaaataactagcaaacttattttgtattataaatgaagaaacaagatttagagcttaaagctggttaaggagtccttttggtctctaaaagtcctatgtcgttagttcagtctacttttcgtttaccacctccttgggggtcttatttcaaaggaaaaggagtagtagtagcagcgagctgctatagtggaaaacatgatttttagtgttagacgtcttaatttgattcttggaagctctctctagtcattgcttaagtcccatgtacaaatatgacctgtcctacaagagattggagggttagttatgaggtttaaaagcacctattacagtgcttgataggtagaaggcactcagcttaaagggtacatttagcagtataatgaaaatgatttagcatatgtgatactcattgcttaaaattaaaaaaattttttttttgctactcataaaatatgcactaatgacaagaaaaatttattatgctaattaagcttttaaagtcaactgggaaaaaaagctgtaggtaggtttttttttttttaaaggaatgtgtaacttgggggaggggaagaaattatttacaagggtgacttttaatctgtagacagaacttctgcatacatggttagtatagtaggatatttagcagtgtaacattaggactaccctctaccctctgttatcagcatttttctatttttagccaagtagacagctagaaaaaagatgcgggaagagttggatgttttctccaatattgtgttctgttaaagatcttgaactctattgcttagcaactaaaatgctttcaccattcagttagtagtacaagggagatgctaggttttctctctttagtttgcttttgtgtcttttttttttaaacccctgctggggttttaagtttataaagaacattatgtaagaatggtgggattagaataaatcagaatgcaaatactagaagtagcatcagagagtaaaattacaactaacaggaaagaatattatttatgtagcgattgatgtgagtggtgatagtgtgggaagtatttgattctgtgtagaatgcttatcacttcaaagcatctgacaaaatggtaacttgaccaagtaacttttactgtgtgaggatctttgatacaacttttcctctagttagataaggttatctagctagatattctcagggagaagaccaaaacactgctaaaatgtgctttggccctagataagccacatcattattctttcggccttctgtcatttctcatatgacacattatgcccatcagtcctttaatgaaatcaaatagaaatgtgtatgattgtattttaaagtatacacattaactcttgtaaccacagactcacaatggaagcaggcgtctgatcttttcaggcaaccacagtggttctggtgggtttctgggtagagaacaaccatataagttattgagtgtgtagcagtgtgttttcctgattgatgtatgggatagtcatgaatgtggtattgtatttcctacctgaggaaaaggtcatgattaaaataaagcatcaaagccaggataagcatataatttctttctttttttttttttttgtaatgagacagagtctcactctgtagcccaggctggagtgcagtggtgtgatctcaaatcactgcaacctccgccttccgggtcctggttcaagcaattctcctgcctcagcctcctgagtaactgggattacaagtacgccccaccatgcccagctaatttttgaatttttagtagagacggggtttcaccatgttggccaggctggtcttgaacttctgacctcgtgatccacccaccttggccacccaaagtgttgggattacaggcgtgagccacggtgcccacccgagcatacgattgttttaaaaaagactagaataaaagccaagctaaagattataaggtatctttgtcagaaatggttgtgagagtgcttcctaccctgtttttgatgctttattgtttataaccatagaattaaacccatgataaagtaaagtataagagaaagataactgacagattttaaagtcatcaaacttttttcttgctctgtcacacaggctggagcacaatggcttgatcacagctcactgcagccttgacttcccaggctcaatcttcccacctcagcctcctgagtagctgggaccataagtgcgtgtcccaccacacctggctcattattaatttttctttgttgcccaggctggtcttgaactcctgggattacagacatgagccaccacacctggtccaaactttttgcttacaacttttaatagaaataggtaaaagaaataggaaggatctaattgagttataaaacaacctttaaagatacaaaagtgaaaaagattaagccattgctttttgtcaatagaattaaaagctgttggtaaaaatattaatgtatgaaaaacttattgaaatgaaaaaactatatatatatatatatatatatatatatatatatatatatatatataaataaaatgtcgacatggctggatcttaaaaactgtcaaatgaaaaaaactaattgcaggaaagattttttttttttttttgagagggagtctcacgcagtcaacccaggttggagtgcactggggcaatcttcctgattcttggggaatcttggctcactgcaacctccgctcctggattcaagcgattctcctgcctcagcctcccgagtagctgggactataggcgcacgccaccattcccggctagtttttgtatttttagtagagatggggtttcgccatattggtcaggatggtcttgaactcctgaccttgtgatctgctcacctcggcctcccatagtgccaggattacaggcgtaagccaccgtgcccagcctaaaagatttttaagtatactattaacataaaatttggtagccgtacaaccctattcatgaaatttacacacatgccgtgaaaatgtggacaggaaaagacacactaagttcatgatgaaagccattactttttaaagaaggaacaaaggtgtaatcccagcactttggggaggctgaggcaggcgggtcacgaggtcaggagttcaagaccagcctggccaatacagtgaaaccctgtctctactgaaaatacaaaaattagccaggcgtggtggcaggtgcctgtagtcccagctacttgggaggctgaggcaggagaattgcttgaacccgggaggtgaaggttgcagtgagtcgagatcctgccattgcactccagcctgggtgacagagcaagactccaactttaaaaaaaaaaaagagagaaaaaaggaataaaggaaggaaatggcactagggaaaggcacaaagatgacttccataaactttagttattttatgctaaaagaaaatctgatacaagcacaagatgatgactacgtagattagtatttctgggttgcatgttaaaaatatgaaaataaaaacggaaatagtttccaaaacaaagattttatatatgaaattagtgaaatttcagaatggagaaaggatggttacaataaatgttaggagccctctttaaagagctcaaatggtatgtaagtatttgggatttgtggtttaattagacctagttttcagcagtctttccatgaaatgtatttttgtatttagagagatcttggtaactcttgtaaagcagagtgtcctgctacattacataacttacctaagtaggtgtgcttttttttgtttttctagagacagggtctctgctctttcacccaggctgaagtgtagtggcaccatcatagctcggtgcaaccttgatttccagggctcaagtgatcctcccatctcggtctcctgagtagttaggactataggtgcaagccaccatgtgcagctttcttttttttttttttttggagagtcatggcctcgttacattgcctgtcacctagactggccagctggtcttgaacccctggcctcaagtggtcctcctgcctcagtctcccaaagtattgggattacaggcatgaaacactgctactggcctagataagaatttttatattgtttttggttgatttaagtgctgagaacttatttgcttcagaatagatctttggttgaaatgcagttcagttttgagactaaaaaataaaccagatttactcccaaaaatgttactgtttcaaataagtaaaatatttgcacctttaaagattaggagttggctgggcatggtggctcactcctataatctcagcactttgggaggccaaggcaggcagatcacctgaggtcaggagttcaagaccagcctggccaacatggtgaaaccccatctctactaaaaatacaaaaattagctggctgtggtggcacctgcctataatcccagctactcaggaggctgaggcgggagaatcgcttgaacccaggaggcagaggttgcagggtgctgagatcgcaccactgcagtccagcctgggtgatagagccaagactctgtctcaaaaaaaaaaaaaaaaaattgggagtcatatttatataattttatttctatttctgtaaggtctaatttttgagtatttctgaacatcaataatagaatctctgtccaattagaatttgtgccttgctcagtagttttcattttaatgaatgattcaaaagaatacattagcttaagttttgttttttttaataatattttagcaaagaatggctcaagaagtactgacacatttaaaggagcatcctgatgcttggacaagagtcgacacaattttggaattttctcagaatatgaatacgaaagtaagcaagtggtggttttaaaatctgttatttcttttcttccagtcataaactttgaggaaggtatctcatttttagtattagcatttgttatctcaaattattttatattgttaatttgtttcaaaatttagtcttaagcatataattaattcttgcaaatagtcctaagaattatgaatgaagttttgtaatgggactagtatgcaaggtggcttttttggttgtctgattttgtttttttctttttagtatatgtatacaggtctaagtagcataaattctgaatgttattcagagattaaacataacattaaggaattattttgggcaagtaatcaatataatacaggccaggcacctctgacaccaagttgtgtggacagcttaaaaccctactccatggcattgggcttctaatgggacagcactcagtttttatttacaatggaaaatgttataattctggtccttttttaagtttgaacagaagggttgatcaaaatgtgttttgtctgttttaggcttgatgattcacgcttctctttaaactgccttaaagtaataaatactatggcattctgtttaatacacgaaaggtttccacttgatatacattgtgttaaaacagaagatagccatattcacatctgtttctgaaaccagactttgttaattaacagttttaaaatattaattagttttgacatcttgtaaattttaggtcaaaaatacagtccagaacttcctcaaagtgctaaccttaagtaacataacagtgtttgcctgtttgcttgcctggtaaattttgctttttatactgacagacattactaatgtttaagttgatttatcaacagtatttttaaaaactcaaatttgtcttgtgaaaaatgagatgattagaggaacagaaagaaagcaacaggtaaagaattcttcaatttacataaattacaaatgatttggtgctaaatttatgcactatgacatttggcttttatgcaatcatttttttttctttaaagatgttaacactacctgatattaatcataatgttccattatgttgattgcttgtaataggaagaaaaggggtgtcttcctgtgcaactgacacagctaggctttgacggcaggcctccacaaggtctacccttttgattccctttaactgaattctgttcatcaattgtttttgtttcatgggcggtgggaggggaaaggggaattcaatgcataaaataagtatttctaagggctcagtagaaatttctaccatagggatcatttcatgcatttattttttcatttagtctttgctgttatctgtccctcatcttcataactcagcagtggatttctcaagtttggagatgtaaggcaaaagtataattcttcagaatgtttggattgtagtgatttatcattggctttcagatttgactgtcacttcagatttttgagcaaaaatactaaaaaaaaaaagaaaaaaaattctttgaagagacaggacctctgttgcccaggctggagtgcagtggtgtgattatagctcactgtaacctcaaactcctgggcttaagtgacatttctgcctcaactttctgagtagctagggctacaggtgcgtgtcaccatgcctcgctaacttaccaatttttttatagaagtggggtctccctgtgttgctcaggctgatcttgaactcctggccctcccgccttggcctccccaaaatgttgggattacaggcgagggccactttgcctggccccaaataacattttttcaaaggaatgtaaattttttttgttttagtttcataggcaaagtctttatgtctgggagagattggattttaggatattatagtaacagatgtattcctttgacctaacctgggcaaagcatttattgggctccctgcttcaacccccttggcagaaagatgaaatatgaattgtatcttcatcaagcttatgctacctttatacagttgtagaaaatacaggttagtaaatagtaattttaggtaacagtatcaaataggaagaagtaaataaaaaagaaaggacagtgtctttccattaaaaatgtaaaaaagtttggttaaataagatgaagttatctttaagatttttatttgtaactatatttatggtgggttttgtttcttagtgttttaaaggctttttaattgatttttggcaagaggatatattgtaagcagtgcattgctttgacttactgagtcttgacaatctgattttgtgcctataaaattaaagaaaatgcttagggtagtatgtttttaaaagctaattaagaacttcaggcatttggacaactctcttttttttacatatttctcagacctagacataataaatagatatgtttttaaaagtgaacaggttagaaagcatcactatttactgctgattatgaaacattttaatagcatcaaatttgtaattttagaattttgctttggccttgtttttattttgaaagtttttaaggaatgttctgcaaatgtagtactttagttgaaatggcaaaattttcttgaagagtgtgaaatgttaaaatgaaagaaaacagcaaaaacattcactgtttgagcacaatgtagtttgggacagtctatattgtgctttggataaaatgagcattcacatgatccctttggttgaaatactaatgctcctattttattgtgtaatgactaaccattttaaagatgaactcttattctcagccaaaacttgcaatctgaggttatatgtctatatatgaatgagcttacctttcagatattatagctgattcttccctaattctctcagttgaaatgtaccacaacggttttgtcccttttcttcctcctgcctatccacactaattggtcatagtaattcaggtagtaactcctggggctttataaattattataaatattgttgactatttagagtgagtaatcagcaggagggacaaaatggcttgaaagtggtatctctgttttttaattttttatacttttagttataactttcagtatttaggaagaaatacctgaaaggtagatacagattgcaacatgcgtttgtgattattttgactgtgcacaaaagtttatctttaaattagtagaaatagcaactataagggtggggttaaaatataaaataaacccatgggttgtcttgctgctccttaagtaacacaccagtgatgcttgtaaacactttctatagaaagtatctgtgacaatactttaatatttggccaaaagcttataactcctagaggatggtaggaagcttgatagcatccaagctgctaaattcttaggagcctgttcgtgttaaagtacgtgagcctatgagcagtcatttatgctgtgaattcatatctggctgctacttttccttcgacagataagcctatttggctgctaaagggctttttatttggttcttcctcctggtgtgagcatgtataaacagcaggacgttatatagagtagcaaacaataaaatgaggaaaatgcatgaaaactcagtatatgggtgaatagatacttgtttaatatgtgtaattaaacttggtagcataatgtttttgaaactttagatgtaaatgtgtgaatgtctgtccatttgtgaatcctgagagttgccagtcctataagcaatatattcacatgcttctattctccaattttcagtactatggactacaaattttggaaaatgtgataaaaacaaggtggaagattcttccaaggaaccagtgcgaaggtaggaaaataaagaattataaattcagagttttgtttttcctggcatttttattgtagttgactgtttgagggggcatgtaatgaatctttagtatattttgctctaatggagcttattgcttttatcatgaagcaaacaggtctgtttgtattggtgggtacaggaaggccacttacaggttatcttttgggagaaagaggagactggactgttgaaaactctgacaataaatattctagttaaaaatatgggctatggcacagtggcccacgcctgtaatcctaacacttcaggaggccgaggcaagtagatcgcttgagtctgggagttctataccagcctaggcagtatagcaagacctcatctggacaaaaatttaaaaaattagctgggtatggtggttcatgtctgtggtcccagctatgtgggagcattgcttgagctcaaaaggtcgagactgcagtgagccatgatcctgccactgcacttcagcctgggtgacaagagtgagaccccatctccaaaaaaacatatatataaataaaatatgggccgggcacagtggctcaagcctgtaatcccaggacttcgtgaggctgaagtgggagggtcatttaaggccagaagtttgagaccatcctgggtaacatagcgagaccctgtgtttacaaaaaatttaaaaattagccaggtattttggtgcaggtggcggcggggacaggggtatcagtggggtgaggtaggaggatcccttgagccaagaggttgagactgcagtgagccatcattgtgccactgtactctagcctgggcaacgagcgaaactccgtctcaaaaaacaagaacaacaacaacaaaaaaaaccatatgtaaggttaactcgggaatggaaaagccaagtactaaagatcacaaagctgttttgccttttgtggttctgggaatgccttggaagaggttggcttctgaaatgaagaaagatcagaaaatgaaggtgtagtgatacctgttaatgagtaatttaacttttctgtctgtgctaccttgaggaatgtagtcatattttgagaaacctgaggcaacattagtttcttgggattctttgatttagctaatttcagttatgatacactgcctttttacctactatatttcatttatctctgaaaaatagaaatttttttcttgactttattatggggcacatgatacttctagtagtattttcatttaaaatatgtctaatttctttgattatttgtcttttaagtattgtccttcacctgcattctcttatcatcattatggtagaatagtgacatggatttacttagctaatctgacttaaaccttgacaaagtttgagcacatttagagttgaatgtgatgagattttaatgccagtgtctttttttaagaatattaagtatattcagtggcaatatctttaatacatcataaatcatagattaagagtgatagtgcaggagcaaataatgtgccctaaaagaggttctcatttctttaaatgttttattatggtttgaaactattttagatcacgttctgtgatggactgagaaattaataagcacaatttgactatgtggtccaagtaggtccttcatactttattcttcagggatctttagtgtagtcattccttgtttctttactactattgttttactcatgtgttatgagccccagatttaattttggccatggtctgccgtaccaagaaaaggtgatttacttctgtcccattttactgttgtataattttaaatcctccttttgttcttaaatctgcatctctgttttttatcacatttgatggttctggaagatgttttccaggttgaaaatagatatgattatactagtttatcaacactgtagttacatttgttacagacaaaattaatttaaaaaatttttgtttctttctttcttctttgttgagacagattctcactctgttcctcaggctggagtgcattggcaccatcactgcagcttcaaatagctgcggtcaagcaatcctcccacctcagcctcccgagtagctgggaacataggcatgccccaccatgccctactaaattttttttttttttaatgttttgtagggatggtgtctcgctgtgttgcccatgctgctggctgctgggcttgagcaatcctcccaccttggcctgccagagtgctgggattgtaagcatgagccaccatacttagtcaacatgattacctttttaattttaactgggaggcttctctaacctaaagatttatttcacaaaatacactagaacttctgaacattaattttccttcatctttaagtaactttggtattggaaattacataaattaatttaaaacattttatttcctttttctgtaagtgtcctgtcttttaaaggtattcgctttgctttttgctgtagctataccctttgtccaactaccatagcatatatatttgttcacctggggtgcatattgtgcgtttcctttgtaccgattactactaaatattaaggttataaaaatatacatgtacatcaaagtgctgtatgtcacagtgttatagttgggaagacaaaacacatgtaaaagaggaatcataaatcagcaaattaggtgtatataatgagtgcttcacaagctaaaagaacagaatgatgtctaagtccggccctttagctaagtttcattcacataattggaaagaaatgcctggtatattttaaaggaaggaaaggtttcactgcataagagtatgccaaaattagattcctgcattttttttctgatgtagaatttgttttatctgcttttaggttcttgtccacagcatgttaatttttacgtggtgtttttttttttttttttttttttttgagacggagtcttgctctgttgcccaggctggagtgcagtggcgcagtcttggctcactgcaagctccacctcctgggttcatgccattctcctgtctcagcctcctgagtagctgggactacaggcacccgccaccacacccagctaattttttttttttttttttagtagagatggtttcactatgttagccaggaaggtctcgatttcctgaccttttggtcctcccgcctcggcctccatgcctgttgagattacaggcatgagccactgcctggctaacatgttcttttaaattaatgacattttcaatttaggcctcttgtataaatactgtcaggaaaatctcatgattcttgagtgggttagatgtctcttgctgtgttatacgttactgtatcctgtaccagtgggtcacaggagaataaaattttaaagagcaaaagataggctcagcacggtggctcacgcctgtaatcccagcactttgggaggccaaggcaggcagataacgaggtcaggagtttgagaccagtcttaccaacatggagaaaccctatctctactaaaaatacaaaaattagccgggcgtggtggcacatgcctgtaatcccagctactcaggaggctgaggcaagagaattgcttgaacccgggaggcggaggttgcagtgagctgagatcacgccattgcactccaacagagcgagacttcatctcaaaaaaaaagagcaaaagatagacataattagaaagtaaggatgtttaaaagaacatttaattttccaaaagatatttttatagcaagagaaatggcgagataataaaacatttaaataagttgagatttgttatataaaatttattacatttctctggattttcatttagctttaggccgtaagtgtgtgtctatttgtttgtgttttatgtgttttgtccctcacaccccacattacacttggctgttttagtcactttattccccatccttcaaactataagctccttgatattggggctcagagtgtctttttttctttggtttttttttggtctgtttttgtgtttgtttttgtttaagacagagtctcgctctgttgcccaggctggagtgcagtggcgtgatctcggctcagtgcaagctctgcctcccggtttcacaccattctcctgcctcagcctcctgagtatctgggactgcaggcgcctgccaccacgcccggctaactttgtgtgtgtgtgtgtgtgtgtgtgtgtgtgtgtgtgtgtgtgtgtgttttgttttttgttttttgtttttttttttagtagagacggggtttcaccgtgttagccaggatggtctcgatctcctgacctcgtcatccgcctgcctcggcctcccaaagtgctgggattacaggtgcgaaccaccgcgcctggctttttctttgttttttaaagatgtagggtttcactctgttgctcaggctggagtacagtggtgcaatcatggttcactgcagcctggaactcctgggctccagtgatcctcttgcctcaggctttttttcttttttttttgtgagacagagtccctctctgtcacccaggctggagtgcagtggcgcagtcttggctcactgcaccctctgcctcctgggctcaagtgattctcatgtgtcagtctcccaagtagctgggattacagatgcacaccaccatgcctggctaatttttgtatttgttttagtaaggacagggtttcgccatgttgaccaggctggtctcgaactcctgacttcaggtgatcctcaccctcccagagtgctgggattataggcgtgagccattgcatcctgccctcttgcctcagccttgagagtagctagcactgtaggtccgcaccaccatgcccagctaattaaaaaaaatttttttttttagagatagagtctcactgtgaagcccaggctggttttaaactcctgggtttaaagcagtcttcctactttgccgtcccaaattgctaccaagcctggctgggaaattttaatatgtcaaatggaagaattccctaataaagagtggttgctattcatggtagtcttttatttattcatttgttttgagacaagatctcactgtatcacccatgctggagtacagtggcacaatcatagcacactgcagccttaaactcctgagctcaggcagttaccacgccttagcctgccaaaatagctaggactacaggcatgtgccaccacacccagctaagtttttctaattttgatagagacacagtttgcctatgttgtccaggcttgtcttgaactcctggcctcaagtgatgctccaacctcagcatcccaaagtgctggggttacaggtatatcaccactcctagccatcactgaagtcttaaaggtcctctaggactgccagtggtgttgattctttatcagagtcatgattcagataattccccatccctttttaaaaatggcatttaggctgggtgtggtggcttacacctgtaatcccagcactttgggaggctgaggtgggcagatcacctgaggtcagttcgagactagcctggccagtgtggtgaaacccggtctctactaaaaataccaaaattagctgagtgtggtggcagatgcctttaatcccagctaattgagaggctgaggcaagagaatcggttgaacctgggaggtggagcttacagtgagccaagacagcacgactgcactccagcctgggcaacaagagtgaaactctgaaattaaaaaataattaattaattaattaaaaatggcatttagataattcaaataaaaaaaaagaggaagcctcctttgttcctgttggggggaaagatgatgctatataaaggtatttctgtactttttatttaaaccaagggattgttttaatcagttaatgtgtatggcttatagatcatttcattgattgataaaaacttactcacaggcggggcatggtggctcatgcctgtaatcccagcactttgggaggctgaggcgggcagatcacctgaggtccggagttcgagaccagcctgaccaacatggagaaaccccatctctactacaaatacaaaattagccaggcgtggtggcgcatgcctgtaatcccagctattggggaggctgaggcaggagaatcgcttgaacccgggaggcagaggtcgcggtgagctgagatcgcgccattgcactacggcctgggcaccaagagcgaaactcagtctcaaaaaaaaacccacacttggctcacattgaatagagaagaagcgaatttatgaaaaaagtaatccaaagtggaaagatcgtaattacaaggtttgattttttttttttgtttggtttggttttttcgaggcggagtttcgctgttgttgcccaggctggagtgcagtggctcaatctccactcactgcagcctccgcctcctgggttcaagctattctcctgcctcagcctcccgagtagctgggattacaggcatgtgccaccatgcaaggttggttttgttttgttttgtttttttttaattttgcgacggagtttcgctctgtcgcccaggctggagtgtagtggcgagatcttgggtcactggatgctcagcctcctgggttcacaccattcttctgcctcagcctcctgagtagctgggactacaggtgcctgctaccacgtctggctaattttgtgtgtgtgtgtgtgtgtgtgtgtgtgtgtgtgtggtttttttttttttttttagtagagatggggtttcaccgtgttagccaggatggtctcgatctcctgacctcgtgatccaccctcctcggcctcccaaagtgctgggattacaggcgtgagccaccgtgcccggccaggttggattttataagtagttgggccactaaaatttctgagttgtacagtttcatgtctttagttggcagaccaaagctgatccactcataaaattttatttagtgctctcctttgacgtgagacacgtggtatatttattggcaccgtaatactggctacattatttgacctcatatttcagtttgtgttgcaaggttttgggcattagagctaatgtataggaagccctgtgcttacatatgctgagtatgagtaagtagtgggttaccaactgtttttgatgaaatatctgcatttcaccaaattgccatataccagtctcaaaatatcctgaaccttctgaaataccttcctaagtgagctcactaacacctacttttctgtgtcctttacaattttttcaccacaaagtctcaaagtttcagaaacggaactaatagggtcacttctgctgaagatctcctgtagtattgaagatatttaacatgtttcctttaattgatattggcctttgagaatttttgtatttgccttatttattaggtttaaagtgtacagttggataagttttatcttgtgcatgctcctgtgaaactacctctgtataatcaagatctgcctctatccgattactttcaccttcactgcccctcttcacatgtgcttgttgtcacttgcttggtaagagtggaatggctggattgtgtggatttttttttttttttttttaagacagtcacactactctgtcgcccaggctggagtgcagtgtcatgatcttggctcattgcaacctctggctctcgggttcaagcgattcttgtgcctcagcctcccaagtaggtgggattacaagcatgcaccaccacaccagcataatttttgtttttgtaatagagtttcgccatattggcctggctggtctcaaactcccgacctcaggtgatctgtccacttcggcctctcacagtgctgagattatactcataagccactgcgcccagcccatatggatgttttggtgtatgtttaagcatccaactgtattccaaagtggtcatgtcagtctcaccagcagtgtataagtatgtttcacatctcggctgacatttggtatagacaatgtttttagtttggctattgtagtgcatatacaatagcatctcatggtggttttaatttctttcttttttttttttttttttaaagacagagtcttgctctgtcgcccaggctggagtgcagtggcctgatctcggctgactgcaacctctgtttcccgggttcaagcgattctcctgcctcagcctcctgagtagctgagactacaggcatgtgccaccacacccagctaattattttgtatttttagtagagacgagctttcaccatgttggccaggatggtctcgaactcctgacctggtaatcagcccacctcagcctcccaaagtgctgggattacaggcatgagccaccacgcccagccttaatttccatgtggagtagtgttgttctgtgttccatcacatatccttacatgttctttgccatgccagtatgtttttggtgaaatgtctgttcaaaaattttgctcagttttttttttttttgagacggagcctggctctattgccccagctggagtgtggtggcacaatctcagctcactgcaacctctgcctcctgggttcaagcgattctcctgtctcagtctcctgagtagctgggattacaggtatgcaccaccacgccctgctactttttcgtatttttagtagtagagatggggtttcaccatgttagccacgctggtctctatctcctgacctcgtgatccacctgcctcagcctcccaaagcgctaggattacaggcgtgtaagcccaccatgccccgccaattttgcccagtttttattgggctattcccttattgagatctaagggctctttgtattctagtcaggagtattttgttaactgtatattttgcaagtgttttgtctgtggcttcctgtttaatttttgtaatggtgtcttttgcagagcaaaaatttcagattttgattaaaatcagtgttgatttttttttctttatatagttgatgttttttgtgttgtattcaagaaatctttgtcatgcaaaggtcacttaagattttctgtaagtttttggctgggcacagtggctcacgcctgtaattccagcaatttgggaggccgaggcaggcagatctcttgaggtcagcagttcgagacgagcctggtcaacagggtgaaaccgcatgtctactaaagatacaaaaattagctgggtgtgttggtgaattgcttgaactggggaggcagagactgcagtaagcctagatcacaccactgccctccagcctgggtgacagagcaagactctctctcaaaaaaaaaaaaaaaaaaaagatattctgtacgttttcttatagaacctttatagttttagcttttgcattaagatctgtgatttggctgggcacagtagctcacaattgtaatcccagcactgggaggccaaggcaggcggaaacaatacaaacaaattagccaggcgtggtggcatgcacctgtaatcccgactgccaggaagctgaggtgggaggaatgcttgagttgagttcgggaggtggaggttgcagtgagccgagatcatgccactgcactccagcctgggcgacaaagaccctgtctgaaaaaagcatcatgtgattcattttactcaatttttgtatatgaggtgaggtaagggtcaaggtttatatatttatttgagacagagtcatgctctgtctcctggccagagtacagtggcgcgatcttggctcactgcaaactccacctgccagattacaggtgcacaccaccacacccggctaatttttgtatttttagtagagatggggttgccccatgttggccaggctggtctggaactccagacctcaagtgatccgccagtctcagcctcccaaagtgctgggattatgtgtgagctaccgcacccagctccccaactttgtttctaaaaggtttggctattgttggttttttgctgttccataaaaattttagagtgaaatctggcaaatttcaacaaaagctgtcctgaaatttttattgagattgccttggatctgtggatgcatttggagagaatgaacatctttaatgtcaattcctgattatttcttgctaatatagagaattgccattgttcacttatctcttgaacgtgtagtttaatccagctagtcaaagcccagttcaaactcactttcccttcctgttgtgagaaaacacctcaattttgcaaaagctcttggaatttaacatttctgctgcttttccctgtatgtgtggtgtttagtcttttcatagttcgttgactatggaattcagagcagaaaccctatttcctaatttccttgggaagttttcagaactagatgataatgtaagtttctaataagttgatagtgttactcagaggtgattgtttcatttatgattttgaaaagaaaatgtaaatattagacttaagtccttgcatctaaaacaaattcatgagaaatcccacagaatacaatgttagagatgggagcaaaaattatcagtctaatctcagagagttgacaggcattccaaatcgttttttgtcagtatttaaaccatggtaggataatgtaagaaatatacttaatgcctggtgcgatgtctcacgcctgtaatcccagcactttgggaggcctaggcaggcaattgtctgaggtcaggagttcgagaccagtctggccaacatggtgaaaccccgtctctactaaaaatacaaaaaaaattagccgggcatggtggcgtgtgcctgtaatcccagaatcccagctactcggtaggttgcagcaggggagttgcttggaccagggaggtggaggctgcagtgagctgtgatcatgccactgcattccagcctgggcgacagagcaaggctccgtctcaaaaagaaaaaaaagaaaagaaaaagaaatatctgtaagctataaattatgtttttcatttctaaaaaaaacaaggcaggccaggcacagtgattgaggcctgcaatcccagcagtttgggaggctctcttgagcccagaaatttgagatcagccaggacaagatagttagacttctctctactaaaaatacagaaaactagcagtgtatggtcgagtgcccctgtagtttcagccactcaggaggctgaggcgggagaatcatttgagtccaggcaggaggtcgagccctgattgattgcaccactgcactccagcctgggcaacagagtgataatatctgaaaagataggctgggcacagtggctcttgcctgtaatcccaggactttgggaggctgaggcaggcagatcacctgaggttgggagttcgagatcagcctgaccaacatggtgaaaccccatctctactaaaaataacaaaaaaattagctgggcgtggtggcgcattcctgtaatccctgctactctgaaggctgaggccggagaattgcttaaacctgggaggtggaggttgcagtgagccgagattgcgccattgcattccagcctgggcaacaagaacgaaactctgtctaaaaaataaagaaaagaaagcagtattttcaggcacattgtatatgattgataggaatagtatttccatttctggttaatgtaacaatttgccccattccaagtattttgattacaggcctccatgaaaggcctatacttgatacctaacagtgtttgatccctagcttacatccatgtaacttttttttttttttttttttttgagataaggtctcacgctgtcgcccaagctggagtgcagtggcgggatcatggcttaactctagcctcaacttccggggctctagcaatcctcctgcgtcagtctcctgcataactgggactacgtgcgcatgaatcatacctggctcactgtttctattttttgtagagatggggtctcgctatgttgcctaggctggtcctgaactcctgggctcaagcgatcctctgcctcagcctcccaaagtgtttagattacagtcaagagctactgtgctcgacctgctttcaccttttggctatcatgagtgatgctcctgtcaattttaataaaattttaatcttttagattttttgtccagtgtgtttgaggccataaacatccatttaagaatggcggatgtgcatatagatccatttctcttaacattatcaaagcaggttaaattatagattatctgtgggaaccctaacttaactcctgctttagaattattgttagctgtttgtcttccatgtggcattgttcttattaatatttcattgagagaacagtagtaacaatatcctgtatacccttgtgtaagtaaagagagcagatcactattttattgaccatctttcaaaagatcgattttgtgtgtttttttgttttgttttgagatagtctcacattgtcgcccaggctgcttggattgcagtagtacaatcttggctcactgcaacctctgccttccgggttgaagcgattcttgtgcctcagcctccagagtagctggtactacaggtgtgcaccaccatgcctggctatttttttgtattttaatagacaggtttcaccatgttggcctggctggtctcaaactcctggcctcaagtgatccacccacctcggcctcccacagcgctaggattacaggcttgagccaccacatccagccaattttgatgttttcatggactgatacttgtaataaacatttcaattatatatagcattgatgtagaaatgtaccaaatttacatttttttagcttatggaataaataaatgtttaaactgaaattgattcgaaactagattgaacttgcctttttcctatttgtaatttacatttttaatagtgtatcaaaagccttaaaccattttctgtggtgcaggttgactgcctcttgctggaaatgcttgggatgagaagtgttccagactttgggctttttcagattttggaatatttgcattatgctcacgagttaagcattccaaaactgaaatagcccaatgagcatttcctttttttttccttttttttgagacagagtttcgctcttgttgcccaggctggagtgcgacggcatgatctcgactcactgcaacctctgcctcctgggttgaagtgattctcctgcctcatcctcctgtgtagttgggattacagtcatgcggcaccatgcctggctaattttgtagttttagtagagacagggtttcttcatgttggtcaggctggtctcaaactccaaacctcaggtgagccgcccgccttgtgttgggattacaggcgtgagctatctcacccaacctgagcatttccttttagtgccatgttggtgctttaaaacttgcagatttggggttgggcgtggtggctcatgcctgtaatcccagcactttgggaggctgaggcaggtgggttgcctgaggtcaggagttggagaacagcctggccaacatagtgaaaccttgtctttacctaaaaaaaaaaaaaaatcagctgggcgtggtgacgggcacctgtaatcccagctactctgggaggctgaggcaggagaatcgcttgaactcgggaggtggaggttgcagtgagcggagatagcaccattgcactccagcctgggccacaagaatgaaactccatctcaatcagtcagtcaatcttgcagatattggagtgtttcagatttcagatttggggtacttaaactgtacgtgaaaattagctgctggggaggagaggaattggaatatgtaacatggactcccacattttaaggatttttctaggactgcatctttctcttaataagtcagatccttatttggttgaaaatgtttactgcatgactatcactgactatgtaagatgctgatgtacaactctatgacttgaagattgagttgcttctatgggaatatgacaccatttgaattaatttgttctcaatattttaaagagttttagtgaattctgttcatataaaaatcaggttcaataatgcgtgctttttacgctatcattgagtatccagtgtttacaaggtgtttctgagggataagattattattgctgtgtaaagaatttggcagatggtgtgtaccttctaagttagcttgaggtttatttaaatctcatctttttagcttgctgaagttgatactatgcagttgcaagtttatattgactatttgatattgctgtgtttttatttgaaatgggactgttagacacatttttctttatattgagcaatagagctggaatattaaagatgtatgcattaacccttgcatttggaacatttacatgtcataagctgcctttcagtaagtggttaggcatttctacgggtgtgtattatattttgaataaattttatatggctttccaagaaacaattagagcatttgacccaccgactttgttgtttatttttatttttttgagatggagcctcccgcagtagagatagagtttcactatgttggccaggctggtcttgaattccgcctcaggtgatccacgtgccttggcctcccaaagtgctgggattacaggtgtgagccaccatgcccaacctgacctaccaactttggatgtgaatttttttcatttatattgagaagaatagggtcttgggccactagattgtaccagtgctaagtcagtatctgaatccattgaagatcctgttggcaacgtcaggacttatcaaagacacacaacttcaatgagaacctttctttggaattaattaattaatgatatggagccttgatctgtcactcaggctggagtgcagtggcactatttcagctcactaggaatgcatctttctcttctctttctccacctcccaggtttaagcacttctcctgcctcagcctcccgagtagctgggactgcaggcacaagccaccatgctgagctaatttttgtatttttagcagagacaaggttttgccatgttggccaggctggtctcgaactcctggcctcacgtgatctgcccacctcagcctcccaaagtactgggattacaggcttgagccactgtgcccggctgccttgtttgatttttttttttaaagagacagagatcccctctgttgcccaggctgaagtgcagtgacacaatcatagctcgttgtaacttcagtctcctgggtgatgggtagaattctgccacagcccaagtagctaggagtataggcacgaacgactgtgcctagctaatttttttattttttgtggaaatggggccttgctgtgttgcccaagctggtctcaagctcgtttcctcaaaccctcctcccatgtcagccttccaaagctccaggattacaggtgtgagccatcgtgcgtgacttgtttttgatttttgtatcgttttcttcactcttttttttttttttttgagatggagtctcccgctgtcacccaagctggagtgcagtggcacaatcttggctcactgcaactgcatcttgggttcaagtgattctcctgcctcagtctccccaagtagctgggactacaggcgcatgccaccacgcccagctaaatttttttgtttttattttttgcatttttagtagagacgaggtttcaccacgttggccaggctggtcttgaactcttgacctcagatgatctgcccgtctcggcctcccaaagtgctgggattacaggtgtgagccaccgcgcccggccttcttcaccttttgtatcaagctttttaaggaagagcttagaaagccagtttaaaggaattgaaatgtgttatgtaaatgtctgttttgcaactgagacccactaatttatttagaacaaaaagtcagagaccagtaatgggtccttttctgtcaaatttcaagctgagctgtttctgctacttagaaacatttcgattttctacctagatatgtattatatcattgctaattatttatttatttatttatttatttatttgaggtggagtctcactctgtcgcccaggcttgagtgtactaatttatttttaagtgcagtttaacattggatttttttttttttttttgagacggaatcttgctctgtcgcccagactggagtgcagtggcacgatcttggctcagagcaacctctggctcctgggttcaagcgtttctcctgcctcagcttcccaggtagctgggattacaggcatgagccactgctcctggcctacagttggaattttttgttgttgtttttgagacggagtcttgctctgtcacccaggcttgagtgcagtggcgcgatctcagctcactgcattgtccatttcctgggttcaaatgattctcatgcctcagcctcctgagtagctgggattataggcgcgtgccaccatgcctggctaattttgttgtatttttattagagacagggtttcaccatgttggccaggctggtctggaactcctgacctcaagtgatctgcctgcctcggccttccagagtgttgggattacaggcgtgagccatccgtccggctggaatgctattcttaattgacctgcatttatttatttatttatttatttggcaagccttgaggaagggatttggggaatgaacaatggtacttgatcaaataatccttgtactaggcaatcacagtttctagggccactgtacctggccatgggggttttattgataataatctgtaaggaacaaaagggttagtactatcggaatttttgattagatgtagtgagcattaaggacatatggaaagtagtttgaagtaaaatatatacagtataagagtcagaatcagccaggcgcggtggctcatgtaatcccagcacttcgggaggccgaggtgggcggatcacctgaagtcaggagttcgagatggcctggccaaaatggtgaaaccccatctctagtgaaaatacaaaaaaaagccaggtgcggtggctcacgtctgtaatctcagcactttgggatgctgaggcaggataatcgcttaaacctggaaggcagaggttgcagtgagctgagatcacgccactgcacaccaatctggggtacagtgaggctctgtctcaaaaaaaaaatacaaaaaaagtagccagacatagtggcatctacttgtagtccagggtactcaggaggctgaggcaggagaatcacttgaacccaggaggcggccgtgtcagtgagcctagatcacaccactgcactccagcctggaagacagaggaagactccatctcaaaaaaaaaaaaaaaaagtgagaatgttgcatagattacccaagttaattcttataatttagtgttcatttaaaaggaaaattgatttcctactttttgtttttaaaaatagtattaggctgggtatggtgggtcaggcctgtaatcccaacataaaatgtggccaaggcaggaggattgcttgaggtttggagttcaaggccagccccagcaacaatgagaccaggaaaaatcagccaggcacggtgctaagcacctgtggtcccagctagtcagctagctgaggcaggaggatcgcttgagtccagaagttcaaggctgcagtgagctgtgatggcaccactgcattctagtgtgggcaacagaccaagaccctgcctctaaaacaaaatgtaaaaaatatattttccatttccctattcattttatgtatttgtagcataaatgttactatgcatattgacacttaacaccattagatttctcttacatgtattacgttgctttactgcattagtaatatttttttcgtaattaggaaagtccataattactgttacagaaattttttatttgggatattgtgggaaatggctagtgttgtcatagttaataaaaattatataattaagtgccattgaagaaccatagtttgaaagtgaatttaatacattagctcatagttatacaatctcacaagcattttgctgccttcaggttgtcagtttcctgctaatgctaatgactaaattttttatttttcttttcaacgaaaatttcactcagttctatatatgccagatgaggcttggaacatacagctctacaacctttaactgcttttccaaaaatctgaacgctatgaaaatgaaaaatcttcataatttaactgatttggtgacaaagcgtaaagtgaacagatgtgagagtatttgtaattgttaattttacgtagtaggaaatagtaatttgttcaattagggttgctacttcatatccttttagtgtttcaatataggtgtaccacactacttttcctttaaaaatgttctcagaatttaacattctgcaacactcttgaaccctgtgattttggagaatggaacctatagtagatgctcagcaaattctacatgatgcaaattaaaatcaaggatatgagtatcatgtcttaactgtttaaagagtaggttttactatgaagagatccataagtaaagagcatttgaaatgaaaactttttcctaaacttccctcttttttttaacattgtgtgtgtgaagttaatgttgtatttctaatatgagcttaatgttgcaattaatgtatagtggaaaataataacacgtatattaattcatttttgagacaagagttcgctctgttgcccaggctggagtgcagtggcatgatctccgttcactgcagcctccgcctctaggcctcaagcgatccaccggcttcatccttccaaagtgctgggattacaggagtaagccactgtgcccaagccatcaataaatttttatgggttagaagtttgggccaggcctggtggctcatgcctataatcccagcagtctgggaggccaaggcaggtggattacttgaggtcaggagtttcagaccagcctagccaacatggtgaaaacatgtctctataaaaatacaaaaagtagctgggtgtgctgggcgcagtggctcacgcctgtaatcccagcactttgggaggccgaggcaggcagatcacgaggtcaggagatcgagaccatcctggctaacacggtgaaaccccatctctactaaaaatacaaaaaaatagccgagcatggtggcgggcgcctgtagtcccagctacttgggaggctgaggcatgagaatggcgtgaacccaggaggtggagcttgcagtgaggcgagatcgcgccactgcactccagcctgggcgacagagcgagattctgtctcaaaaaaaaaaaaatagtagctggatgtggtggtgcgtgcctgtaatcccagctgctcaggatgctgaggcaggacaattgcttgaacccaggaggtggaggcggaggttgcagtgaaccaagattgcacctctgcactccagcctgggcaacagagcaagactgtctccaaaaaaaagaaagaaaaggccgggtgcagtagctcacacctataatcccagcactttgggaggccgaggagggcggatcacttgaggtcaggagttcaagatcagcctggccaacatggtgaaaccttgtctcttattgaaaatacaaaaattagccaggcatggtggttgatgcctgtactcgggagcctgaggcaggagaatcacttgaacctgggaggcagaggttgcagggagccaagattgtgccactgcactccagtgtgtgtgacataacaggactccgtctcaaaaaaaaaaaaaaaaaagaaaagaaacacatggaaccaaatcaggatgaaagaaactggaatagcagtttgttataggctgggcttgttggcttgttcctgtaattccagcactttgggaggcccaggcaggaggatcacttgagtctatgagtttaagaccaacctgggcaacaatgccagatcccatctttaaaaatatgaatagcacattaaattcattgattttttttttttaagtcttgctctgttgcccaggctggagtgcaatgacgtgatgtctgctcactgcaacctccacctcccggattcaagtgattcccctgcctcagcctcccgagtagctgggattacaggcacccgccaccacgcccagttaatttttgtatttttagtagagacagggtttcaccatgttggtcatgctggtctcgaattcctggcctcaggtgatccacccacctcagcctcccaaagaattgctgggattacaagcgtgagccaccgcaccgggccggaatttttttaaaatgccaatactggtgacaggattagagtatattaactgattttacttagtctttccattcccacattaattagttctcaaaatttatttgcatgctacaaaagagctcaacaatttttttattacgtgcaatttttttaataggaataaaaaaatacgttgttggcctcattatcaagacgtcatctgacccaacttgtgtagaggtaagagtttattttggagcttattgggagagcataaaatcatttagatattgagtctgactacaacctaattctgtcaagacacatagtcacacatatgcacagtcagtcatttacagtagagctgtaatcatttgttaggattgtctggttatattcttatttatacttacctcaggctctcatttaatcttttacttttccttagaaagaaaaggtgtatatcggaaaattaaatatgatccttgttcaggtaagctttaacttaactgttttccttagaagaattatgcttattatttgaacaaaatgttcgacctacttaggaaataaagtatactaatattttgcagaagtagtgatagtattcttataataataggtaacctactgtctagtacttgaatgttaatttgctgtggcagtaatcatcaaataacgttaaagccatcatttatgtggctgcagtgtggactggactctgttggattcttatttatcttttcttttcttttttttttttttttggagacagtctccctctgttgcccaggctggagtgcagtggcatgatctcggctcactgcagcctctgctacccgggttcaagcgattgttctgcctcagcctcctgagtggctggaattacgggtgcttaccaccacgtttggctaattttttgtatttttagtagagacagggtttcaccatgttggccaggctggtctcaaactcttgacctcaggtgatccacccacctcgacctcccaaagtgctgggattataggtgtgagccgctgcacctggccggattgttttttaattttctgatatgcctgtgcatatttcctttgcatgtatgtctctgagtcctttgatttcctcgtccttctaattgatttccatgcttagtccttaaactgtctatgtagactaaatttataatttttatgtttatctgttttctatagtaatatcataaaattttttccagagaaccctggtatgtgtgggggaaaaaacagtaatttctatttaaataagacttagaaacatccaagcttccaaaaattttagtgtattcagtaattaactccagcttttattatactttagagctttctgttagcccttctctgagtggtgagagagaggagagaatataaagaaggttaacatgtatttttataatctgaaaaatcccttgtgtgtgccataaatagtccagacttgcatacaaatataatgcagttcatgaggcttttggttaaaagtttattcaggccccgattgcagtgcgtcctctcttttaaattcatatatccaaaccctactacatttcaaggctcaaattgcatccaataataagctgtcttaaccggtcactttttatcaccaatggttaattaaatccttgagtctcctaggataatttcttcttttcttgtttgaaatggagtgtcgctctgtcgcccatgctggagtgcagtggcaccgtcttagttcactgaaacctccacctcccaggttcaagcaattctcctgccttggcctccccagtagctgagactactggcccgcgccaccacccctggctaatttttgtatttttagtagagacggggtttcaccatgttggccaggctgctcttttttttttttttttttttgagatggagtctcatcctgttgcccagccttgagtgcagtggcctggtctcggctcactgcaacctctgcctcccaggttcaagagattctcctgcctcagcctcccgagcagctgggatcacaggcacacgtcaccatgcctcgctaatttttgtatttttagtagagacagggtttcaccatgttggccaggctggtcttgaactcctgacctcgtgatcctcctacctcggcctcccaaagtgctgggattacaggcacgagctaccacgcccagcctggccaggctgttctcagactcctggcctcaagtgatctgcccaccctggctccccacaaagtgctgggattacaggcatgagcaaccgcgcaaggcctcctagaataatttctacatatctatcaggcagatactaatacacagacagacccattagacggattggacctttcattaggataattgaaaagggtcctgcggtgattaagataaaagactttgtgttttgttttctacccagtagggtgaagagggtggcacatttcttcctttaataaaggaggagaaaatgaaaagtgatttatccttactcctgcctttatccattacataatttctttgaagtttgttttatttgcctttgagaaatgaagtgcgattaacatttcatgtcttgttttagatactgaaacaagaatggcccaaacattggccaacttttatcagtgatattgttggagcaagtaggaccagcgaaagtctctgtcaaaataatatggtgattcttaaactcttgagtgaagaagtatttg
